United States Patent Application Publication US 2017/0114356 A1 - sequence listing, part 107

SEQ ID NO: 203769 - DNA, 3244 bp, Zea Mays
ctcgccgcagcccgggaaagaaaaggaaatgccgtgcgtgtatcgattcgctacaccacacacacgtacgcaggccgcgtgccggcgcgccattgcactgcaccaccagcctgcctgtgcagagagacggaggaggagacacacagggcagcgaccagcgaaggaccgagaagctagcaacggcaacgagcagaggcccgagcccgacacttgcgctccgcttcccccgccccctccgcctctcccgtctctccaggccgccaccaacaccacaccaccacccgttgccacgctgccggccgcccacgcctcgcgccagccgatcctttcattccatcctccctccctccgcccccgcctcccaattttagccgcacggccgccgccgccgccggccggccggagagcaggagcagctaggccgccatggaggcgaagagcgtggtcatgtcggcgctcgggatcgggatcggcgtcggcgtcggcctgggcctcgcgtccgcgccctgggccgccggcgcctcggcctcctccagggccgcgggggtcaccgtcgaccgggtggagcaggacctccgccgcctcctcgtcgacggcgccgacaccaaggtcaccttcgacgagttcccgtactacctcagtgagcaaacacgtgttgtgctgacgagcgctgcgtacgtccacttgaagcaagcagatatttctaagtacaccaggaaccttgctccagccagccgtacaatcctgctgtcaggtcctgcagagctctaccagcagatgcttgccagggcgcttgcccactattttcaagcaaagttgctcttgctagatcctactgatttccttataaagatccatagcaaatatggcacaggtggcagcacagagaagacggttaaaagatcaatctccgagacgacgcttgaacgtgtgtcgggattgcttggatctctttctattcttccacaaaaggaacagcccaaaggaactatacgtagacaaagcagcatgatggatgtcaaattaaggagttctgagagtatgagcaacttaacaaagctcagaagaaatgcatctacttcctctgatatgagtagcatggcttcgcaaggaccttcaactagtacagctcctcttaggcggtcaagcagttggacttttgatgagaaaattttagtgcaagcattgtacaaggttctgctttcagtgtcaaagaagtacccagttgtactctatataagagatgttgagaagttccttcacaagtccccaaaaatgtatctcctgtttgagaaactactaaacaagcttgaaggtccagtgttaatcctcggatcaaggattgtagatatgaacagtgatgaggaatcggatgacagattgactgttctgttcccatataatatagaaatcaagccacctgaaaatgaaaaccaccttgtaagttggaactcccaattagaagaagacatgaagatgattcagtttcaagataaccgaaatcatattatggaagtgcttgcagaaaatgatcttgaatgtgatgatttaggttcgatttgcctatctgatactatgtgccttagcaagtatatagaggaaattgtggtgtctgcagtttcgtatcacttgatgaataacaaagatccagagtatcgaaatgggaaattagttctatccacaaagagcttgtcccatgcattggaaatttttcaaggcaacaagataagtgataaggacagcatgaaattggaagcgacagatgacgccttaaaggctgctgaaaaggcaactgctccaaccactgcaaaatcagaaacaaaatcagcaacatcactgccacctgctcgggctccggctgctgctgctgctgctcccgctagtgcccctgctcctagaattgagagcaaaacagaacttgaaaagaaggataatccacctccagttgcaaaagcaccggaagtaacacccgataatgagtttgaaaagcgtattagaccagaagtgatacctgctaatgaaattggagtttcatttgatgatattggtgccttggatgatatcaaagaatcccttcaagagcttgtcatgcttcctctaagacggcctgacctcttcaaaggcggtcttcttaaaccctgcagagtggtttggtgaagacgaaaagaatgtccgagcattgttcacgttagcggctaaagtatcaccaaccatcattttcgtcgatgaagttgatagcatgcttgggcagcggaacagagctggagagcatgaggcaatgaggaagatcaagaatgaatttatgacacactgggatggcctcttgtcaagaccggatcagagaattcttgttcttgctgcaaccaaccggcctttcgatcttgatgaggctataatccgtaggttcgagcgaagaatcatggtaggtctgccatcgatgggaagtcgggaactcataatgcggcgacttctgtcaaaggagaaagttgatgaagggctggacttcaaggagctagcaaccatgacagaaggatatagtggaagtgatctcaagaacctgtgcacgacggcagcgtatcgccctgtgagagagctaatccagaaggaaagaaagaaggagctggagaagctgaagtgtgagaaaggagaaactccgtcggatcctccgaagaaggaaaaggaggagaccatcattctaaggccgctgaacatgacagatctgaaagaagcaaagaaccaggtggctgcaagtttcgctgctgaaggcgccataatgagcgagctgaggcaatggaacgagttgtacggtgaaggcggctccagaaagaagcagcagttgacatacttcctctgagcaatatgaaaatcaggcgcaaaaatgtatgaacataatttgagaagtagagtagagcacaaagcagccatgaggaaatagaccgaacatgtaatcgtgtataagaagaacatgagaaaagggtgcgtgttagggggacaaggacaagaaatcaggccgtaaaagccagtatctggtgtaggacaaggaaggacagttttcatctccaccaaaattccagtttgcctgtgctggttgttgttgtattacactaataatggatctgcggtgtagatcgctcttctcttcatcttttcctggtcgcatcatccttctgtatatgtacaaactggtaggttgtggcaacgaaaggtttttaaagcagcttatatatatcttctccaagactcc

SEQ ID NO: 203770 - DNA, 1050 bp, Zea Mays
cgcatttgagaaagaaatggattgtgctacttgctagtgctgctatatttacaagtactgggatacaaggcaatcaaatcctgtgcatattcagcaacttcctgaacgttgctatgctcttactgtgaattatccccttatgattgttggaactgctgaccgtcatcttgttgtcttcaatttgcagaatcctcagacggagttcaagcgaatccaatcaccactaaaataccagacacggtgccttgctgcattccctgatcaacaagggtttttggttggttcaatagaaggaagagttggcgttcatcatatcgatgacgcacagcaaagcaaaaacttcacattcaaatgccacagggaaggaaatgatatattctctgtcaattcactcaacttccaccctgtccatcacacatttgcaactgctggatctgacggtgctttcaacttctgggataaggatagcaagcagaggctaaaggcttttagtagatgcccccttcccattccttgcagtaccttcaacagtgatggttccatatttgcttatgcggtttgctatgactggagccgtggggccgaaaatcacaaccctgcagctgcaaagacatccatctatctccacagtccacaggaaaccgaggtcaaaggaaagccgcgcattgcaacaggcaggaagtgattgcattgaaggtgttgcaaggaaccatgatgtcatccagcagttttgtcatgcctccctcctgtcttggaagtctggtagagtgtaaatttcagctaacttatgcgccgattatagggtttctgtagtacctggtgtttgtggtgtcttcaaaatagattctgtcgacgttctgtgatgatctccttactgcttatttctggcagtaaaatcagtgtatcttaaaaaggttgtgatgtaaattttcgtgcatatggaccccgatactaatggagttttacttcacagataaatcccgttctggtttacgaattacgatgaacatggagcaatccatggataacccgccgagccaatctagaagg

SEQ ID NO: 203771 - DNA, 1460 bp, Zea Mays
ctaactttagctatctggctgtttatattcggatctgatttagttaaaaatgcatagagagagatggcaagtctaaccggcctcaccgcgaaccctaatccgaacaagtcattcgagatactgccgaacccaggtgactctgtctccagcctcagctttagtcccaagagtaatctgcttgtggcaacctcctgggataaccaggtgaggtgctgggagattgttggtggtaacagtcagccaaaggcgtccatttctcatgatcagccggttctctgctcggcttggaaggatgatggaactactgtcttctctggaggctgtgacaagcaggtcaaaatgtggcctcttctgtcaggtgggcagcctcagacggttgctatgcatgatgcccctgtcaaggaggtcgcctggattcctcagatgaatcttcttgtatccggaagctgggataagactttaaggtactgggatacaaggcaatcaaatcctgtgcatattcagcaacttcctgaacgttgctatgctcttactgtgaattatccccttatgattgttggaactgctgaccgtcatcttgttgtcttcaatttgcagaatcctcagacggagttcaagcgaatccaatcaccactaaaataccagacacggtgccttgctgcattccctgatcaacaagggtttttggttggttcaatagaaggaagagttggcgttcatcatatcgatgacgcacagcaaagcaaaaacttcacattcaaatgccacagggaaggaaatgatatattctctgtcaattcactcaacttccaccctgtccatcacacatttgcaactgctggatctgacggtgctttcaacttctgggataaggatagcaagcagaggctaaaggcttttagtagatgcccccttcccattccttgcagtaccttcaacagtgatggttccatatttgcttatgcggtttgctatgactggagccgtggggccgaaaatcacaaccctgcagctgcaaagacatccatctatctccacagtccacaggaaaccgaggtcaaaggaaagccgcgcattgcaacaggcaggaagtgattgcattgaaggtgttgcaaggaaccatgatgtcatccagcagttttgtcatgcctccctcctgtcttggaagtctggtagagtgtaaatttcagctaacttatgcgccgattatagggtttctgtagtacctggtgtttgtggtgtcttcaaaatagattctgtcgacgttctgtgatgatctccttactgcttatttctggcagtaaaatcagtgtatcttaaaaaggttgtgatgtaaattttcgtgcatatggaccccgatactaatggagttttacttcacagataaatcccgttctggtttacgaattacgatgaacatggagcaatccatggataacccgccgagccaatctagaagg

SEQ ID NO: 203772 - DNA, 1511 bp, Zea Mays
ctgccttctcttctgccgttcccccggcgagctctttctctctcgtgcggcaactgggctattggcgaccgccaacgccgacgattacatttacaccaagtgcccaagccgtcttcgactacaccaggtgccaagttttcttcgcgtccttcacccgcgacgagcacccaccaggcatagagagagatggcaagtctaaccggcctcaccgcgaaccctaatccgaacaagtcattcgagatactgccgaacccaggtgactctgtctccagcctcagctttagtcccaagagtaatctgcttgtggcaacctcctgggataaccaggtgaggtgctgggagattgttggtggtaacagtcagccaaaggcgtccatttctcatgatcagccggttctctgctcggcttggaaggatgatggaactactgtcttctctggaggctgtgacaagcaggtcgcctggattcctcagatgaatcttcttgtatccggaagctgggataagactttaaggtactgggatacaaggcaatcaaatcctgtgcatattcagcaacttcctgaacgttgctatgctcttactgtgaattatccccttatgattgttggaactgctgaccgtcatcttgttgtcttcaatttgcagaatcctcagacggagttcaagcgaatccaatcaccactaaaataccagacacggtgccttgctgcattccctgatcaacaagggtttttggttggttcaatagaaggaagagttggcgttcatcatatcgatgacgcacagcaaagcaaaaacttcacattcaaatgccacagggaaggaaatgatatattctctgtcaattcactcaacttccaccctgtccatcacacatttgcaactgctggatctgacggtgctttcaacttctgggataaggatagcaagcagaggctaaaggcttttagtagatgcccccttcccattccttgcagtaccttcaacagtgatggttccatatttgcttatgcggtttgctatgactggagccgtggggccgaaaatcacaaccctgcagctgcaaagacatccatctatctccacagtccacaggaaaccgaggtcaaaggaaagccgcgcattgcaacaggcaggaagtgattgcattgaaggtgttgcaaggaaccatgatgtcatccagcagttttgtcatgcctccctcctgtcttggaagtctggtagagtgtaaatttcagctaacttatgcgccgattatagggtttctgtagtacctggtgtttgtggtgtcttcaaaatagattctgtcgacgttctgtgatgatctccttactgcttatttctggcagtaaaatcagtgtatcttaaaaaggttgtgatgtaaattttcgtgcatatggaccccgatactaatggagttttacttcacagataaatcccgttctggtttacgaattacgatgaacatggagcaatccatggataacccgccgagccaatctagaagg

SEQ ID NO: 203773 - DNA, 2341 bp, Zea Mays
aggaccgccctcttcgctgcacccaatcccttgtcctgtcctcgaaccgtccgccgccgcgttcaacatgggcgacccgccgacgctcaagaggcccaagctcgagaaggccgacgacgactccacctactgcccccgcccgtcctccaatggcgccgcgcccgtacgcacaccaggcgccaccgccgccataggggcggcgccgggtgacgacgtggaggaggaggatgacatcgcggaggaggcggtcatcgccctgatcgcgcaccgcgagcgcgacgtcgagcgctgcaagctcaagttgctccactaccagtctctcctggacaccgcggagatgaagctggaggaggcgcactcgaggctcgccaggttccgagatcgcaagccgccgccaactcggtcggaacccaagccaccgacgccgccaatccagagggaacacaagccatccccgccgccgatccagagggatctcaagccatcgccgcagccgctaatccagaaggctccttcgcccgcgccgcagccgtcggcgaggccgcagcttgtcatccctgggaccagcaaccgaccgaccccgcgccctgagcccatgcctgggttgaagagggccgccgccccgtcatcgtcttcatcaccggcgccaccagagcggtcaaggaaagaggagaagaagcccaagataaagatggaacagaaggagcatcagaacttgattccgagtgttgggaaatcatctgcgactgtgcttagatttcaaggcggaaatttggtctcgagccaacacaggaggaagcttaggtgtcttgagctatgccctgctaatgatcagcttgttgttaccagtgcgctggacggattggttactttatggcaagtggagactagaggaccttctctctcatttcgtggcaaaacggatttcttttccccaaagcatagatggcctgaagatatagcttggcatccagatggtgagacaatttttgctgtatacactgctgataatggtgattctcaggtttcaatgacaaaccttatatcaggacaaataatctactttcttgaaatattactaaatggtgttccacaatttttccgctggactgaaacagaggaaagttactttcctacccgagaagcctcacacaaaaggcatcataaacgacataagtttcatgccctggtctgatgtatgctttgtaactggaggaagcgaccatggcgttatactttgggaagacaaagatgatttatggaaacccaagagagtgcataaggatttccattcatccgctgtcatgggtgttgctggaatgcaacagaaaaaaacaatattatcagtaggctgtgacaagaggataataggatttgatctctctgctggaaggacagagttcaagaacctaattgatagcaaatgcatgagtgtgttagcaaacccatgcgattgcaacttatacatggtgcagacaggggctccaggtagacagctgcgcttgtttgatgtcaggcttaggcaatctgaggttcatgcatttggttggaaacaagagagcagtgagtctcagtcggctctaattaaccagtcatggtctccagatggatggtacatgtcgtctggttcagcagatcctgtgatccacatcttcgacatcaggcatcatggccagaatccttgccagtctgttcaggcacaccagaagcgggtgttcaaagctgtttggcaccgaacgttgccatatctgacctccatatcatcggacctcaacattgggatccacaaatattcatgaaacgttttgggctgattttggcgcttggcaaattttttgttgtggattaggaaccatgaagacctgtgaaattttcaggactttgcatcaatcgaagatacagcaaattcagcatgctttcgctggacctgcttcaccattgactttctctgtgggagaaccatgcagctcagcagctgaagagccccacggttggatgtttgcgcgagctgacccaaacttttccaccttttgagctgctgctggagtggtatggtaggccattcatccgaacactgtttggctcgatgtgttgccctggttatttctgggaaggaaacagtcaactatacacattatatccaacatattcagcaatgtattccccctgtctttttgcagtgaatttgcccttgttggttggttggttgacagggcattcagaattttttatcagcatgattttagagcagctagtataacagtataccaactatatattttctctgtcctacaaaaattaatatgaattttagctttgaatcagaacaaacggagggata

SEQ ID NO: 203774 - DNA, 1915 bp, Zea Mays
aggaccgccctcttcgctgcacccaatcccttgtcctgtcctcgaaccgtccgccgccgcgttcaacatgggcgacccgccgacgctcaagaggcccaagctcgagaaggccgacgacgactccacctactgcccccgcccgtcctccaatggcgccgcgcccgtacgcacaccaggcgccaccgccgccataggggcggcgccgggtgacgacgtggaggaggaggatgacatcgcggaggaggcggtcatcgccctgatcgcgcaccgcgagcgcgacgtcgagcgctgcaagctcaagttgctccactaccagtctctcctggacaccgcggagatgaagctggaggaggcgcactcgaggctcgccaggttccgagatcgcaagccgccgccaactcggtcggaacccaagccaccgacgccgccaatccagagggaacacaagccatccccgccgccgatccagagggatctcaagccatcgccgcagccgctaatccagaaggctccttcgcccgcgccgcagccgtcggcgaggccgcagcttgtcatccctgggaccagcaaccgaccgaccccgcgccctgagcccatgcctgggttgaagagggccgccgccccgtcatcgtcttcatcaccggcgccaccagagcggtcaaggaaagaggagaagaagcccaagataaagatggaacagaaggagcatcagaacttgattccgagtgttgggaaatcatctgcgactgtgcttagatttcaaggcggaaatttggtctcgagccaacacaggaggaagcttaggtgtcttgagctatgccctgctaatgatcagcttgttgttaccagtgcgctggacggattggttactttatggcaagtggagactagaggaccttctctctcatttcgtggcaaaacggatttcttttccccaaagcatagatggcctgaagatatagcttggcatccagatggtgagacaatttttgctgtatacactgctgataatggtgattctcaggtttcaatgacaaaccttatatcaggacaaggctccaggtagacagctgcgcttgtttgatgtcaggcttaggcaatctgaggttcatgcatttggttggaaacaagagagcagtgagtctcagtcggctctaattaaccagtcatggtctccagatggatggtacatgtcgtctggttcagcagatcctgtgatccacatcttcgacatcaggcatcatggccagaatccttgccagtctgttcaggcacaccagaagcgggtgttcaaagctgtttggcaccgaacgttgccatatctgacctccatatcatcggacctcaacattgggatccacaaatattcatgaaacgttttgggctgattttggcgcttggcaaattttttgttgtggattaggaaccatgaagacctgtgaaattttcaggactttgcatcaatcgaagatacagcaaattcagcatgctttcgctggacctgcttcaccattgactttctctgtgggagaaccatgcagctcagcagctgaagagccccacggttggatgtttgcgcgagctgacccaaacttttccaccttttgagctgctgctggagtggtatggtaggccattcatccgaacactgtttggctcgatgtgttgccctggttatttctgggaaggaaacagtcaactatacacattatatccaacatattcagcaatgtattccccctgtctttttgcagtgaatttgcccttgttggttggttggttgacagggcattcagaattttttatcagcatgattttagagcagctagtataacagtataccaactatatattttctctgtcctacaaaaattaatatgaattttagctttgaatcagaacaaacggagggata

SEQ ID NO: 203775 - DNA, 2272 bp, Zea Mays
aggaccgccctcttcgctgcacccaatcccttgtcctgtcctcgaaccgtccgccgccgcgttcaacatgggcgacccgccgacgctcaagaggcccaagctcgagaaggccgacgacgactccacctactgcccccgcccgtcctccaatggcgccgcgcccgtacgcacaccaggcgccaccgccgccataggggcggcgccgggtgacgacgtggaggaggaggatgacatcgcggaggaggcggtcatcgccctgatcgcgcaccgcgagcgcgacgtcgagcgctgcaagctcaagttgctccactaccagtctctcctggacaccgcggagatgaagctggaggaggcgcactcgaggctcgccaggttccgagatcgcaagccgccgccaactcggtcggaacccaagccaccgacgccgccaatccagagggaacacaagccatccccgccgccgatccagagggatctcaagccatcgccgcagccgctaatccagaaggctccttcgcccgcgccgcagccgtcggcgaggccgcagcttgtcatccctgggaccagcaaccgaccgaccccgcgccctgagcccatgcctgggttgaagagggccgccgccccgtcatcgtcttcatcaccggcgccaccagagcggtcaaggaaagaggagaagaagcccaagataaagatggaaggagcatcagaacttgattccgagtgttgggaaatcatctgcgactgtgcttagatttcaaggcggaaatttggtctcgagccaacacaggaggaagcttaggtgtcttgagctatgccctgctaatgatcagcttgttgttaccagtgcgctggacggattggttactttatggcaagtggagactagaggaccttctctctcatttcgtggcaaaacggatttcttttccccaaagcatagatggcctgaagatatagcttggcatccagatggtgagacaatttttgctgtatacactgctgataatggtgattctcaggtttcaatgacaaaccttatatcaggacaaaggaaagttactttcctacccgagaagcctcacacaaaaggcatcataaacgacataagtttcatgccctggtctgatgtatgctttgtaactggaggaagcgaccatggcgttatactttgggaagacaaagatgatttatggaaacccaagagagtgcataaggatttccattcatccgctgtcatgggtgttgctggaatgcaacagaaaaaaacaatattatcagtaggctgtgacaagaggataataggatttgatctctctgctggaaggacagagttcaagaacctaattgatagcaaatgcatgagtgtgttagcaaacccatgcgattgcaacttatacatggtgcagacaggggctccaggtagacagctgcgcttgtttgatgtcaggcttaggcaatctgaggttcatgcatttggttggaaacaagagagcagtgagtctcagtcggctctaattaaccagtcatggtctccagatggatggtacatgtcgtctggttcagcagatcctgtgatccacatcttcgacatcaggcatcatggccagaatccttgccagtctgttcaggcacaccagaagcgggtgttcaaagctgtttggcaccgaacgttgccatatctgacctccatatcatcggacctcaacattgggatccacaaatattcatgaaacgttttgggctgattttggcgcttggcaaattttttgttgtggattaggaaccatgaagacctgtgaaattttcaggactttgcatcaatcgaagatacagcaaattcagcatgctttcgctggacctgcttcaccattgactttctctgtgggagaaccatgcagctcagcagctgaagagccccacggttggatgtttgcgcgagctgacccaaacttttccaccttttgagctgctgctggagtggtatggtaggccattcatccgaacactgtttggctcgatgtgttgccctggttatttctgggaaggaaacagtcaactatacacattatatccaacatattcagcaatgtattccccctgtctttttgcagtgaatttgcccttgttggttggttggttgacagggcattcagaattttttatcagcatgattttagagcagctagtataacagtataccaactatatattttctctgtcctacaaaaattaatatgaattttagctttgaatcagaacaaacggagggata

SEQ ID NO: 203776 - DNA, 570 bp, Zea Mays
cccctcgccctcgcccgcctgtttaaacctgactgtctataacttaccgccggtccgcacccgcccaccgtccctgtccccttccccgtctaagcactcggatcctctgccgccgcgatgagctactacggccagcagcagccgcccgtcagcgcgccgccggcgcaagcttggccgccctttgttgctgctgcctattggaagcctgcttctgagatctaagctgcgcacaacttgttctacaaacaccacttcaatttgcacggttgatataactggggattggcttgttagcgaagaaccgaagataccatgggttcttatgcaaatcacagttctcctagttctttctatcgttctgattgtccgttgcgatgtttggtgtacctagtagtatcttaattatataccttacactgtttacctttccaatggaattcttggtctagctaacattgtgagattatgtcacttttctcgttctctgtagtcattgcattttgctcctggtgttgtcttctttgtgggatgtccaatcttttgtggcctatacaagagcttgtttggttg

SEQ ID NO: 203777 - DNA, 1356 bp, Zea Mays
cggcccagattgctggggcttttcggcccaaatcctctcacccaagtcaacaatttcaggcaaattcgcaacgcctctccagcataggcatagctcgccgaaacgccgacctaaacgcccacaattcgcctctccgatccggcacgacaccgccgccgatccccatcgtcacggtagccatgtccaaccccggctcgttgcccgcctccgctcaccacgagcacgagcacacccctctctgccgctcctgcggggcgcccaccacgtcgccgaccccggcaccctggtcagggaccaccgactccccgccgccggcgtaccgccccatccgtctcccagccatcaacgcgcccaccaacacagccgccatagtcctctccccggtcccacagccgctccccgtgcctcccgccgcgccgccccacgccttcctggtccctgccaagcggatcacctcaccggacgatatcgcccgcttccatgcctccgtccacggccttcacttcctcgggttcgtcgccgcgctgtccgcctccgtccacggccgcaagctctcggacccgctaccgtccccgccatcccccgccatagctgcgctgctcgatctcgtctcggctctcgccgctctcgtcgcttccacccctccgcttccacacagctctcggtacggcaaccctgctttccgcctgtggcacgagaagctcaccgactccgccagcgagctgatctcgcggatcacggccaccgcgtcttcccctgcggacctcgcaggcgccgatgtcgagctagcaccgtacctcctcgactccttcggcaacgccacccgcatcgactacgggacggggcacgaaaccaacttcgccgccttcctctactgcctcgcgaggctcggcctcatcaccgagcccgactacccggccgtcgttctgcgcgtcttcacagcttacctcgatctcatgcgcacgctgcaggacacgtaccagctggagcctgcaggctcccatggcgtgtggggacttgatgattaccatttcctgccgttcatatttgggtctgcacagctgattgaccacaagtacatgaagcccaagtcgattcacaacccagatatcttggaaaatttctccaaggagtacatgtatctggcgtgcgttgcatatgtgaagaaggtaaagaaggggccctttatggagcattcaccaatgttggatgatatcagtggagtggccaattggaagaaagttaacagtgggctgctaaagatgtacaaggctgaggtgcttgagaaagtaccgatcatgcagcatttcctctttggctcactaatcaaatggtatgctgcattgcccacattgc

SEQ ID NO: 203778 - DNA, 1734 bp, Zea Mays
caaaatttcacatcggggactgtgtccaaatgtcagcgtgcaggaaaaggtattcctaatgcatcacttcccttccatcatgctgttccaagcttgacacatatggcactagtcgaacttgaaagagcaggatttctaaagtttgtcataagccagaatgttgacagcctacatctccgttctggtttcccaagggagaagttggctgaattacatggcaattctttcaaggagatctgcccatgctgtaaaactgagtaccttcgtgattttgagattgagacaattggactgaaggatactccaagacgttgttctgataagaattgtggagctagattaaaggatacagttcttgactgggatgatgctttaccccctgaggagatgaatttggccacggagcattgtcgatcagctgatcttgttctatgtctaggaactagtttgcagattactcctgcatgtaatatgcctctgatgtcaatcaagaatggggggagggtggccattgtaaatcttcaggcaactccaaaggataaaaaggcaagccttgtcatccatggacttgttgataaggtcattgctggagtcatgagcaaagaaatgtgttagatggactcttcgagtaacaagtattcatggcctccgagcaccattgccatttcttcagtctgtcaaggtttcctttccagaaagacctgatctgaagtctgtagtgcttaaagagcaaccattctctttgcagagggaaacatcgatgaacaaaccatttttcatgctgttgacattaaatttcagtgatggttgcagctgtttgagctcctcaattggatggcctgttgattttcagaagcgaaaagacagcttcgtcagagatagagctctagtcctacgggagttgtactctgctgcacagcgcgagtcttgcattgggcaacaagaaattctggaaagagagaacctaccaagagctgagacgtctattcatggaatcgtgacaaacatcgttaggtatgacactgaagatgaaaagttggctccacccaagaatgatttgatgaatcacagccgcagcaaccctgcaaaacggcacgtggaaggcactgattgccactcgtcattgccaaagaaactgaagtactttttgaaagacaagaagctgaactgctaaaagtgtaaaaccgtagaaggtagatagagaatgctgtaggtttgtttattttggttattagacgagttatacgtagcatagatgcatgggaagttcgcatgctaaggttgaactcttctgctgcataggaaagttggctgacttcttatattatgcgagcctagcttaggtacctcctgtggggagaagcgattgcaatacatggtagcatgttgtagagctcctcaccccagttagtcagtgactgatgatggtatcctcttaccagtcctctggtggtatcatcttttgttcacggaggtcgatgaagtactgcctccgataaaaaaaagacgcttttgacattattgctccccaaattcttattttgacggctatactttgcccagcgagtaatatctaataaatatacgttttaacgcaattacatttttttttgtccaagaaaaatatttttggaagctgttgaaggtcaagtgtcaaaattttggatagacgttgacgtagtaggttgagagcaggtacttgcgtgcttcccctgtgaagttttgtttcataat

SEQ ID NO: 203779 - DNA, 3902 bp, Zea Mays
cttgccttggctgacggctcccccacggaccacggttgtttggctgcgcggcgtgtgcccttgcggtcattcgtcgtccagccagccgtccagtggccttgcccggcggccggagcgggcgagcggcggtccggccttctcggctcctcgccgtccggcgtcctccgtcactctcgctcagccgctgtgtccggccagcaggtagcagctgtgtccgtccgagtgtccgacgtcctccggcgctcagccattgtctccggcgctcagccgccttgtccggccagccggccaggccgacagggccagcgccgagcgccgctccagcctccaggctcaactccaagtcagaattgagaaataagatggaaaatgattggttgaatcatagaatggtatgctatatagagcgagatatctttgcaattattcgaagtgatgatattttataccattttcaagaattgaagagtatatgaaaaaacttgccatgcgtatgtttaaattcacgtgctaatgttgatgaagttattagaggcggggaagaaccaaatcttctctaattaggtacttttatatttttttatcaagtttattgtatttttatatgctgaattgagattaatactatcttagtctatgtttgtggtatattttgttttagcggtatatttagccgctcaatatattgggggctgtttaaagtaaacttaaagtattatagagtggcccgggacgttaattttatagagctccgccactgatcacagcagcacaagcaggcgcatcacttcgccttccatgcgtactagacggtgttggtcgcgctcgaggtttacttacggggctccgttagcgtcgagcccccggatgtgcctctccttcgggacctgttcctaatcgagggcaagtgtcctagttctttggaccccggtggctgccacgacacccgacacccgccgcctgctccaccgtcgcggctgctcatgccctcgctgctgacctagcgcatgcaaacctcacatttcgaggcctaaaaccctcagcgtcagtggccggcacgtggcctctctagtgcccatcggtgccatggcagctctcgcgccgtggatcctacggcggcgacccgtccgctctgtcgcttctctggtctccattcgtgattcatggcatcgaaggtgtgggtcctcttcctcatatccttcagcatcgttcaagtgtttgtggggatggtttggaccagaggcacacgggcggaggaggccgtggtttcagcagcccgtgaggtgcgggagcacgacgatcacacttgatacagatggcaagtttgcgaggtttggagtcggcgatatgggtgtcaccaagcagaagtggaggcagcagccgcctccaaagaagaagatgtcgagaaaggccaaggtcaaccagctcaagtggtaccgcctgaaggccaagaagaagatgaagtcacccaaccccgaagttaggatcagatacaagcttgaaaaggctaagaggaaggaggaatggttgattgagaagctgaggaagtatgaggtcccgaggacaccggagccagttcatgaccctgagattcttactgaggaggaaaagttttatctcaagcgaacgggggagaagaagaagaattatgttcctgttgggaggagaggggtatttggtggtgtggttctcaacatgcacctccattggaagaagcatgagaccgtgaaggtggtttgcaagccttgtcggcctggccaagtttacgagtatgctgaggaattgacaaggctcagcaaaggcacagtcattgatattaaacctaataatacgattatgttttatcgcgggaagaactatgtgcaaccaaaggtgatgtcacctcctgaaactctttcgaagcagaaggccttagagaaatatagatatctacaatcccttgagcataccagccagtttattgagaagctggagaaggagcttgaagattacaagaagcatgttgctttattcaagaaccataataagggggttgctattgagaaaatcagcaatgaagataccactgttgatgatcctgcaactacctcagattctaaatgagctaactatttggacatgctggcatgatagatctttcagtcgtcaaatcttgcaagcctacatagctcaatgttcactattcatattaaatatgctggcttcagttgtggtgatatagggagctagcttgaaaactcagattcagatagaagaagtaatagccataggattttaaaggcttgcaagattaaaatcctggttgatggaaagctgtattacttgaaaaatacctcgttcatcaatctatctctataaggaaaggctagtagcatgatactgagtgcagatcagccttttaatatttctgcaatctttcctgtaaacacttttatgataaaataggacattcttttgaattgtggcccccttttatgtaggcttttcacttcttgggccttccttgctacataaaagacaatgaaattgtaattttggagctggaatagttctgcaggaccctctcagaaatgaagacatttactgtgccacacgttcacgtactcagtattcatacaccaatgatggacgtcagaagtgcacaagatttctgtactgggccgttcctgagctgagaagatgggcatgtgcagaagcacaatgatgactttaaggatttggcttgataaaaaggaagcgaaaagacagcttcgtcagagatagagctctagtcctacgggagttgcactctgctgcacagcgcgagtcttgcattggcaacaagaaattctggaaagagagaacctaccaagagctgagacgtctattcatggaatcgtgacaaacatcgatggttgcagctttctctttccagaaagacctgatctgaagtctgtagtgcttaaagagcaaccattctctttgcagagtgatggttgcagctgtttgagctcctcaattggatggcctgttgattttcagaagcgaaaagacagcttcgtcagagatagagctctagtcctacgggagttgtactctgctgcacagcgcgagtcttgcattgggcaacaagaaattctggaaagagagaacctaccaagagctgagacgtctattcatggaatcgtgacaaacatcgttaggtatgacactgaagatgaaaagttggctccacccaagaatgatttgatgaatcacagccgcagcaaccctgcaaaacggcacgtggaaggcactgattgccactcgtcattgccaaagaaactgaagtactttttgaaagacaagaagctgaactgctaaaagtgtaaaaccgtagaaggtagatagagaatgctgtaggtttgtttattttggttattagacgagttatacgtagcatagatgcatgggaagttcgcatgctaaggttgaactcttctgctgcataggaaagttggctgacttcttatattatgcgagcctagcttaggtacctcctgtggggagaagcgattgcaatacatggtagcatgttgtagagctcctcaccccagttagtcagtgactgatgatggtatcctcttaccagtcctctggtggtatcatcttttgttcacggaggtcgatgaagtactgcctccgataaaaaaaagacgcttttgacattattgctccccaaattcttattttgacggctatactttgcccagcgagtaatatctaataaatatacgttttaacgcaattacatttttttttgtccaagaaaaatatttttggaagctgttgaaggtcaagtgtcaaaattttggatagacgttgacgtagtaggttgagagcaggtacttgcgtgcttcccctgtgaagttttgtttcataat

SEQ ID NO: 203780 - DNA, 2209 bp, Zea Mays
ttttagcctttttttaaaaaattttgtaggctaggcccacaatactgcagaactaaacactgctcagctgctctcggctctcgcgcctgcctgccctagccgctcgcccggtcccactcccgcataggcgccgccgccgctacccgctacccccgcagccggcactcggcaggttcttcccctggcatccggcactcggcttcttcttgccccggctcccggcgcggcggcgcccgctcctcctccccccgctcgcccgctgcaggtcctcccccgcggcacgcgcccgctgctgcagcctgcagctcccaccccaactggcgattgcagctcctccggtcctccccctgccggcgccgcctgcgagctgcacagctgcagctccccccctggctggcagagctgcagcttcaactctcttgaaggcaaaagcttgcatgctctgcgggcgccgacgccgctcgttgggagcactaggattggcttcagttcggggctccgcttttgctccaacagagtcctcagagggttaactcccattggcgcgatgaagtcgtataggctatcggagctcagcgacaccgaagttagcggcctcaaagctcgtccccgcatcgatttctcatctatttttggcacggtgaatccaatcgttgaagatgtccgtgtgagaggtgatgcagcagttaagcactacacagaaaagtttgacaaggtcatgcttgatgatgttgtcgtctgtgttagcgatcttccagatgcagagcttgatccagctgtgaaggaagcctttgatgttgcatatgacaatatatatgccttccatgtttcacaaaaaatacctgagaagacagttgaaaatatgaaaggcgtaagatgtaagagaataactagatgcattggttctgttgggctgtatgtcccaggtggcactgcagtcttgccttcaactgcattgatgcttgctgtgcctgcacagattgctggatgcaaaactattgttcttgccacaccacctagccgtgatggtagcatatgcaaggaggttctttactgtgcaaagaaagctggtgtgacacacatattgaaagctggaggagctcaggcaatctcagcaatggcatggggaactgcatcttgcccaaaggctgagaagatttttggacctggtaaccagtatgtaacagctgccaaaatgattcttcagtgaagctatggtatctatagacatgcctgctggcccttctgaagttttagtcattgctgataaatacgcgaacccagttcatgttgctgctgatctgctatcccaggcagaacatggcccagatagtcaggttgttctagttgttgctggagatggtgttgatctgggtgccattgaggcagaagttagcaagcagtgcaacgcgcttccaagaggtgaattcgcttcaaaagcacttagccacagcttcactgtgttcgcgaaagatatggttgaggcgatatcattctcaaatctgtatgcccctgagcatttgatcatcaacgtaaaggatgctgagcagtgggaggagttcatcgaaaacgcagggtcagttttcttgggccaatggaccccagagagcgtgggcgattatgcgagcgggacgaaccatgtccttccgacctatggttacgcaaggatgtacagcggtgtatcgctgaactctttcctcaaatacatcactgtccaatccctaacagaggaagggctgagaaagctggggccgtacgtcgcgaagatggccgaagtggaggggctagaggcgcacaagagagccgttacccttaggctgcaagaggttgaggccaatgtaactgtctagccgctgtccatggtctattgcaacgttcagactcgatgtgggatgctggagttcttccctaggaacctaggggaactggactattgatgtcttccaaacaggctctggaatgttagaaagaggcgtttcaactggtgcagctaataatgttcattggaccctgatttgtttcacgaataaacttgagcagaacttactgtgtatatatgcagtgttctcgtattagttatttccctagttgcttctgtaccgattttttggattgcgcatatgcatctaatgtgcttcgtgacatgtatgtgtgaggttttgatggaaaataaaaaaaatggcatcgagcaatgagattttcattggaa

SEQ ID NO: 203781 - DNA, 2237 bp, Zea Mays
ttttagcctttttttaaaaaattttgtaggctaggcccacaatactgcagaactaaacactgctcagctgctctcggctctcgcgcctgcctgccctagccgctcgcccggtcccactcccgcataggcgccgccgccgctacccgctacccccgcagccggcactcggcaggttcttcccctggcatccggcactcggcttcttcttgccccggctcccggcgcggcggcgcccgctcctcctccccccgctcgcccgctgcaggtcctcccccgcggcacgcgcccgctgctgcagcctgcagctcccaccccaactggcgattgcagctcctccggtcctccccctgccggcgccgcctgcgagctgcacagctgcagctccccccctggctggcagagctgcagcttcaactctcttgaaggcaaaagaattgaatcgcactctgttgatgggcagcttgcatgctctgcgggcgccgacgccgctcgttgggagcactaggattggcttcagttcggggctccgcttttgctccaacagagtcctcagagggttaactcccattggcgcgatgaagtcgtataggctatcggagctcagcgacaccgaagttagcggcctcaaagctcgtccccgcatcgatttctcatctatttttggcacggtgaatccaatcgttgaagatgtccgtgtgagaggtgatgcagcagttaagcactacacagaaaagtttgacaaggtcatgcttgatgatgttgtcgtctgtgttagcgatcttccagatgcagagcttgatccagctgtgaaggaagcctttgatgttgcatatgacaatatatatgccttccatgtttcacaaaaaatacctgagaagacagttgaaaatatgaaaggcgtaagatgtaagagaataactagatgcattggttctgttgggctgtatgtcccaggtggcactgcagtcttgccttcaactgcattgatgcttgctgtgcctgcacagattgctggatgcaaaactattgttcttgccacaccacctagccgtgatggtagcatatgcaaggaggttctttactgtgcaaagaaagctggtgtgacacacatattgaaagctggaggagctcaggcaatctcagcaatggcatggggaactgcatcttgcccaaaggctgagaagatttttggacctggtaaccagtatgtaacagctgccaaaatgattcttcagtgaagctatggtatctatagacatgcctgctggcccttctgaagttttagtcattgctgataaatacgcgaacccagttcatgttgctgctgatctgctatcccaggcagaacatggcccagatagtcaggttgttctagttgttgctggagatggtgttgatctgggtgccattgaggcagaagttagcaagcagtgcaacgcgcttccaagaggtgaattcgcttcaaaagcacttagccacagcttcactgtgttcgcgaaagatatggttgaggcgatatcattctcaaatctgtatgcccctgagcatttgatcatcaacgtaaaggatgctgagcagtgggaggagttcatcgaaaacgcagggtcagttttcttgggccaatggaccccagagagcgtgggcgattatgcgagcgggacgaaccatgtccttccgacctatggttacgcaaggatgtacagcggtgtatcgctgaactctttcctcaaatacatcactgtccaatccctaacagaggaagggctgagaaagctggggccgtacgtcgcgaagatggccgaagtggaggggctagaggcgcacaagagagccgttacccttaggctgcaagaggttgaggccaatgtaactgtctagccgctgtccatggtctattgcaacgttcagactcgatgtgggatgctggagttcttccctaggaacctaggggaactggactattgatgtcttccaaacaggctctggaatgttagaaagaggcgtttcaactggtgcagctaataatgttcattggaccctgatttgtttcacgaataaacttgagcagaacttactgtgtatatatgcagtgttctcgtattagttatttccctagttgcttctgtaccgattttttggattgcgcatatgcatctaatgtgcttcgtgacatgtatgtgtgaggttttgatggaaaataaaaaaaatggcatcgagcaatgagattttcattggaa

SEQ ID NO: 203782 - DNA, 2530 bp, Zea Mays
ttttagcctttttttaaaaaattttgtaggctaggcccacaatactgcagaactaaacactgctcagctgctctcggctctcgcgcctgcctgccctagccgctcgcccggtcccactcccgcataggcgccgccgccgctacccgctacccccgcagccggcactcggcaggttcttcccctggcatccggcactcggcttcttcttgccccggctcccggcgcggcggcgcccgctcctcctccccccgctcgcccgctgcaggtcctcccccgcggcacgcgcccgctgctgcagcctgcagctcccaccccaactggcgattgcagctcctccggtcctccccctgccggcgccgcctgcgagctgcacagctgcagctccccccctggctggcagagctgcagcttcaactctcttgaaggcaaaagcttgcatgctctgcgggcgccgacgccgctcgttgggagcactaggattggcttcagttcggggctccgcttttgctccaacagagtcctcagagggttaactcccattggcgcgatgaagtcgtataggctatcggagctcagcgacaccgaagttagcggcctcaaagctcgtccccgcatcgatttctcatctatttttggcacggtgaatccaatcgttgaagatgtccgtgtgagaggtgatgcagcagttaagcactacacagaaaagtttgacaaggtcatgcttgatgatgttgtcgtctgtgttagcgatcttccagatgcagagcttgatccagctgtgaaggaagcctttgatgttgcatatgacaatatatatgccttccatgtttcacaaaaaatacctgagaagacagttgaaaatatgaaaggcgtaagatgtaagagaataactagatgcattggttctgttgggctgtatgtcccaggtggcactgcagtcttgccttcaactgcattgatgcttgctgtgcctgcacagattgctggatgcaaaactattgttcttgccacaccacctagccgtgatggtagcatatgcaaggaggttctttactgtgcaaagaaagctggtgtgacacacatattgaaagctggaggagctcaggcaatctcagcaatggcatggggaactgcatcttgcccaaaggtatttgaagtataaaaacatatcgatatcatgtctaaaatcagtagtgatcttttgtgtctatatactggcctctatctaacgtgttgcttcattgcttggttgttaaattattctcatagaacttaataaactgcagttttgtgtacaggcatgccctgttcttatcactttaaactctgcctaaaacaactgttaaaatatggagatgttgactcaccaagttctacagcatttttttatgatttcctgtattggctgtgcactctcattcaaccacataacttttgctaacttcattacaatgtccatacaggctgagaagatttttggacctggtaaccagtatgtaacagctgccaaaatgattcttcagaacagtgaagctatggtatctatagacatgcctgctggcccttctgaagttttagtcattgctgataaatacgcgaacccagttcatgttgctgctgatctgctatcccaggcagaacatggcccagatagtcaggttgttctagttgttgctggagatggtgttgatctgggtgccattgaggcagaagttagcaagcagtgcaacgcgcttccaagaggtgaattcgcttcaaaagcacttagccacagcttcactgtgttcgcgaaagatatggttgaggcgatatcattctcaaatctgtatgcccctgagcatttgatcatcaacgtaaaggatgctgagcagtgggaggagttcatcgaaaacgcagggtcagttttcttgggccaatggaccccagagagcgtgggcgattatgcgagcgggacgaaccatgtccttccgacctatggttacgcaaggatgtacagcggtgtatcgctgaactctttcctcaaatacatcactgtccaatccctaacagaggaagggctgagaaagctggggccgtacgtcgcgaagatggccgaagtggaggggctagaggcgcacaagagagccgttacccttaggctgcaagaggttgaggccaatgtaactgtctagccgctgtccatggtctattgcaacgttcagactcgatgtgggatgctggagttcttccctaggaacctaggggaactggactattgatgtcttccaaacaggctctggaatgttagaaagaggcgtttcaactggtgcagctaataatgttcattggaccctgatttgtttcacgaataaacttgagcagaacttactgtgtatatatgcagtgttctcgtattagttatttccctagttgcttctgtaccgattttttggattgcgcatatgcatctaatgtgcttcgtgacatgtatgtgtgaggttttgatggaaaataaaaaaaatggcatcgagcaatgagattttcattggaa

SEQ ID NO: 203783 - DNA, 2162 bp, Zea Mays
atatctccgacgtggcgagccggcactggccccgcgtatacggaggccggattcctgcggggccccggcgctatcctccgacggccgacgtgtcctgccggcgtccacacggggctggggaaactagtcgccggcgtacgcggaggtccgctcaatccggcggcgtcgtggggccggatcgaatctgcgccgcttgatcgttcgcgcggccgccgcggacagcggactgaaagcgaggtgatgatcctgctggctcggccgatcgacagggctgggccaccggcgccgcgcgcctcgtgctcttgcgtgctgctgttggctgttgccgccgagaccgagagctgctcctcctgctctcgtatacgtgctcaaggttgtcgggtacatgagacggcgctttcgttcttccggcgtgaggttgacgctgacaatggcgtgcgtggaattccagtgtcgtcgagacttgagacggaggccctgtctgctcgtgctcgtctcgtccaagagcaaggaggccgggcgggccagggcccagggccaccacggcaagcaatggccattggaagtaactgacagggacgagggcgagtcgacggcgacgccgccgttccaagccggccccaacttgcaagcgatttttggtttttgtttttttgtttttgctcgcgcctcgccggtggagtcgacgcctctaatactaataattcaaataaacaccagccatgaaaaaacgcagcttgttctttttctttttatgttttgtaccagccaaataagaatgctatgagcaactggaacgggaacctctcgtagtatatatatgagagggatcgggcaggaaactgcttcgtgaagaggctgagagctcgccttgcatgcacgcgcacacctctgcttgggtgtacgtgcacagcggcagcagcggactaggagctccatgcatctgtctctagggtgtagagatcctgctcattgtacggtagctgccaccgtctcatcgtcaaccatgtctgctgcttccaccgtggatcctcatcctcctcatcagcagcagcagtgcagcgataaggtgtcgtccatggagatggagatccccgccgaccttatcatccggatcggcgagtccgttttccctctccacaaggcggcggtgacgcccgcgggtgagcggaggagccgccgggcgtccatgtccgggacgacggcggcgacggagctcggtgccgccaggcccggcgcgctggagaaggtcgccatgatggtggacgaagtggcggcggagatcgcgacggaggaggcgctgcccatctccaagttcgtcggcgtggccggcgcggtgcccaaggacgcgcgcccgtcgcacgactgcctgtaccgcgccgtcgacatctacctcaagacgcacccggagctggacgagatccagcgggagaaggtctgcagcgtcatggacccgctcaagctctcgtaccaggcgcgcacgcacgcgtcgcagaacaagcggctgccgctgcaggccgcgctcagcgcgctctactacgacgagctcaagctccgcagcgccgcgacggccgacgtggtattggacacgcagtcgtcggccgcggggagggcttgcgcgcaggccagggcggcggacgcggcgctggcgcgagagaacgaggcgctgcggtcagagctggcacggatgcgggcctacctgtcagggatggagcgcagcaaagggggccggtcaacgccgccgtcctcgccgtctcggagggcaaagaaagcaagcttcctgggctccgtgtcccgcactatgagtcggctgaacccgtttagaagtggggggtggatggcgaaggttacgaccagtaacgccgccggtggtggacgccagagcaaaacgatgatgcagcatgtggtgacacccaagaggaggagggcatccataagttaataatcatgacgctgtcgtgtaattttaggaggataccgtgtgtgcatggcttgtagtttgattattattgtgtgtttttagtttattattgtgctaatatataaatgaatgcgtgtgtagtaccaagtggtttgctaaatcagacgataattttacatgttcgcatcgtagtcatcaattttaggccctgtttgggaacaaagtttttgaaaaccacagt

SEQ ID NO: 203784 - DNA, 3050 bp, Zea Mays
atatctccgacgtggcgagccggcactggccccgcgtatacggaggccggattcctgcggggccccggcgctatcctccgacggccgacgtgtcctgccggcgtccacacggggctggggaaactagtcgccggcgtacgcggaggtccgctcaatccggcggcgtcgtggggccggatcgaatctgcgccgcttgatcgttcgcgcggccgccgcggacagcggactgaaagcgaggtgatgatcctgctggctcggccgatcgacagggctgggccaccggcgccgcgcgcctcgtgctcttgcgtgctgctgttggctgttgccgccgagaccgagagctgctcctcctgctctcgtatacgtgctcaaggttgtcgggtacatgagacggcgctttcgttcttccggcgtgaggttgacgctgacaatggcgtgcgtggaattccagtgtcgtcgagacttgagacggaggccctgtctgctcgtgctcgtctcgtccaagagcaaggaggccgggcgggccagggcccagggccaccacggcaagcaatggccattggaagtaactgacagggacgagggcgagtcgacggcgacgccgccgttccaagccggccccaacttgcaagcgatttttggtttttgtttttttgtttttgctcgcgcctcgccggtggagtcgacgcctctaatactaataattcaaataaacaccagccatgaaaaaacgcagcttgttctttttctttttatgttttgtaccagccaaataagaatgctatgagcaactggaacgggaacctctcgtagtatatatatgagagggatcgggcaggaaactgcttcgtgaagaggctgagagctcgccttgcatgcacgcgcacacctctgcttgggtgtacgtgcacagcggcagcagcggactaggagctccatgcatctgtctctagggtgtagagatcctgctcattgtacggtagctgccaccgtctcatcgtcaaccatgtctgctgcttccaccgtggatcctcatcctcctcatcagcagcagcagtgcagcgataaggtgtcgtccatggagatggagatccccgccgaccttatcatccggatcggcgagtccgttttccctctccacaaggcggtgatggtgcccaagtgcggctacatccgccgggccgtcgaggcggtggcgaccaggcccagcagcaagggcggcgccgacgccgacgccgacccgccggccaccgtcgagctggacctctcggcgctgccgggcggcgccgacgcgttcgacaaggcggcgcgctactgctacggcgccaacttcgagatcacgccgcaaaacgcggcggcgctgcgctgcgccgcggcgttcctggacatgcgccacgcctcagcggacctggccgggcgcgtggacgagttcctggcgcgggcggcgctgcgcgcgctcccgggcgccgtggccgtgctccgctcctgcgaggcgcccggcctgcgcgcggccgccgaggagctcggcgtcgcgcgccgcgccgcggacgccgtcgcgcgcggcgtctgcgccgaggcgctgtccctgtcgtactcgtcggcgtcgcgcggccccgggtggtggaagctggagctggcggcgctgtcgccgcgctcgttcgggaaggtcgtcacggcgctgcggtgccgccgcgccgagccggccgtggtggccgcggcggcggcggcctacgcggagctcacgactgagattcggcgcggaccaccgcgcgctgctcgagtccgtggtcgacgtgctgggaaacaccacgcgcccggcgtcccggcgccgttcctctgccgcctcctccacgccgccgtcgccgccggggcgtccgccaagacgtgccgcgacctcgagctccgcgtcgccgccgtgctcgaccaggccaccgcccaggacctgctcgccgtcgcgctggacgccaccggggagcgcgtcaggaacacggacatcgtgcgccgcgtcgtcgtcgccttcgtcgagcgccaggcggcggtgacgcccgcgggtgagcggaggagccgccgggcgtccatgtccgggacgacggcggcgacggagctcggtgccgccaggcccggcgcgctggagaaggtcgccatgatggtggacgaagtggcggcggagatcgcgacggaggaggcgctgcccatctccaagttcgtcggcgtggccggcgcggtgcccaaggacgcgcgcccgtcgcacgactgcctgtaccgcgccgtcgacatctacctcaagacgcacccggagctggacgagatccagcgggagaaggtctgcagcgtcatggacccgctcaagctctcgtaccaggcgcgcacgcacgcgtcgcagaacaagcggctgccgctgcaggccgcgctcagcgcgctctactacgacgagctcaagctccgcagcgccgcgacggccgacgtggtattggacacgcagtcgtcggccgcggggagggcttgcgcgcaggccagggcggcggacgcggcgctggcgcgagagaacgaggcgctgcggtcagagctggcacggatgcgggcctacctgtcagggatggagcgcagcaaagggggccggtcaacgccgccgtcctcgccgtctcggagggcaaagaaagcaagcttcctgggctccgtgtcccgcactatgagtcggctgaacccgtttagaagtggggggtggatggcgaaggttacgaccagtaacgccgccggtggtggacgccagagcaaaacgatgatgcagcatgtggtgacacccaagaggaggagggcatccataagttaataatcatgacgctgtcgtgtaattttaggaggataccgtgtgtgcatggcttgtagtttgattattattgtgtgtttttagtttattattgtgctaatatataaatgaatgcgtgtgtagtaccaagtggtttgctaaatcagacgataattttacatgttcgcatcgtagtcatcaattttaggccctgtttgggaacaaagtttttgaaaaccacagt

SEQ ID NO: 203785 - DNA, 2083 bp, Zea Mays
atgtctgctgcttccaccgtggatcctcatcctcctcatcagcagcagcagtgcgataaggtgtcgtccatggagatggagatccccgccgaccttatcatccggatcggcgagtccgttttccctctccacaagactgacgtgaacaacggactctgctcgtacgagaacactcaggcggtgatggtgcccaagtgcggctacatccgccgggccgtcgaggcggtggcgaccaggcccagcagcaagggcggcgccgacgccgacgccgacccgccggccaccgtcgagctggacctctcggcgctgccgggcggcgccgacgcgttcgacaaggcggcgcgctactgctacggcgccaacttcgagatcacgccgcaaaacgcggcggcgctgcgctgcgccgcggcgttcctggacatgcgccacgcctcagcggacctggccgggcgcgtggacgagttcctggcgcgggcggcgctgcgcgcgctcccgggcgccgtggccgtgctccgctcctgcgaggcgcccggcctgcgcgcggccgccgaggagctcggcgtcgcgcgccgcgccgcggacgccgtcgcgcgcggcgtctgcgccgaggcgctgtccctgtcgtactcgtcggcgtcgcgcggccccgggtggtggaagctggagctggcggcgctgtcgccgcgctcgttcgggaaggtcgtcacggcgctgcggtgccgccgcgccgagccggccgtggtggccgcggcggcggcggcctacgcggagctcacgactgagattcggcgcggaccaccgcgcgctgctcgagtccgtggtcgacgtgctgggaaacaccacgcgcccggcgtcccggcgccgttcctctgccgcctcctccacgccgccgtcgccgccggggcgtccgccaagacgtgccgcgacctcgagctccgcgtcgccgccgtgctcgaccaggccaccgcccaggacctgctcgccgtcgcgctggacgccaccggggagcgcgtcaggaacacggacatcgtgcgccgcgtcgtcgtcgccttcgtcgagcgccaggcggcggtgacgcccgcgggtgagcggaggagccgccgggcgtccatgtccgggacgacggcggcgacggagctcggtgccgccaggcccggcgcgctggagaaggtcgccatgatggtggacgaagtggcggcggagatcgcgacggaggaggcgctgcccatctccaagttcgtcggcgtggccggcgcggtgcccaaggacgcgcgcccgtcgcacgactgcctgtaccgcgccgtcgacatctacctcaagacgcacccggagctggacgagatccagcgggagaaggtctgcagcgtcatggacccgctcaagctctcgtaccaggcgcgcacgcacgcgtcgcagaacaagcggctgccgctgcaggccgcgctcagcgcgctctactacgacgagctcaagctccgcagcgccgcgacggccgacgtggtattggacacgcagtcgtcggccgcggggagggcttgcgcgcaggccagggcggcggacgcggcgctggcgcgagagaacgaggcgctgcggtcagagctggcacggatgcgggcctacctgtcagggatggagcgcagcaaagggggccggtcaacgccgccgtcctcgccgtctcggagggcaaagaaagcaagcttcctgggctccgtgtcccgcactatgagtcggctgaacccgtttagaagtggggggtggatggcgaaggttacgaccagtaacgccgccggtggtggacgccagagcaaaacgatgatgcagcatgtggtgacacccaagaggaggagggcatccataagttaataatcatgacgctgtcgtgtaattttaggaggataccgtgtgtgcatggcttgtagtttgattattattgtgtgtttttagtttattattgtgctaatatataaatgaatgcgtgtgtagtaccaagtggtttgctaaatcagacgataattttacatgttcgcatcgtagtcatcaattttaggccctgtttgggaacaaagtttttgaaaaccacagt

SEQ ID NO: 203786 - DNA, 2740 bp, Zea Mays
atctttctccctctctctctctctcctcttccgtccctcctctctccctctctacgccacgcctccacctccacacctgcacgcctctcgctctctctcctcacctgtcgagctgcccacagcccgtacgtacctgcccccagtcccagtccccgccgccccgcctgcccgacccgcggcttatccaccacgtccgccgctgggctggatcgatcgggaccggtatcgcgccgccgccgctgccctcggcactcgcgggatcctgttcctaccatgcagcagcgctgcgcccttgcccgaccgcgccggcccgccgaaccgcgcgttccgctccccgacgatcactccctcgtcgccgtcttctccttcctcttcatccccacctaaatcaacctcctcgccgcgaaattctgctacaatttcttcatcttcccttcccgccgggagcggacggatcgccgcttcctcggccggcgggatgagccgggaggcgcagaaactcgactgcgccgccggcgccggggggatcggggtcctgtcgctggacctactgggccaggtgctggaacacctgcgggagccccgggaccgcaagacgtgccgcctcgtcagccgcgccttcgagcgcgccgaggccgcgcaccgccgcgcgcttcgggtgctccgacgcgagccgctcccgcgcctgctccgcgcgttcccggcgctcgagcggctcgacctctccgcctgcgcctcgctcgacgacgcctccctcgccgcggccgtcgccgacgccggcggagggctcgccggcctccgcagcgtgtgcctcgcgcgggccaatggtgtcggctggcgcggcctcgaggcgctcgtcgcggcctgccccaagctcgcggccgtcgacctgtcgcactgcgtcaccgccggggaccgcgaggccgccgcgttggcggcggcgtccgagctcagggacctgaggctggacaaatgccttgccgtcaccgacatggggctcgccaaggtggctgttgggtgccccaagctggagaagctcagcctcaagtggtgccgtgagatctctgacattggaattgatctgctggccaagaagtgccctgagctccgcagcctcaacatatcctacctcaaggtgggcaatggatcccttggatcaatttcgtcacttgagaggcttgaggaattggcaatggtttgttgttcaggtatagatgacgaaggcttggaattgctgagcaaggggagcgattcgctgcagagtgttgatgtgtcaagatgtgatcatgtgacttccgaggggttagcttcactcatagatggtcgcaattttcttcagaagttatatgctgcagattgtttgcatgacagcgttttctatccaagttggcaagactgaaggaaaccttgacattgctgaaactcgacggtcttgaggtctcggactctcttcttcaagccattggtgaaagctgtaacaaattggttgagattgggcttagcaaatgcagtggtgttactgatggaggaatctcatctcttgtagctcggtgtagtgacctaagaacaattgatctcacatgctgcaatctcattaccaacaatgcgcttgattcaatagctgacaactgtaagatgcttgaatgtttgcggttggaatcatgctctttgataaatgagaagggactagagcgaattacaacttgttgccccaaccttaaggagatagacctcactgactgcggagtagatgatgcagcattgcagcacttggctaaatgctctgaattgcgaatattgaaattaggcctatgctcaagtatttctgacagaggcattgcatttatcagttcgaattgtggaaagctcgtggagcttgatctctaccggtgcaactctattactgatgatgggttggcagctttagcaaatgggtgcaagaggattaagttactgaacttgtgttactgcaacaagatcactgatactggtttgggtcacctaggctccctggaggagctcacaaaccttgaactgaggtgcttggtccgcgtaacaggcattgggatctcctcagttgcaatcggatgcaagaacctgatagagctggacttgaaacgatgctattcggttgatgacgctggcctgtgggcccttgctcgttatgctttgaaccttagacaggacattaagatggtgcacctctcatgggtctcaatagaagggtttgagatggctctgcgagcagcctgcgggaggctgaagaagctgaagatgctctgcgggctgaagaccgtgctctcccctgagctcctccagatgctgcaggcttgtggctgccgaataagatgggtcaacaagcctcttgtctacaaggactagacagactcgtgttcctcattgtgtgtgcagtgtcagcatcagcatgtattgtcaagatcttgcaggtttgccctggctcacgttgtgagtccgcaataatcgttgggggcgtaagctcccgtcccccagatgtggttatggtgcctttggggcacttcttgcgccatttgtcactctctgctccggtgtatctgtgtatgcaaacggaggcaccggtaatgttcatgtgtatatagcgtgcagtagaatgatcccattttatgggattagttagtgtgtaattgttacctcatttcgcatgattcgaatcttgagatgaaagaatcataaggggtatgatcgatgcattgcattcacc

SEQ ID NO: 203787 - DNA, 2863 bp, Zea Mays
ccgaccggcatcacctatccacatctttctccctctctctctctctcctcttccgtccctcctctctccctctctacgccacgcctccacctccacacctgcacgcctctcgctctctctcctcacctgtcgagctgcccacagcccgtacgtacctgcccccagtcccagtccccgccgccccgcctgcccgacccgcggcttatccaccacgtccgccgctgggctggatcgatcgggaccggtatcgcgccgccgccgctgccctcggcactcgcgggatcctgttcctaccatgcagcagcgctgcgcccttgcccgaccgcgccggcccgccgaaccgcgcgttccgctccccgacgatcactccctcgtcgccgtcttctccttcctcttcatccccacctaaatcaacctcctcgccgcgaaattctgctacaatttcttcatcttcccttcccgccgggagcggacggatcgccgcttcctcggccggcgggatgagccgggaggcgcagaaactcgactgcgccgccggcgccggggggatcggggtcctgtcgctggacctactgggccaggtgctggaacacctgcgggagccccgggaccgcaagacgtgccgcctcgtcagccgcgccttcgagcgcgccgaggccgcgcaccgccgcgcgcttcgggtgctccgacgcgagccgctcccgcgcctgctccgcgcgttcccggcgctcgagcggctcgacctctccgcctgcgcctcgctcgacgacgcctccctcgccgcggccgtcgccgacgccggcggagggctcgccggcctccgcagcgtgtgcctcgcgcgggccaatggtgtcggctggcgcggcctcgaggcgctcgtcgcggcctgccccaagctcgcggccgtcgacctgtcgcactgcgtcaccgccggggaccgcgaggccgccgcgttggcggcggcgtccgagctcagggacctgaggctggacaaatgccttgccgtcaccgacatggggctcgccaaggtggctgttgggtgccccaagctggagaagctcagcctcaagtggtgccgtgagatctctgacattggaattgatctgctggccaagaagtgccctgagctccgcagcctcaacatatcctacctcaaggtgggcaatggatcccttggatcaatttcgtcacttgagaggcttgaggaattggcaatggtttgttgttcaggtatagatgacgaaggcttggaattgctgagcaaggggagcgattcgctgcagagtgttgatgtgtcaagatgtgatcatgtgacttccgaggggttagcttcactcatagatggtcgcaattttcttcagaagttatatgctgcagattgtttgcattttgttgaaattatattgataggagataggacagcgttttctatccaagttggcaagactgaaggaaaccttgacattgctgaaactcgacggtcttgaggtctcggactctcttcttcaagccattggtgaaagctgtaacaaattggttgagattgggcttagcaaatgcagtggtgttactgatggaggaatctcatctcttgtagctcggtgtagtgacctaagaacaattgatctcacatgctgcaatctcattaccaacaatgcgcttgattcaatagctgacaactgtaagatgcttgaatgtttgcggttggaatcatgctctttgataaatgagaagggactagagcgaattacaacttgttgccccaaccttaaggagatagacctcactgactgcggagtagatgatgcagcattgcagcacttggctaaatgctctgaattgcgaatattgaaattaggcctatgctcaagtatttctgacagaggcattgcatttatcagttcgaattgtggaaagctcgtggagcttgatctctaccggtgcaactctattactgatgatgggttggcagctttagcaaatgggtgcaagaggattaagttactgaacttgtgttactgcaacaagatcactgatactggtttgggtcacctaggctccctggaggagctcacaaaccttgaactgaggtgcttggtccgcgtaacaggcattgggatctcctcagttgcaatcggatgcaagaacctgatagagctggacttgaaacgatgctattcggttgatgacgctggcctgtgggcccttgctcgttatgctttgaaccttagacagcttacgatatcgtactgccaagtcacggggttgggcctgtgccacctgctgagctccctgcgatgcctccaggacattaagatggtgcacctctcatgggtctcaatagaagggtttgagatggctctgcgagcagcctgcgggaggctgaagaagctgaagatgctctgcgggctgaagaccgtgctctcccctgagctcctccagatgctgcaggcttgtggctgccgaataagatgggtcaacaagcctcttgtctacaaggactagacagactcgtgttcctcattgtgtgtgcagtgtcagcatcagcatgtattgtcaagatcttgcaggtttgccctggctcacgttgtgagtccgcaataatcgttgggggcgtaagctcccgtcccccagatgtggttatggtgcctttggggcacttcttgcgccatttgtcactctctgctccggtgtatctgtgtatgcaaacggaggcaccggtaatgttcatgtgtatatagcgtgcagtagaatgatcccattttatgggattagttagtgtgtaattgttacctcatttcgcatgattcgaatcttgagatgaaagaatcataaggggtatgatcgatgcattgcattcacc

SEQ ID NO: 203788 - DNA, 1901 bp, Zea Mays
ggacaaccatgatctgtttacgtcaagaaattcatgatcaacttagtgaaatgtcaaagtgcctgcagatgggatgcacaggctgttgccaggtgtccttcagaggttcagcactgcagcagcagtagaggagcccatcacgccgtcagtccatgtgaactacacaaagctcctcattaatgggaactttgttgattccgcatccggcaagaccttcccaactctggaccctcgtacaggggaggtgattgctcatgtggctgagggtgacgcagaggacattaaccgtgcagtagctgcggctcgcaaggcttttgatgaagggccatggccgaagatgactgcctatgagaggtcccgtatcctactgcggtttgctgatttgatagagaagcacaatgacgagcttgctgctttggagacatgggacaacgggaagccatatgagcaagcagcccagattgaagtacccatggtggcccgtcttatgcgttactatgctggttgggctgataagatccatgggctcattgtgccggctgatggcccacaccatgtacagatcttgcatgagccaattggtgttgcaggtcagatcatcccatggaactttcctcttctgatgtatgcctggaaagttggccctgctttggcatgtggaaatactctcgtgctcaagactgctgaacaaacccctctatcggctttgtatatctccaaattgttgcatgaggctggactacctgagggtgttgtgaatgtcgtttctggttttggccctactgctggtgctgctcttgctagtcacatggatgttgataagatcgcatttactggatctaccgatactggaaaaattattctcgagttggctgcaaagagcaaccttaagacagtgacactggagttaggaggcaagtcccctttcatcataatggacgatgctgatgttgaccatgctgttgagcttgcgcactttgccctgttctttaaccagggacaatgctgctgcgctggatctcgcacgtttgtacatgagcgtgtttatgatgagtttgtggagaaggccaaggctcgtgcattgaagcgcgtcgttggtgatccgttcaggaaaggtgttgaacagggcccgcagattgacgacgagcaattcaacaagatcttgcgctacattaggtatggtgttgacggtggagctacccttgtgacgggtggtgataggttgggtgacaagggtttctacatccagccaacgattttctcagatgtccaggacggcatgaagattgctcaggaggagatatttgggcctgtgcagtcgatcctcaagttcaaagacctcaatgaggttatcaagagggcaaacgcgagccagtatggattggccgccggcgtgttcaccaacagcctggacacggccaacaccctgacgcgcgcgctcagggccgggaccgtctgggtgaactgcttcgacgtcttcgatgctgcgattccgtttggtgggtacaagatgagcggcatcgggagggagaagggcgttgacagcctgaagaactacctgcaggtgaaggcggtcgtcaccccaatcaagaacgccgcgtggttgtagacgctgcaagtgtggccttgtgcacgagaaccacgtatattcatttcctggtcacatccccgaacaatgtgaaggcgttaatcagatagatgacgatgaagaagaacaactataataagatttgccctagcctgggttctcagttatctctaataagttttatggttggtgcctatatattgtgcaatttggttgctcccttttattttgtttctttttgataagactgttctagcaacggatatgcagagttcattatgaaaatgcatttgttagtgtctttgatggttaa

SEQ ID NO: 203789 - DNA, 2144 bp, Zea Mays
gcaaaaattgagactaatttttggttcgcagattatgcaaggtcttcttgatcagtacacagttgctgggaattccatggctcttgacatggtgataaagatggctaattatttcagtgaccgggtgaagaatgtcatacagaattatagcattgagaggcactgggaatctctcaatgaggagactggtgggatgaatgatgttctctatcagctctacacgataacgcacgatatgaagcatttgacactagctcatctcttcgataagccatgctttcttgggttgctggcagttcaggctgacagtatttccggttttcattcaaacacacacattccagttgtcattggtgcgcaaatgaggtatgaagttactggagatcctctttacaagcaaattgcgtcattctttatggatacaataaattcttctcatagctacgcaactggtggcacatctgctggtgaattctggaccgatccaaagcgtttagctgggactctgagtactgagaatgaggaatcttgtaccacctacaatatgcttaaggtttctcgcaacctattcagatggacaaaggaaatagcatatgcagattactatgaaagggcattgataaatggtgttttaagcattcaacgggggacagatcctggtgttatgatttacatgctaccccaggcccctggacactcaaaggctgtgagttatcatggttggggaacaaagtacgattcattctggtgttgttatgggacaggtatagaatccttttcaaaacttggtgattctatttactttgaggagaaaggagatccacctgcactcaatatcattcagtacataccaagcacttacaactggaaagcagctgggcttactgttactcagcaaatcaaaaccctcagctcttctgaccagtatcttcaaatttcattctccatttctgcaaacacaagcggtcagactgccaatataaattttagaattccgtcatggacatttgctgatggtgcaggagcaactttaaatggcaaagatttggggtctatatctccaggatctttcctatcaatcaccaaacagtggaactccgatgatcacttagcgctacactttccaatcaggttaaggacggaagcaattaaagatgacagactggaatatgcatcccttcaagcagtcctgtttgggccatttgttcttgctggcctatccactggtgactgggatgcaaaagctggcaacggcagtgctatttcagattggatcgccgctgtccctccagcacacaactcacagctggtaaccttcacacaagtatccaacggaaaggcatttgtcctctcaagtgcaaatggcaccctgacgatgcaagagcgacctgaagtcgacggcaccgacgccgccatccatgcgacattcagggctcaccctcaggaggactcaacagagctgcatgacatctacagcacaaccttgacgggaacttccattctgctcgaaccattcgacttgccaggaaccgtgatcaccaacaacctcactctatctgcgcagaagagctccgattccctcttcaacatcgtgcccgggctcgatggaaaccctaactcggtctccctcgagctcgggaccaaaccaggatgcttcttggtgacgggcacgaactactccgcagggacgaggattgaagtcaactgcaagagttcccttgagagcattggcgggatactcgagcaggcggcgagcttttcgcaaactgacccattgaggcagtatcacccgatcagctttgtcgcgaagggggtggccaggaacttcctccttgagccattgtacagtttgagggacgaattctacacggtttacttcaacgtcagggtctgagtcctgacgcttacacttgcagtagaagtaatacagaataaataatgtgcgcgacctttttcttctcatacactgtagcttagaacagccaatgaagaagcaattgggttgtttgaacttgttatgcacgcgggagtattcactttgtgtgaaaccacttgttatgcaataccaaacgagtcctggctgctatctgacttgtggcatggtaaaaagaaccccatttgggtgtctgatttgcaactaataa

SEQ ID NO: 203790 - DNA, 2034 bp, Zea Mays
aaaacgccggtgccagtggctgcctcccgtctccctcttctcctacgcgcacggggagggaagaattggttcgttggcgttggccttggcctcggatccagagcgcggaacgcgtgcggcgttcggatcgacccgctcgaaggccggggggcgcgaggtaggggccaggatcggcggcgatggtgaaggccgtggtggtgggcgcggcggtcgtggcgtgtgcggcggagaggaggaggcgcgcggccgccgtgatcgaggaggtcgagagcagcctcgccacgcccacggcgctgctgcggagcatcgcggacgccatggtcgccgagatggagcgcggcctgcgcggggacatccacgcgcagctcaagatgctcattagctacgtcgacagcctccccaccggagatgaacatgggctgttttatgcactggatcttggagggaccaacttccgtgtgctgcgagtccagctaggaggaaaggagaaacgtgttgtcaaacaacagtatgaggaggtttccattccaccacatttgatggtcgggacttccatggaactatttgatttcattgctgctgcattggctaaatttgtcggtactgaaggtgaagatttccaactcccagagggtaggcagagagaacttggtttcactttttccttcccggtgaaccaaacatcaatatcatcaggaacactcatcaagtggacaaagggcttttccatcaatggcacggttggtgaagatgttgtttctgagttgagcagggccatggagaggcagggactagatatgaaagctacggcattagtcaatgatacagtgggcacattggctggtgggagatatatggataccgatgtagttgcagctgtaatattgggcactggtacaaatgcagcatatgtggagcatgcaaatgcaattcctaaatggactgggttactgcctaaatctggaaagatggtaattaatacagagtgggggagcttcaaatccaacaaacttcctctttcagaatatgacaaagccatggactttgaaagtttgaaccctggagagcagatatacgagaaaatgatttctggtatgtatctcggagagattgttcgaagaattttactgaagttggcacatgaagcttctctatttggggatgttgttccacctaagctggagctgccatttatattgaggacgccagatatgtcagccatgcatcatgactcctcacatgacctcaaaactcttggagctaaactgaaggacatagtcggggtcgcggacacttccctggaagtaaggtacatcactcgtcacatctgtgaccttgtcgcagagcgtgcagcacgcctggccgccgcaggcgtgtacagcatcctgaagaagataggccgggacaaagtaccaagcggtggcggtaaaatgccgaggaccgtagttgccttggacggtgggctctacgaacactacaagaagttcagcagttgcgtagaagcgactctcacagacttgctcggcgaggaggcttcttcctccgtggtcgccaagctggccaacgacggctctggcattggagctgcgcttctcgcagcctcacactcccagtatcagtatggcgcgagtgactagtagtcctgaaatgggcgcggatcgagattttgagtgtagctctcatttatcttttcttttttcccttttcaaaacatctttttggggatttttttcggcttccttttgttggctattccgtggatgcacttacggctctgcattgggatgtagctagtatagagccaatgagtttggaggttatctaatggcacaaggcaggagcatggaaatggaagcagagcaatgacattcatgctctgcccattcttttttccccttgtatggtgttgtaaaccaataaaaaaatgttaacccttttttttgtgtgtgttggcaataaagagaatacgataatttgaccatgtgtcaagtatatgacttgattttttttgaaacatgtaagggcggatttttt

SEQ ID NO: 203791 - DNA, 1872 bp, Zea Mays
gtaaacggctccccgctccctgtctgatcttgcatccccttttcctttctttttctttttcccttccagttccagttccagggtgtgattgactgattgtgatctgggccgcgtgagctttgtgatccgagacatgccggcttctcgtgggaaagaaaaaaaaggcacatacggacgtgatctggactcaaaagcgtgtccttgatcgcgtaagcttggcgaaacctttttattggcaaatcagagatgaacatgggctgttttatgcactggatcttggagggaccaacttccgtgtgctgcgagtccagctaggaggaaaggagaaacgtgttgtcaaacaacagtatgaggaggtttccattccaccacatttgatggtcgggacttccatggaactatttgatttcattgctgctgcattggctaaatttgtcggtactgaaggtgaagatttccaactcccagagggtaggcagagagaacttggtttcactttttccttcccggtgaaccaaacatcaatatcatcaggaacactcatcaagtggacaaagggcttttccatcaatggcacggttggtgaagatgttgtttctgagttgagcagggccatggagaggcagggactagatatgaaagctacggcattagtcaatgatacagtgggcacattggctggtgggagatatatggataccgatgtagttgcagctgtaatattgggcactggtacaaatgcagcatatgtggagcatgcaaatgcaattcctaaatggactgggttactgcctaaatctggaaagatggtaattaatacagagtgggggagcttcaaatccaacaaacttcctctttcagaatatgacaaagccatggactttgaaagtttgaaccctggagagcagatatacgagaaaatgatttctggtatgtatctcggagagattgttcgaagaattttactgaagttggcacatgaagcttctctatttggggatgttgttccacctaagctggagctgccatttatattgaggacgccagatatgtcagccatgcatcatgactcctcacatgacctcaaaactcttggagctaaactgaaggacatagtcggggtcgcggacacttccctggaagtaaggtacatcactcgtcacatctgtgaccttgtcgcagagcgtgcagcacgcctggccgccgcaggcgtgtacagcatcctgaagaagataggccgggacaaagtaccaagcggtggcggtaaaatgccgaggaccgtagttgccttggacggtgggctctacgaacactacaagaagttcagcagttgcgtagaagcgactctcacagacttgctcggcgaggaggcttcttcctccgtggtcgccaagctggccaacgacggctctggcattggagctgcgcttctcgcagcctcacactcccagtatcagtatggcgcgagtgactagtagtcctgaaatgggcgcggatcgagattttgagtgtagctctcatttatcttttcttttttcccttttcaaaacatctttttggggatttttttcggcttccttttgttggctattccgtggatgcacttacggctctgcattgggatgtagctagtatagagccaatgagtttggaggttatctaatggcacaaggcaggagcatggaaatggaagcagagcaatgacattcatgctctgcccattcttttttccccttgtatggtgttgtaaaccaataaaaaaatgttaacccttttttttgtgtgtgttggcaataaagagaatacgataatttgaccatgtgtcaagtatatgacttgattttttttgaaacatgtaagggcggatttttt

SEQ ID NO: 203792 - DNA, 1569 bp, Zea Mays
tgtccttgatcgcgtaagcttggcgaaacctttttattggcaaatcagagatgaacatgggctgttttatgcactggatcttggagggaccaacttccgtgtgctgcgagtccagctaggaggaaaggagaaacgtgttgtcaaacaacagtatgaggaggtttccattccaccacatttgatggtcgggacttccatggaactatttgatttcattgctgctgcattggctaaatttgtcggtactgaaggtgaagatttccaactcccagagggttggtgaagatgttgtttctgagttgagcagggccatggagaggcagggactagatatgaaagctacggcattagtcaatgatacagtgggcacattggctggtgggagatatatggataccgatgtagttgcagctgtaatattgggcactggtacaaatgcagcatatgtggagcatgcaaatgcaattcctaaatggactgggttactgcctaaatctggaaagatggtaattaatacagagtgggggagcttcaaatccaacaaacttcctctttcagaatatgacaaagccatggactttgaaagtttgaaccctggagagcagatatacgagaaaatgatttctggtatgtatctcggagagattgttcgaagaattttactgaagttggcacatgaagcttctctatttggggatgttgttccacctaagctggagctgccatttatattgaggacgccagatatgtcagccatgcatcatgactcctcacatgacctcaaaactcttggagctaaactgaaggacatagtcggggtcgcggacacttccctggaagtaaggtacatcactcgtcacatctgtgaccttgtcgcagagcgtgcagcacgcctggccgccgcaggcgtgtacagcatcctgaagaagataggccgggacaaagtaccaagcggtggcggtaaaatgccgaggaccgtagttgccttggacggtgggctctacgaacactacaagaagttcagcagttgcgtagaagcgactctcacagacttgctcggcgaggaggcttcttcctccgtggtcgccaagctggccaacgacggctctggcattggagctgcgcttctcgcagcctcacactcccagtatcagtatggcgcgagtgactagtagtcctgaaatgggcgcggatcgagattttgagtgtagctctcatttatcttttcttttttcccttttcaaaacatctttttggggatttttttcggcttccttttgttggctattccgtggatgcacttacggctctgcattgggatgtagctagtatagagccaatgagtttggaggttatctaatggcacaaggcaggagcatggaaatggaagcagagcaatgacattcatgctctgcccattcttttttccccttgtatggtgttgtaaaccaataaaaaaatgttaacccttttttttgtgtgtgttggcaataaagagaatacgataatttgaccatgtgtcaagtatatgacttgattttttttgaaacatgtaagggcggatttttt

SEQ ID NO: 203793 - DNA, 1640 bp, Zea Mays
gtgatttttacgagatgaacatgggctgttttatgcactggatcttggagggaccaacttccgtgtgctgcgagtccagctaggaggaaaggagaaacgtgttgtcaaacaacagtatgaggaggtttccattccaccacatttgatggtcgggacttccatggaactatttgatttcattgctgctgcattggctaaatttgtcggtactgaaggtgaagatttccaactcccagagggtaggcagagagaacttggtttcactttttccttcccggtgaaccaaacatcaatatcatcaggaacactcatcaagtggacaaagggcttttccatcaatggcacggttggtgaagatgttgtttctgagttgagcagggccatggagaggcagggactagatatgaaagctacggcattagtcaatgatacagtgggcacattggctggtgggagatatatggataccgatgtagttgcagctgtaatattgggcactggtacaaatgcagcatatgtggagcatgcaaatgcaattcctaaatggactgggttactgcctaaatctggaaagatggtaattaatacagagtgggggagcttcaaatccaacaaacttcctctttcagaatatgacaaagccatggactttgaaagtttgaaccctggagagcagatatacgagaaaatgatttctggtatgtatctcggagagattgttcgaagaattttactgaagttggcacatgaagcttctctatttggggatgttgttccacctaagctggagctgccatttatattgaggacgccagatatgtcagccatgcatcatgactcctcacatgacctcaaaactcttggagctaaactgaaggacatagtcggggtcgcggacacttccctggaagtaaggtacatcactcgtcacatctgtgaccttgtcgcagagcgtgcagcacgcctggccgccgcaggcgtgtacagcatcctgaagaagataggccgggacaaagtaccaagcggtggcggtaaaatgccgaggaccgtagttgccttggacggtgggctctacgaacactacaagaagttcagcagttgcgtagaagcgactctcacagacttgctcggcgaggaggcttcttcctccgtggtcgccaagctggccaacgacggctctggcattggagctgcgcttctcgcagcctcacactcccagtatcagtatggcgcgagtgactagtagtcctgaaatgggcgcggatcgagattttgagtgtagctctcatttatcttttcttttttcccttttcaaaacatctttttggggatttttttcggcttccttttgttggctattccgtggatgcacttacggctctgcattgggatgtagctagtatagagccaatgagtttggaggttatctaatggcacaaggcaggagcatggaaatggaagcagagcaatgacattcatgctctgcccattcttttttccccttgtatggtgttgtaaaccaataaaaaaatgttaacccttttttttgtgtgtgttggcaataaagagaatacgataatttgaccatgtgtcaagtatatgacttgattttttttgaaacatgtaagggcggatttttt

SEQ ID NO: 203794 - DNA, 5848 bp, Zea Mays
ctgagtcccctcccctcccatctctatccacgacaaccgacgccccactccccgatccaaaccacctcaaacccccgccccgcccagatccagatccacgcggcgcggcgcgaccgcggctaccggatcccgccgcggaataatggcctccgcggttgcggcgccgccgccaaccccgccggagtccgacccgcgcctcgtcgagatcttctcccccttcctcgagaagctcataaaaaatgcctcgtggcgcaacaaggcgcactccaagctctcgcacaccgccaagtccatcctcgaccgcctccagaagcccccgccgccgcccgcagccgaggcgcaggcgccgtccacgccgacctcctccccctcgacgccgacctcctcttccgcacagcctggtccgttgcgcagcctgtcgctcgcggactcggagctgctcctcgcccctgtgatctcgacactcctctcggcggtcacctctacgtctgtacgcctccacggcgattgccttctacgtgccgtgcgcgcatgttatgatatgtacctcgggagccgtagtgccgtcaatcaagccactgccaaggcttcgcttgtgcagatgctggtgattgtgttccgccgaatggaagctgactcctcgaccgtgcctgtacaacccatagtcgtggctgatgtgattgagctacctgatgcaatttcgggctcctcgcccactgctgaccccaacgttgtacagggattcatttcgaagatcattggtgacttcgatggtgcactcacacctctggctcggacaacttcatcagcaggggcaggacccaccgttgcccatgatggtgcatttgagacaacggcagcggcagaggaaggggcaaacccagcggatttgcttgattcaacagataaggacatgcttgatgccaagtactgggagatcagcatgtacaaaacagctattgagggtcgtaaagatgagcttggtgtcgagggggcagtggttggcaccttggacgatgatgctgatgtgagaattgggaacaagttacggagggatgctttcttagttttccgggctttgtgtaagctttccatgaagacaccacccaaggatgcaccagcagatcccatagtaatgcggggaaagatccttgctcttgagcttctcaagatcttgcttgaaaatgctggggctgtgttccggaccagtgagaggtttctcggtgctatcaagcagtatctatgcctgtcacttttaaagaactgtgcctcatcccatatgattgtttttcagctatcttgttctatttttattagcttagtggcaagattcagaccaggattgaaggcagagattggtgtattctttcccatgatcatcttgagagtgttggaaaatattgctcaaccaaattatcaggcaaagatgattgttcttcgttttttggaaaagctctgtggtgattctcaaatcctagttgatattttccttaattatgattgtgatgtccactcatcaaacatatttgagaggatggtaaatggtctactaaagacagctcaaggacctcctgctggtgtccctaccacattggtaccacctcaggacaccacaatgaaaagtgaagcaatgaaatgcttagttgctattctgaggtccatgggagattggatgaataagcagctacgaattccagatcctgcttctcctaatgtagaatcagagaagaacgacaatgatgatggcaatgagcttccgcaggcagataacaatggagatgagtctagtgaagcatctgattcacattctgagttatcgaatggaatttcagaggcagcatcattggaacaacgtcgagcttacaagatagagcttcaggagggtatctatttgtttaatcggaagccgaagaaggggattgagttccttgttaatgcaagcaaggtgggggagacaccagaggagatagctgcgttcctaaaaagtgcttctggcttgaacaagactatgattggtgattatttaggtgaaagggaagatttatcgctgaaagtcatgcatgcatatgtggactcatttgattttcaaagactggagtttgatgaagcaattagagctttcctccaaggcttcaggttgcctggagaagctcagaagattgatcggattatggaaaagtttgcagagcgttactgcaaatgtaatccaaaggccttttccagtgcagatacagcttatgttctggcttattcagtcataatgcttaacactgatgcacataacccaatggtcaaaaataagatgtcaccagaagatttcattagaaacaatcgtggtatcgatgatgggaaggacctacctgaagaatttatgagatcattgtatgaaaggatttggaaaaaggagattaagatgaaagaagatgaatttgttccacagcagcaacaatcaacaagttctaacaaaattcttgggttggataacattcttaacattgttgtacgcaagcgaggttcatctatggagacaagtgatgacctcattaagcatatgcaggagcaatttaaagaaaaggcccgcatgtctgagtctgtattttatccagccacagatgtagttgttttgaagttcatggttgaggtttgctgggctcctatgcttgcagcattcagtgttccacttgaccagagtgatgatgaaattgttgtatcccagtgccttgaaggatttcgctctgcaatccatgttactgcagccatgtcaatgaagactcaaagagatgcatttatcacttcacttgccaagtttacatcacttcactctgctgctgatattaagcagaaaaatgttgaagccattaagatgaagatggaaattacttgcaagaagcatgggagcatatattgacatgtgtttctcgttttgaaaatctacatcttgttggagagggagcacctccagatgccactttctttgcgctgcagcagccggaccttgataaatcaaaacaggctaagtcatcgattcttcctgttctgaaaaagaaggctcctaatgctacttcagcttctaaaagaggctcttatgatagcgctggtgtcggtggcaaagcttctggtgtggatcaaatgaataatgaggtgacaagcctcttggagcaagttgggatggctgaaatgaaccgtgtatttgtaagaagtcaaaaactcaacagcgagggtataattgattttgtgaaggctctctgtaaggtttcaatggaggaattacgttcggcttctgatccacgagtttttagtctgacaaagatagtcgagatagcgcattacaatatgaaccgcatcagacttgtttggtcaagtatatggcatgtcttgtctgatttttttgtcaccattggctgctcagaaaatctttcaatcgcaatatttgctatggactccttgcggcagttatctatgaagttcctggagcgtgaggagctcacaaactacaatttccaaaatgaatttatgaagccttttgttgttgtaatgaggaagagccgagctgttgagatcagagaacttatcattaggtgtgtctctcaaatggtattggcccgtgttagtcatgtgaagtcagggtggaagagtatgtttatggtctttgcgacagcgtcatatgatgatcacaaaaatattgtactattggcctttgaaattatagaaaagattttgcgggaatactttccatacattactgagactgagacaacgactttcaacgattgtgtgaattgtcttatcgcgtttactaacagcaggtttaacaaggatataagtcttaatgcaattggatttcttcgattctgcgcagcaaagttggccgaaggtgatattggatcctcaaggttgaaggacaatccttcaaacagtaatccaccctcgcctcatttgactaatgatggaaagcaggaatgcacagttcttgttgacaaggaagaccatatacacttttggtttcctttactagcgggactgtctgaacttacctttgacttaagaccagaaatcaggaaaagtgctttgcaagtgttatttgatacattaagaaaccatggccatcttttctctctgcctttatgggagaaggtgtttgattcagtgcttttccccatatttgattatgtacgtcatgctattgatccatctggtaatcctccacaaggacaaagcgtggaaaatgatcctgcagaacttgatcaagatgcttggttatacgagacatgcactttggcacttcagttggttgtagatctctttgttaagttctatgatacagtcaatcctcttctaaagaaggttctgctgctcttgacaagtttcataaagcgtccccatcagagtcttgctggtataggtattgctgcatttgttcgtttgatgagcagtgctggatctatgttcgtggatgaaaaatggctagaggttgtattgtcattgaaagaagctgccactgagacacttcctgatttcacttatgtttcatctggagcctacctggaaaatgtgccaacagaaaatggagtctctgctgacaatagagaggacgaatctgaaccagtagcggatgacaatgaagaatcctctagatcaaggaatctatactttacaattggtgatgccaaatgtcgagctgctgtacaactcctgttgattcaggctgtgatggaggtatataacatgtacagaggacagttatcagcacagaacacagtaatcctcttcgaagccttgcatactgttgccgcacatgctcacaaaataaacagtgatagtgatttgcgttccaagttgcaagagttgggctcgatgacacagatgcaggacccgccattgttacgccttgagaatgagtcgtaccagctgtgcctcagtatccttcagaacatatttctggacagctctcctgatcatggaagcacagaggtggtggagagtcaccttattggcttgtgcaaggaggtccttgaggtatacttgagcacagcaagaccttctcagccttccagtggcacacagccgctaggccattggcttatccctgttggttcatcgaagcgaagggaacttgcggcaagagcacctcttgttgtctcaaccctgcaagctatcagcggactaggtgactcagctttcgagaagaaccttcgccagttctttcctcttctcgctgggctcataagctgcgagcatggttctagtgaagtacaggtggccctgagtgatatgttcagcacttgggttggcccactcgttctccagtcttgctgatgctgaacatcatgttatacatagtagtatacatcccatcgtgttcctcctttcctccattatgttatgttaatcttttagtcgctgggagttcatattgttgtgctgaactgatcatgcagatcaatttttccttgacgttattttcttgttcgtatcgggaggagtgtatgtcactatagagaactgaattatgtacggtagtttagctaaaattgtgcccattctgttcctaatgtgctgatttctagatttttaggcatgttttgcatgcttttgctcagtagcgtttctcctttctggaattctggaatgtggtagggttggattataattcttgcgagttgggtgtgttaggctatcttcttttatcttaccttctattttaaactctattatgtaattagtgcaatttatagtataaaacattgttttgcacgtccatttacactggccgttggagatggccatagcggatatataaatttccatatattccaaacaataggcatatatgagtgttttgatcaag

SEQ ID NO: 203795 - DNA, 5964 bp, Zea Mays
ccctcccatctctatccacgacaaccgacgccccactccccgatccaaaccacctcaaacccccgccccgcccagatccagatccacgcggcgcggcgcgaccgcggctaccggatcccgccgcggaataatggcctccgcggttgcggcgccgccgccaaccccgccggagtccgacccgcgcctcgtcgagatcttctcccccttcctcgagaagctcataaaaaatgcctcgtggcgcaacaaggcgcactccaagctctcgcacaccgccaagtccatcctcgaccgcctccagaagcccccgccgccgcccgcagccgaggcgcaggcgccgtccacgccgacctcctccccctcgacgccgacctcctcttccgcacagcctggtccgttgcgcagcctgtcgctcgcggactcggagctgctcctcgcccctgtgatctcggcactcggctcgggcagcgccaagctcgccgaggccgcgctggagctccttcacaggctgatcgcacactcctacatccatggcgaggccgacccatctgctgatccctcagcacagctcgtcgcctcactcctggacgccgcctgcaatgcgcttggccttgatgacgagcacattgagctcctcctcctcaagacactcctctcggcggtcacctctacgtctgtacgcctccacggcgattgccttctacgtgccgtgcgcgcatgttatgatatgtacctcgggagccgtagtgccgtcaatcaagccactgccaaggcttcgcttgtgcagatgctggtgattgtgttccgccgaatggaagctgactcctcgaccgtgcctgtacaacccatagtcgtggctgatgtgattgagctacctgatgcaatttcgggctcctcgcccactgctgaccccaacgttgtacagggattcatttcgaagatcattggtgacttcgatggtgcactcacacctctggctcggacaacttcatcagcaggggcaggacccaccgttgcccatgatggtgcatttgagacaacggcagcggcagaggaaggggcaaacccagcggatttgcttgattcaacagataaggacatgcttgatgccaagtactgggagatcagcatgtacaaaacagctattgagggtcgtaaagatgagcttggtgtcgagggggcagtggttggcaccttggacgatgatgctgatgtgagaattgggaacaagttacggagggatgctttcttagttttccgggctttgtgtaagctttccatgaagacaccacccaaggatgcaccagcagatcccatagtaatgcggggaaagatccttgctcttgagcttctcaagatcttgcttgaaaatgctggggctgtgttccggaccagtgagaggtttctcggtgctatcaagcagtatctatgcctgtcacttttaaagaactgtgcctcatcccatatgattgtttttcagctatcttgttctatttttattagcttagtggcaagattcagaccaggattgaaggcagagattggtgtattctttcccatgatcatcttgagagtgttggaaaatattgctcaaccaaattatcaggcaaagatgattgttcttcgttttttggaaaagctctgtggtgattctcaaatcctagttgatattttccttaattatgattgtgatgtccactcatcaaacatatttgagaggatggtaaatggtctactaaagacagctcaaggacctcctgctggtgtccctaccacattggtaccacctcaggacaccacaatgaaaagtgaagcaatgaaatgcttagttgctattctgaggtccatgggagattggatgaataagcagctacgaattccagatcctgcttctcctaatgtagaatcagagaagaacgacaatgatgatggcaatgagcttccgcaggcagataacaatggagatgagtctagtgaagcatctgattcacattctgagttatcgaatggaatttcagaggcagcatcattggaacaacgtcgagcttacaagatagagcttcaggagggtatctatttgtttaatcggaagccgaagaaggggattgagttccttgttaatgcaagcaaggtgggggagacaccagaggagatagctgcgttcctaaaaagtgcttctggcttgaacaagactatgattggtgattatttaggtgaaagggaagatttatcgctgaaagtcatgcatgcatatgtggactcatttgattttcaaagactggagtttgatgaagcaattagagctttcctccaaggcttcaggttgcctggagaagctcagaagattgatcggattatggaaaagtttgcagagcgttactgcaaatgtaatccaaaggccttttccagtgcagatacagcttatgttctggcttattcagtcataatgcttaacactgatgcacataacccaatggtcaaaaataagatgtcaccagaagatttcattagaaacaatcgtggtatcgatgatgggaaggacctacctgaagaatttatgagatcattgtatgaaaggatttggaaaaaggagattaagatgaaagaagatgaatttgttccacagcagcaacaatcaacaagttctaacaaaattcttgggttggataacattcttaacattgttgtacgcaagcgaggttcatctatggagacaagtgatgacctcattaagcatatgcaggagcaatttaaagaaaaggcccgcatgtctgagtctgtattttatccagccacagatgtagttgttttgaagttcatggttgaggtttgctgggctcctatgcttgcagcattcagtgttccacttgaccagagtgatgatgaaattgttgtatcccagtgccttgaaggatttcgctctgcaatccatgttactgcagccatgtcaatgaagactcaaagagatgcatttatcacttcacttgccaagtttacatcacttcactctgctgctgatattaagcagaaaaatgttgaagccattaaggcaattctattaattgcagatgaagatggaaattacttgcaagaagcatgggagcatatattgacatgtgtttctcgttttgaaaatctacatcttgttggagagggagcacctccagatgccactttctttgcgctgcagcagccggaccttgataaatcaaaacaggctaagtcatcgattcttcctgttctgaaaaagaaggctcctaatgctacttcagcttctaaaagaggctcttatgatagcgctggtgtcggtggcaaagcttctggtgtggatcaaatgaataatgaggtgacaagcctcttggagcaagttgggatggctgaaatgaaccgtgtatttgtaagaagtcaaaaactcaacagcgagggtataattgattttgtgaaggctctctgtaaggtttcaatggaggaattacgttcggcttctgatccacgagtttttagtctgacaaagatagtcgagatagcaaaatctttcaatcgcaatatttgctatggactccttgcggcagttatctatgaagttcctggagcgtgaggagctcacaaactacaatttccaaaatgaatttatgaagccttttgttgttgtaatgaggaagagccgagctgttgagatcagagaacttatcattaggtgtgtctctcaaatggtattggcccgtgttagtcatgtgaagtcagggtggaagagtatgtttatggtctttgcgacagcgtcatatgatgatcacaaaaatattgtactattggcctttgaaattatagaaaagattttgcgggaatactttccatacattactgagactgagacaacgactttcaacgattgtgtgaattgtcttatcgcgtttactaacagcaggtttaacaaggatataagtcttaatgcaattggatttcttcgattctgcgcagcaaagttggccgaaggtgatattggatcctcaaggttgaaggacaatccttcaaacagtaatccaccctcgcctcatttgactaatgatggaaagcaggaatgcacagttcttgttgacaaggaagaccatatacacttttggtttcctttactagcgggactgtctgaacttacctttgacttaagaccagaaatcaggaaaagtgctttgcaagtgttatttgatacattaagaaaccatggccatcttttctctctgcctttatgggagaaggtgtttgattcagtgcttttccccatatttgattatgtacgtcatgctattgatccatctggtaatcctccacaaggacaaagcgtggaaaatgatcctgcagaacttgatcaagatgcttggttatacgagacatgcactttggcacttcagttggttgtagatctctttgttaagttctatgatacagtcaatcctcttctaaagaaggttctgctgctcttgacaagtttcataaagcgtccccatcagagtcttgctggtataggtattgctgcatttgttcgtttgatgagcagtgctggatctatgttcgtggatgaaaaatggctagaggttgtattgtcattgaaagaagctgccactgagacacttcctgatttcacttatgtttcatctggagcctacctggaaaatgtgccaacagaaaatggagtctctgctgacaatagagaggacgaatctgaaccagtagcggatgacaatgaagaatcctctagatcaaggaatctatactttacaattggtgatgccaaatgtcgagctgctgtacaactcctgttgattcaggctgtgatggaggtatataacatgtacagaggacagttatcagcacagaacacagtaatcctcttcgaagccttgcatactgttgccgcacatgctcacaaaataaacagtgatagtgatttgcgttccaagttgcaagagttgggctcgatgacacagatgcaggacccgccattgttacgccttgagaatgagtcgtaccagctgtgcctcagtatccttcagaacatatttctggacagctctcctgatcatggaagcacagaggtggtggagagtcaccttattggcttgtgcaaggaggtccttgaggtatacttgagcacagcaagaccttctcagccttccagtggcacacagccgctaggccattggcttatccctgttggttcatcgaagcgaagggaacttgcggcaagagcacctcttgttgtctcaaccctgcaagctatcagcggactaggtgactcagctttcgagaagaaccttcgccagttctttcctcttctcgctgggctcataagctgcgagcatggttctagtgaagtacaggtggccctgagtgatatgttcagcacttgggttggcccactcgttctccagtcttgctgatgctgaacatcatgttatacatagtagtatacatcccatcgtgttcctcctttcctccattatgttatgttaatcttttagtcgctgggagttcatattgttgtgctgaactgatcatgcagatcaatttttccttgacgttattttcttgttcgtatcgggaggagtgtatgtcactatagagaactgaattatgtacggtagtttagctaaaattgtgcccattctgttcctaatgtgctgatttctagatttttaggcatgttttgcatgcttttgctcagtagcgtttctcctttctggaattctggaatgtggtagggttggattataattcttgcgagttgggtgtgttaggctatcttcttttatcttaccttctattttaaactctattatgtaattagtgcaatttatagtataaaacattgttttgcacgtccatttacactggccgttggagatggccatagcggatatataaatttccatatattccaaacaataggcatatatgagtgttttgatcaag

SEQ ID NO: 203796 - DNA, 3686 bp, Zea Mays
cgcgtaacccacatggtccacaaccccccggctgtctctacctccttcctcgctcacctcctcacgacgtgaggaatcgatcaggccaccgccgtacccgtcggagatccgctccgcccgcgcgatttcgatccgaaacacctcgtcggatcttcagggatctgactgaggggcagcgcgccggctgctgacacggcgggcacgcgcgcagccagccatggcgcgtggtggcggaggcggctgctgcccgccaatggatctgatgcgatcggaggcgatgcagctggtgcagcttaatatagataagagcccgtttcaacggacatatgctgcccagattaaaaggtgtagtgaaatggctcgtaaattaaggttttttaaggagcagatgtcaaaagctgacataacagcctctcctacacaactaaatggaactcatatggattttgatgaattggagataaagcttggagaactggaagctgagctaactgaagttaatgcaaacaatgaaaaattacagaggacctataatgagctattagagtaccatactgttctccaaaaggctggtgaatttttctattcagctcaaagaactgctgcagcgcaacaaatggaaatggaggcaaatcaatctggtcaaacttcactggagagccctctgttggaacaggagatgacaactgatccatcaaaacaagtgaagcttggctcattgagtggacttgttccaaaggaaaaggcaatggcttttgaacggatcttattccgtgccacaaggggtaacattttccttaggcaagagcctgttgatgagccagtcactgatccagtttctagggagaaggtaacgaaaaatgcatttgtcatattctactctggagagagagcaaaaaccaaaattctgaagatatgtgatgcctttaatgcgaaccgttacccgtttccagaagatgttggcaaacaacttcatgctgttcaggaggtatctgggaagatctcagagttgaagacaacaattgacatgggtttagctcatcgtgacagtatactaaaaaatattgcttctgattttgaacagtggaaccatctggtcaaaaaggaaaaggcaatttatcacaccttgaacatgctaagtgttgatgttacgaagaaatgtttagttgctgagggctggagtccaatttttgcaagcattcagattcaagacgctcttcagcgtgctactcttgatagcaaatcccaagttggctcaatatttcaagttctcaacacaaaagaatctcctccaacatatttccagacaaataaatttacttcagcgttccaggaaattgttgatgcgtatggtgtagccaagtatcaagaagcaaatcctggagtattcaccattgtgactttccctttcttatttgctgtcatgtttggtgattggggccatggaatttgcttgttacttgcaacactctatcttataatccgggagaagaaactagcttcacagaaacttggagacataatggagatgatgtttggtgggcgttatgtaattatgatgatggcagttttttcaatctacacaggattaatatacaatgaatttttctctgttccatttgggcttttcggtaaatctgcctatgcatgccgtgattcttcttgcagtgatgctactaccgaaggacttcttaaagtaagagatgcatacccttttggtgtggaccctgtctggcatggtagccgcagtgagctaccgtttctcaactcactgaagatgaagatgtcgattcttcttggagttgcacaaatgaaccttgggattgtgattagttacttcaatgcaaaatttttcaggaacagtattaatgtgtggtaccagttcattccccagctgatcttcttgaacagcttatttggctacctgtccttgctcattattattaagtggtgcacggggtcgaaagcagatctataccacgttatgatctacatgttccttagcccaacagatgatcttagtgagaaccagttgtttagtggccagaagacagtgcagcttgttctacttctgcttgctttagtgtctgtaccttggatgttgattccaaaacctcttcttttgaagaaacaacatcagcaaaggcatcaaggtcaccagtacgctatgcttcagggcattgatgaatcagtgggagcagaattgggggaacatcatgaggacgcacatgaccacgaggagtttgagttcggtgaagtttttgttcaccaactgattcacacgatagaatttgttctgggtgcagtctcaaacaccgcttcataccttcgtctttgggctctgagtcttgcacactctgagttgtccactgtattctacgagaaagtactaatgacggcatatgggtttaacaatgttttcatccttattattggtgtcgtcatcttcatctttgccacgattggtgtcttgcttgttatggagaccctgagtgcattccttcacgcgctgaggcttcactgggtggagttccagaacaagttctatgaaggtgatggctacaagtttgccccattctccttcgcgctgattcgtgaggaggaagattgagcttgtctcaacatttgtatttattgtagccgataaaaaatctttggtggtctttgttcccagaccaaatcattttttcatctgttgtgtcggatgtggatcataaaccaccgtccctttgtttaaactgggacgaacagcatcatttttccttagctatgcagaggattcttgggttggttggcaacagatatggggtgatgtcacccttgtatgatgctaataagtagttgccgattgggcggtgtgttggatataaataagcactgtattgaaggttagacaatctccatcacgttcattgtcaataaaataaagagtgctatttacgctgctggtgttaatcatctcctggtctgttgttaaccattgtcagtgcttcatcttatcccattgatactctgaatcagctgtctcttataaccaaagcaaaagctaaaccagaatcacgttataaaagtagttaaacatgtcgagtctgtctgcttgtgggcaatctagtaacataggtagctgcagcctagtttcgtcagtcgtcaacgacgttgggaacgctgctggtgctgcgcctagagctgctgaaaggtcccgtgacagtccggccaacgaacttgccggccttgctgagtccgctaccgaacgcgccaatgccggagccgacggcgccgatgcccgtgccaaccatcccaacgccggagccggccgcgctgacacccgtgccggcaacggtgccggccgccgcgatgcccgtgccggccacgttggtgaccgtggacgccatgccgcttgccgcgtccgcggcgccgctgacggcccccgtctcgctcttcaccttccgccgctcatccacggtctgcttctccagctccagggcctcccgcgcctctgcgttggtgaactggtggtacgccaccttaatgctgagcacgcccctgtccttcttgtccttgaccttggtcgtgtccagcgacgacagcagctgcagtttcacctcctgcacggtttccatctccaggtcgctcaggggcagcttggcgatgccaagcctcttgtcttgcttcatcttgtcctcatc

SEQ ID NO: 203797 - DNA, 2988 bp, Zea Mays
ggggaagggttttggaattaggccgccggacgccgttgcgtgggagagagcaaagtgaaccaggccgaaaccgaagctaccgccacgaccaccacccgcgcccactgcagcaacgccggaccctcgtctccctgtccccgactaccaggaggagatcccggcggcgaggatgagcggcggcggtgccggagggaagggggcggcggcgcccgtcccggccgggtcgaggaaactggtgcagtgtctcaaggagatcgtgaaccgacccgaggcggagatctactccgcactgcgcgagtgcggcatggaccccgacgaggcggtcagccgcctcctctcccaagatactttccaagaggtaaagagcaagcgcgacaagaagaaagagattaaagaggttcctgagacaagatatcgatcggcaaatagttctactaatcgaagccttagaagtggtgcagatcgtggtggacgtagcaattctgtgcactccagctctactgataacatgacctcaaggccaccagtctcagggtcttgtacggcatcagttaattccaatcaaatgcagacaattgcaagttcctctgcaaacaaacatatggttactgatggactagctgtatcattgcaatcatcgtgtgggtttcagcatggtggttggtctgggacacctggtcagttgtcgatggttgacattgtgaaaatgggccgccctcagggaaaggcttctagcaaacctgtggtcacagctgacagaggttatgctggacagtacccatctttgccaagcacaaaccagaacctcaaacaatctggaagcatggtttccccagcagagcttgacaaggggttacaacctgcccacaatttggttcaggttaagaatcatggtcattttactgctgatagcaagctcccatatggtactgattggtctccacaagacgacccaacatctgagaaccaatcttcccagcctgagacgtctggtgatccatctttgtatgaatcatcatttcagtcatctacattggttactgatgtagttaattcacatgaaaattcacacttggagttggatgaaaacagcacctttgcaatgagatcaacacctgcctctgagagacacttggaacctagtgacagtattcctgaatacaatgatggaatattaaacaactcaagttcatatcagcctcataattactcttacacagaacaagatgttgaggattccagtgctgatgtatcagcagcagcagaaaatttccagagtttaagcctacataatgatgagttagctgcaaaaaagactgctgaagataaccctgcagtgataattcctgatcatttgcaagttaccaatacagaatgtgttagtttgagctttggcagttttggatctggtgcattttctgggctactcccacaaaagaccactgatagcaatgtggaattccttgttcaagaggattctgcaacagtagatccaatagatgccaggaatcaagattactatgaaagtggtgcagtaacttcaccagcagaagaaaatcttgaggccatgctaggaactaacatggagaatgtcgatgcaccttctgtttcacaggctaatgagctcagtcaggacgtacttgatccttctgtacttaaatatgacgtgtcatcagtttcaagtcatgcttattcgaacatgaacactccacaacctagcacaatagaggacccacaaggaaacaaccaagcacatacgctttcccatttgtcaaacatgatggccctgaaagcaggggttttctccaacgctcggtctacgcagtctcttccaagtactagcattccgacggggcatcctctccctcagcaattagcacatcacccttactctcagccgactttagcacccatcacacatttcccaaatatcgttggctatccgccgtatttgccacaaaactatgctgcttacctatcttcgggcaccttccagcaagcatacccgagcaatggagcattccatcagtctgctgccgctttgctcggatctggtatgaagtactcggcccccgagtataagaacaacctgtctgccacaggcttacaacagcaacatcagccacaaccgcaaccaccttcatcagtcatctctggttatggaggccttggaagctcaagcaatatacaaggaaattttacccttaatcagagtactggcactggatcaactcttgtgtttgatgatgcattgggcagacagtacaaagacaccagtcaacacatagctctccagcagcccgacaactctggaatgtggcttcatggctctggttcaagagcggcggcgcttccgcctaaccacttttatggttaccagggacagagtcagctgggtggctttggtcaggcgcagcagcaacagccttcccaattcggaggccacgggtacccgactttctaccagtctcagggtgggctgacacaggagcaccacccccagaaccttgctgagggcagcctgaatggcttccaggtcgcaccgtctcagccgtctcatccgagctggcagcatcagcacacctactgagcattgttctcccttgttatggtctgtctctttcgccgtcacaagccaagtttcgcgtgcttgtgcccttactcgatgcagagtaagctgctcggattttagctgagcttgtaccttcagcgctgagaagggtcccaggacccaggcatacaacagttagagcgttttaacatgctgcgtgcgtgcgtgtgtgtgtgttgccagaccgatgccttgtggtttttcgatagcgagttatatgtgcggaggcgcagtcatgtataactgagacatgataacataacaaccaatcgtttcgcttgcatttttttggtcatgcacacatgcggttatcgcttcaggaagaaaaaaaggagcacctctgactcagcttatggattataaatattttcaatctc

SEQ ID NO: 203798 - DNA, 3059 bp, Zea Mays
ggggaagggttttggaattaggccgccggacgccgttgcgtgggagagagcaaagtgaaccaggccgaaaccgaagctaccgccacgaccaccacccgcgcccactgcagcaacgccggaccctcgtctccctgtccccgactaccaggaggagatcccggcggcgaggatgagcggcggcggtgccggagggaagggggcggcggcgcccgtcccggccgggtcgaggaaactggtgcagtgtctcaaggagatcgtgaaccgacccgaggcggagatctactccgcactgcgcgagtgcggcatggaccccgacgaggcggtcagccgcctcctctcccaagatactttccaagaggtaaagagcaagcgcgacaagaagaaagagattaaagaggttcctgagacaagatatcgatcggcaaatagttctactaatcgaagccttagaagtggtgcagatcgtggtggacgtagcaattctgtgcactccagctctactgttcctctgcaaacaaacatatggttactgatggactagctgtatcattgcaatcatcgtgtgggtttcagcatggtggttggtctgggacacctggtcagttgtcgatggttgacattgtgaaaatgggccgccctcagggaaaggcttctagcaaacctgtggtcacagctgacagaggttatgctggacagtacccatctttgccaagcacaaaccagaacctcaaacaatctggaagcatggtttccccagcagagcttgacaaggggttacaacctgcccacaatttggttcaggttaagaatcatggtcattttactgctgatagcaagctcccatatggtactgattggtctccacaagacgacccaacatctgagaaccaatcttcccagcctgagacgtctggtgatccatctttgtatgaatcatcatttcagtcatctacattggttactgatgtagttaattcacatgaaaattcacacttggagttggatgaaaacagcacctttgcaatgagatcaacacctgcctctgagagacacttggaacctagtgacagtattcctgaatacaatgatggaatattaaacaactcaagttcatatcagcctcataattactcttacacagaacaagatgttgaggattccagtgctgatgtatcagcagcagcagaaaatttccagagtttaagcctacataatgatgagttagctgcaaaaaagactgctgaagataaccctgcagtgataattcctgatcatttgcaagttaccaatacagaatgtgttagtttgagctttggcagttttggatctggtgcattttctgggctactcccacaaaagaccactgatagcaatgtggaattccttgttcaagaggattctgcaacagtagatccaatagatgccaggaatcaagattactatgaaagtggtgcagtaacttcaccagcagaagaaaatcttgaggccatgctaggaactaacatggagaatgtcgatgcaccttctgtttcacaggctaatgagctcagtcaggacgtacttgatccttctgtacttaaatatgacgtgtcatcagtttcaagtcatgcttattcgaacatgaacactccacaacctagcacaatagaggacccacaaggaaacaaccaagcacatacgctttcccatttgtcaaacatgatgcaagcaaatcctttgagcactagcagcctattggcgtcaaatcaaaatcatccatctcttcatggcttagagtttgatttgccttatcttgaagcaaaatataacgcaggcacgactacaaatcctagaccagccatatccatgcaggaggccctgaaagcaggggttttctccaacgctcggtctacgcagtctcttccaagtactagcattccgacggggcatcctctccctcagcaattagcacatcacccttactctcagccgactttagcacccatcacacatttcccaaatatcgttggctatccgccgtatttgccacaaaactatgctgcttacctatcttcgggcaccttccagcaagcatacccgagcaatggagcattccatcagtctgctgccgctttgctcggatctggtatgaagtactcggcccccgagtataagaacaacctgtctgccacaggcttacaacagcaacatcagccacaaccgcaaccaccttcatcagtcatctctggttatggaggccttggaagctcaagcaatatacaaggaaattttacccttaatcagagtactggcactggatcaactcttgtgtttgatgatgcattgggcagacagtacaaagacaccagtcaacacatagctctccagcagcccgacaactctggaatgtggcttcatggctctggttcaagagcggcggcgcttccgcctaaccacttttatggttaccagggacagagtcagctgggtggctttggtcaggcgcagcagcaacagccttcccaattcggaggccacgggtacccgactttctaccagtctcagggtgggctgacacaggagcaccacccccagaaccttgctgagggcagcctgaatggcttccaggtcgcaccgtctcagccgtctcatccgagctggcagcatcagcacacctactgagcattgttctcccttgttatggtctgtctctttcgccgtcacaagccaagtttcgcgtgcttgtgcccttactcgatgcagagtaagctgctcggattttagctgagcttgtaccttcagcgctgagaagggtcccaggacccaggcatacaacagttagagcgttttaacatgctgcgtgcgtgcgtgtgtgtgtgttgccagaccgatgccttgtggtttttcgatagcgagttatatgtgcggaggcgcagtcatgtataactgagacatgataacataacaaccaatcgtttcgcttgcatttttttggtcatgcacacatgcggttatcgcttcaggaagaaaaaaaggagcacctctgactcagcttatggattataaatattttcaatctc

SEQ ID NO: 203799 - DNA, 3057 bp, Zea Mays
ggggaagggttttggaattaggccgccggacgccgttgcgtgggagagagcaaagtgaaccaggccgaaaccgaagctaccgccacgaccaccacccgcgcccactgcagcaacgccggaccctcgtctccctgtccccgactaccaggaggagatcccggcggcgaggatgagcggcggcggtgccggagggaagggggcggcggcgcccgtcccggccgggtcgaggaaactggtgcagtgtctcaaggagatcgtgaaccgacccgaggcggagatctactccgcactgcgcgagtgcggcatggaccccgacgaggcggtcagccgcctcctctcccaagatactttccaagaggtaaagagcaagcgcgacaagaagaaagagattaaagaggttcctgagacaagatatcgatcggcaaatagttctactaatcgaagccttagaagtggtgcagatcgtggtggacgtagcaattctgtgcactccagctctactgataacatgacctcaaggccaccagtctcagggtcttgtacggcatcagttaattccaatcaaatgcagacaattgcaagttcctctgcaaacaaacatatggttactgatggactagctgtatcattgcaatcatcgtgtgggtttcagcatggtggttggtctgggacacctggtcagttgtcgatggttgacattgtgaaaatgggccgccctcagggaaaggcttctagcaaacctgtggtcacagctgacagaggttatgctggacagtacccatctttgccaagcacaaaccagaacctcaaacaatctggaagcatggtttccccagcagagcttgacaaggggttacaacctgcccacaatttggttcaggttaagaatcatggtcattttactgctgatagcaagctcccatatggtactgattggtctccacaagacgacccaacatctgagaaccaatcttcccagcctgagacgtctggtgatccatctttgtatgaatcatcatttcagtcatctacattggttactgatgtagttaattcacatgaaaattcacacttggagttggatgaaaacagcacctttgcaatgagatcaacacctgcctctgagagacacttggaacctagtgacagtattcctgaatacaatgatggaatattaaacaactcaagttcatatcagcctcataattactcttacacagaacaagatgttgaggattccagtgctgatgtatcagcagcagcagaaaatttccagagtttaagcctacataatgatgagttagctgcaaaaaagactgctgaagataaccctgcagtgataattcctgatcatttgcaagttaccaatacagaatgtgttagtttgagctttggcagttttggatctggtgcattttctgggctactcccacaaaagaccactgatagcaatgtggaattccttgttcaagaggattctgcaacagtagatccaatagatgccaggaatcaagattactatgaaagtggtgcagtaacttcaccagcagaagaaaatcttgaggccatgctaggaactaacatggagaatgtcgatgcaccttctgtttcacaggctaatgagctcagtcaggacgtacttgatccttctgtacttaaatatgacgtgtcatcagtttcaagtcatgcttattcgaacatgaacactccacaacctagcacaatagaggacccacaaggaaacaaccaagcacatacgctttcccatttgtcaaacatgatgcaagcaaatcctttgagcactagcagcctattggcgtcaaatcaaaatcatccatctcttcatggcttagagtttgatttgccttatcttgaagcaaaatataacgcaggcacgactacaaatcctagaccagccatatccatgcaggaggccctgaaagcaggggttttctccaacgctcggtctacgcagtctcttccaagtactagcattccgacggggcatcctctccctcagcaattagcacatcacccttactctcagccgactttagcacccatcacacatttcccaaatatcgttggctatccgccgtatttgccacaaaactatgctgcttacctatcttcgggcaccttccagcaagcatacccgagcaatggagcattccatcagtctgctgccgctttgctcggatctggtatgaagtactcggcccccgagtataagaacaacctgtctgccacaggcttacaacagcaacatcagccacaaccgcaaccaccttcatcagtcatctctggttatggaggccttggaagctcaagcaatatacaaggaaattttacccttaatcagagtactggcactggatcaactcttgtgtttgatgatgcattgggcagacagtacaaagacaccagtcaacacatagctctccagcagggacagagtcagctgggtggctttggtcaggcgcagcagcaacagccttcccaattcggaggccacgggtacccgactttctaccagtctcagggtgggctgacacaggagcaccacccccagaaccttgctgagggcagcctgaatggcttccaggtcgcaccgtctcagccgtctcatccgagctggcagcatcagcacacctactgagcattgttctcccttgttatggtctgtctctttcgccgtcacaagccaagtttcgcgtgcttgtgcccttactcgatgcagagtaagctgctcggattttagctgagcttgtaccttcagcgctgagaagggtcccaggacccaggcatacaacagttagagcgttttaacatgctgcgtgcgtgcgtgtgtgtgtgttgccagaccgatgccttgtggtttttcgatagcgagttatatgtgcggaggcgcagtcatgtataactgagacatgataacataacaaccaatcgtttcgcttgcatttttttggtcatgcacacatgcggttatcgcttcaggaagaaaaaaaggagcacctctgactcagcttatggattataaatattttcaatctc

SEQ ID NO: 203800 - DNA, 2836 bp, Zea Mays
gacaagttgggcgcagttggcttttgcctcgtcccctccgccgccccgttgccgaaacaaaactcgctcttcggacaaaacgccaacgccagggcgagcgagcgaggtgaggtcacctaccagctcccacagtcgcactcccccctcgcgccgtcccgtcgtaggaatggaatgaggccgaggcccctcctcctcctcctcgtcgtcgtcgtcgtcgtcggtgcttctcccgtgacaggcctcccttcctccggtccggtcgccctctgacccaatccgcatacatccaccaaccagacaggggaggatggatttgtccaggctcgcctccgtcgccgggcccagccgcgcggccccgcgggcgggcctgcagatcggcgccgccgggaatggcttccgcgtctgctccctgcggcaccgcggcgccgggaacgggcgcctcacgtccgccgccgccctcctccgcggcagcagcgggctcttctacctggctcccgcgcgcgggggccctccccgtctccgcgccagagggcggccgcggtgccagggcagcgactcgttggcctacgtcgacggccccttggaggccgccaagggctccggcgaggtctacgacgacgatgccaccagctcggggcccgacgacgacgacaatgacaagggccccgccgacgtggacggtctccgggagatgctgcagaggtgcaggaacgagctcgaggtggccaggctcaacagcaccatgttcgaggagaaggctcagcggatatccgagtcggccatcgcgctcaaggaccgcgccgaaggcgcccagagggacgtgtccgcggccgtcgccaccgtgcaggaggtcatcgtcaaggaggcggacgccaaggaggccgtccagaaggctaccatggcgctgtcgatggccgaggccaggctgcagctggcgtccgaggcgctggatgccaagcgggggtcggtcgggcccatggaggttagcatcgaaggcgtggaggaggaggcccttgtgtctgctcaggaagagatcaaggattgccgggcagccttgttgcggtgtgaggaggagctggaacgcatccaggaacagaaaatgaacctgcagaaggaggttgataggctcaccgagctcgctgagaaggcccagttggatgcatccaaggccgaagaagatgtcaccaatataatggtgttggctgagcaggcggtggctcttgagatgaaagccacgcagcgtgtcaacgacgcggaggcggtgctgctgaaagcggagaaggtcatatcctcggttgacaccgtggtggagctaacatcacttgctgaagagcagaaaagcgctgaagaggatagcgtttctgaagggtatgagtatagcagcaatggcactgatgatgttcctgtgagggatgaggtgtcaagtatcgagcgtctaatggtaggtgacttgactgttgagggcattgagcagcttgaaccatcccgtgaaatatatgatgaagcaagcagcgataagatgtccgttgagcctcagaaagaagctgagcctgattcagacaagttgaagcaagggaagaagcaggaaatggaacgaaaggagttcaccaaggaaccactgagtgctcaaaaatcactgaagaagagatcatcccgcttcttcccggcatctttcttctcctccaaagctgatggagagtttacacctacatctgtctttcgggggttaatgaaatcagtgcaaaaacaggctcccaagcttgttgttgggatattgcttcttggtgcaggggccttcttcttaaatagagctgagaagagtcaactatttcagcagcaagaaattgccacaagtattggaaaggtaacctccacgacaaagcccatagttcgtgagatacggcaaattccacagagagtaaagaagctaatagagctcttacctcatcaagaggtaaatgaggaagaagcttcacttttcgacatactgtatttgcttcttgccagtgttatttttgtaccattatttcagaaaatccctggaggcagtcctgttcttggatatcttgctgctggtgtcctcattggtccatatgggctctccatcatccgtaatgtgcatgggacaaaggcaattgcggaattcggagtcgtgttcttactgtttaacattggacttgagctttctgtggaaaggctaagttcgatgaagaagtatgtcttcggcttgggatctgctcaggtgctagctactactgcagctgttggtgtgatagctcatcgttttgctgtgctaccaggaccagcagcaattgttgttgggagtggcttggctctgtcatccacggctgttgtcttgcaagtattgcaagagcgtggtgaaagtacgtcgcgtcatggacgtgccacattttctgtgttattgttccaggatttggctgtggtggtcctgttgatattaatacctctcatatcacctaattcttcaaaaggaggggttggtttccaagcaatagcagaagccatgggaatggctgcagtcaaagcagtagctgctataactgccataattgctggaggtcgtctgttgcttcggcctatttacaagcaaattgctgaaaatcagaatgctgagatattttcagcaaatacactccttgttatttttggcacaagtcttcttacagcccgggctgggttatcgatggcacttggagcttttttggctggtctgttactagcagaaacagagttctccttacaggttgagtcagatatagctccttatcgtggtcttctgttaggacttttctttatgacgatggaaccattttaa

SEQ ID NO: 203801 - DNA, 4328 bp, Zea Mays
acaagttgggcgcagttggcttttgcctcgtcccctccgccgccccgttgccgaaacaaaactcgctcttcggacaaaacgccaacgccagggcgagcgagcgaggtgaggtcacctaccagctcccacagtcgcactcccccctcgcgccgtcccgtcgtaggaatggaatgaggccgaggcccctcctcctcctcctcgtcgtcgtcgtcgtcgtcggtgcttctcccgtgacaggcctcccttcctccggtccggtcgccctctgacccaatccgcatacatccaccaaccagacaggggaggatggatttgtccaggctcgcctccgtcgccgggcccagccgcgcggccccgcgggcgggcctgcagatcggcgccgccgggaatggcttccgcgtctgctccctgcggcaccgcggcgccgggaacgggcgcctcacgtccgccgccgccctcctccgcggcagcagcgggctcttctacctggctcccgcgcgcgggggccctccccgtctccgcgccagagggcggccgcggtgccagggcagcgactcgttggcctacgtcgacggccccttggaggccgccaagggctccggcgaggtctacgacgacgatgccaccagctcggggcccgacgacgacgacaatgacaagggccccgccgacgtggacggtctccgggagatgctgcagaggtgcaggaacgagctcgaggtggccaggctcaacagcaccatgttcgaggagaaggctcagcggatatccgagtcggccatcgcgctcaaggaccgcgccgaaggcgcccagagggacgtgtccgcggccgtcgccaccgtgcaggaggtcatcgtcaaggaggcggacgccaaggaggccgtccagaaggctaccatggcgctgtcgatggccgaggccaggctgcagctggcgtccgaggcgctggatgccaagcgggggtcggtcgggcccatggaggttagcatcgaaggcgtggaggaggaggcccttgtgtctgctcaggaagagatcaaggattgccgggcagccttgttgcggtgtgaggaggagctggaacgcatccaggaacagaaaatgaacctgcagaaggaggttgataggctcaccgagctcgctgagaaggcccagttggatgcatccaaggccgaagaagatgtcaccaatataatggtgttggctgagcaggcggtggctcttgagatgaaagccacgcagcgtgtcaacgacgcggaggcggtgctgctgaaagcggagaaggtcatatcctcggttgacaccgtggtggagctaacatcacttgctgaagagcagaaaagcgctgaagaggatagcgtttctgaagggtatgagtatagcagcaatggcactgatgatgttcctgtgagggatgaggtgtcaagtatcgagcgtctaatggtaggtgacttgactgttgagggcattgagcagcttgaaccatcccgtgaaatatatgatgaagcaagcagcgataagatgtccgttgagcctcagaaagaagctgagcctgattcagacaagttgaagcaagggaagaagcaggaaatggaacgaaaggagttcaccaaggaaccactgagtgctcaaaaatcactgaagaagagatcatcccgcttcttcccggcatctttcttctcctccaaagctgatggagagtttacacctacatctgtctttcgggggttaatgaaatcagtgcaaaaacaggctcccaagcttgttgttgggatattgcttcttggtgcaggggccttcttcttaaatagagctgagaagagtcaactatttcagcagcaagaaattgccacaagtattggaaaggtaacctccacgacaaagcccatagttcgtgagatacggcaaattccacagagagtaaagaagctaatagagctcttacctcatcaagaggtaaatgaggaagaagcttcacttttcgacatactgtatttgcttcttgccagtgttatttttgtaccattatttcagaaaatccctggaggcagtcctgttcttggatatcttgctgctggtgtcctcattggtccatatgggctctccatcatccgtaatgtgcatgggacaaaggcaattgcggaattcggagtcgtgttcttactgtttaacattggacttgagctttctgtggaaaggctaagttcgatgaagaagtatgtcttcggcttgggatctgctcaggtgctagctactactgcagctgttggtgtgatagctcatcgttttgctgtgctaccaggaccagcagcaattgttgttgggagtggcttggctctgtcatccacggctgttgtcttgcaagtattgcaagagcgtggtgaaagtacgtcgcgtcatggacgtgccacattttctgtgttattgttccaggatttggctgtggtggtcctgttgatattaatacctctcatatcacctaattcttcaaaaggaggggttggtttccaagcaatagcagaagccatgggaatggctgcagtcaaagcagtagctgctataactgccataattgctggaggtcgtctgttgcttcggcctatttacaagcaaattgctgaaaatcagaatgctgagatattttcagcaaatacactccttgttatttttggcacaagtcttcttacagcccgggctgggttatcgatggcacttggagcttttttggctggtctgttactagcagaaacagagttctccttacaggttgagtcagatatagctccttatcgtggtcttctgttaggacttttctttatgacggttggaatgtctattgacccaaagctgcttctgtcaaacttcccaatgatctctatgatattgggtctcttgataattggaaagacattgttggttacatttgtgggcagggtatttggggtttctactatagctgccattcgtgttggtctcttgcttgcgcctggtggtgagtttgcttttgttgcctttggagaagctgtcaaccagggtcttctatcacctcaattatcatcgttactgtttttagtcgttggcatttcaatggctctgacaccatggttagctgctggagggcagtttctggcatcaaaatttgagcagcatgatgtgaggagtttattgcctgtggaaagtgagactgacgatttgcacgaccatattattatattaggctttggacgtgttgggcagatcgttgcgcaactcctgtcagagcggttaattccttttgttgcccttgatgttagaagtgatcgggttgcagttgggcgtgcacttgaccttccggtatattttggggatgctggaagcagagaggtactgcacaaagttggagctgaaagagcttgtgctgctgcaattactttggatacccctggtgcaaactatagagctgtctgggcattgaacaaatatttcccaaatgtgaagacatttgttagagcacatgatgttgatcatggtgttaatttggagaaagctggtgcaacagcggttgtccctgagaccttggagccaagtcttcagctagctgctgctgttcttgcacaagcaaaactcccaatgtcagagattcaggaaagcatcaacgagttccggaatcgtcatctgtcagagcttacagagttgtgtgctacgtcaggaaattctcttggctatgggttttccagagttatgtccaaatcgaagtctatcagctccgatgatgaaagcgaaacagtggatggcgcactagcaatttgaagacgattagataaaatgggatcccttgatagtactagatcgattgcactgttagtagataagcttgttgcatgtagaaaaatggaataaaaattaatgcaagagctgtcacaaaaatcggcgtgcaattttgtatgttagagtacttatatatttcttctctcccccaaaaaaattgtttgcatacaactcttcacaaagaaaaataatacactctagcagtgcacgtgaaaatgagacccttgtaagcagggaagaaaatagatgtcagaatgctgaatacttcccatgcttgctcaaaggagcatatggtacagtcaggccagttggacggttgggacctggctttgggtatgtttagtacaatttttgggtgtgtttgggacagttttttaaagagcttttctaaaaatctagaattttggataatctaactgtcacaagaatttagatatcgctagttgatctattcaaacgctgggttaagatcggattgtgggtcatatgacacggtctacgtttgacctgtgcatagggttaag

SEQ ID NO: 203802 - DNA, 4374 bp, Zea Mays
ggcgcagttggcttttgcctcgtcccctccgccgccccgttgccgaaacaaaactcgctcttcggacaaaacgccaacgccagggcgagcgagcgaggtgaggtcacctaccagctcccacagtcgcactcccccctcgcgccgtcccgtcgtaggaatggaatgaggccgaggcccctcctcctcctcctcgtcgtcgtcgtcgtcgtcggtgcttctcccgtgacaggcctcccttcctccggtccggtcgccctctgacccaatccgcatacatccaccaaccagctttgatttgcgctgtttccgattgtactcgtgctccgcccgctacgatacaggacaggggaggatggatttgtccaggctcgcctccgtcgccgggcccagccgcgcggccccgcgggcgggcctgcagatcggcgccgccgggaatggcttccgcgtctgctccctgcggcaccgcggcgccgggaacgggcgcctcacgtccgccgccgccctcctccgcggcagcagcgggctcttctacctggctcccgcgcgcgggggccctccccgtctccgcgccagagggcggccgcggtgccagggcagcgactcgttggcctacgtcgacggccccttggaggccgccaagggctccggcgaggtctacgacgacgatgccaccagctcggggcccgacgacgacgacaatgacaagggccccgccgacgtggacggtctccgggagatgctgcagaggtgcaggaacgagctcgaggtggccaggctcaacagcaccatgttcgaggagaaggctcagcggatatccgagtcggccatcgcgctcaaggaccgcgccgaaggcgcccagagggacgtgtccgcggccgtcgccaccgtgcaggaggtcatcgtcaaggaggcggacgccaaggaggccgtccagaaggctaccatggcgctgtcgatggccgaggccaggctgcagctggcgtccgaggcgctggatgccaagcgggggtcggtcgggcccatggaggttagcatcgaaggcgtggaggaggaggcccttgtgtctgctcaggaagagatcaaggattgccgggcagccttgttgcggtgtgaggaggagctggaacgcatccaggaacagaaaatgaacctgcagaaggaggttgataggctcaccgagctcgctgagaaggcccagttggatgcatccaaggccgaagaagatgtcaccaatataatggtgttggctgagcaggcggtggctcttgagatgaaagccacgcagcgtgtcaacgacgcggaggcggtgctgctgaaagcggagaaggtcatatcctcggttgacaccgtggtggagctaacatcacttgctgaagagcagaaaagcgctgaagaggatagcgtttctgaagggtatgagtatagcagcaatggcactgatgatgttcctgtgagggatgaggtgtcaagtatcgagcgtctaatggtaggtgacttgactgttgagggcattgagcagcttgaaccatcccgtgaaatatatgatgaagcaagcagcgataagatgtccgttgagcctcagaaagaagctgagcctgattcagacaagttgaagcaagggaagaagcaggaaatggaacgaaaggagttcaccaaggaaccactgagtgctcaaaaatcactgaagaagagatcatcccgcttcttcccggcatctttcttctcctccaaagctgatggagagtttacacctacatctgtctttcgggggttaatgaaatcagtgcaaaaacaggctcccaagcttgttgttgggatattgcttcttggtgcaggggccttcttcttaaatagagctgagaagagtcaactatttcagcagcaagaaattgccacaagtattggaaaggtaacctccacgacaaagcccatagttcgtgagatacggcaaattccacagagagtaaagaagctaatagagctcttacctcatcaagaggtaaatgaggaagaagcttcacttttcgacatactgtatttgcttcttgccagtgttatttttgtaccattatttcagaaaatccctggaggcagtcctgttcttggatatcttgctgctggtgtcctcattggtccatatgggctctccatcatccgtaatgtgcatgggacaaaggcaattgcggaattcggagtcgtgttcttactgtttaacattggacttgagctttctgtggaaaggctaagttcgatgaagaagtatgtcttcggcttgggatctgctcaggtgctagctactactgcagctgttggtgtgatagctcatcgttttgctgtgctaccaggaccagcagcaattgttgttgggagtggcttggctctgtcatccacggctgttgtcttgcaagtattgcaagagcgtggtgaaagtacgtcgcgtcatggacgtgccacattttctgtgttattgttccaggatttggctgtggtggtcctgttgatattaatacctctcatatcacctaattcttcaaaaggaggggttggtttccaagcaatagcagaagccatgggaatggctgcagtcaaagcagtagctgctataactgccataattgctggaggtcgtctgttgcttcggcctatttacaagcaaattgctgaaaatcagaatgctgagatattttcagcaaatacactccttgttatttttggcacaagtcttcttacagcccgggctgggttatcgatggcacttggagcttttttggctggtctgttactagcagaaacagagttctccttacaggttgagtcagatatagctccttatcgtggtcttctgttaggacttttctttatgacggttggaatgtctattgacccaaagctgcttctgtcaaacttcccaatgatctctatgatattgggtctcttgataattggaaagacattgttggttacatttgtgggcagggtatttggggtttctactatagctgccattcgtgttggtctcttgcttgcgcctggtggtgagtttgcttttgttgcctttggagaagctgtcaaccagggtcttctatcacctcaattatcatcgttactgtttttagtcgttggcatttcaatggctctgacaccatggttagctgctggagggcagtttctggcatcaaaatttgagcagcatgatgtgaggagtttattgcctgtggaaagtgagactgacgatttgcacgaccatattattatattaggctttggacgtgttgggcagatcgttgcgcaactcctgtcagagcggttaattccttttgttgcccttgatgttagaagtgatcgggttgcagttgggcgtgcacttgaccttccggtatattttggggatgctggaagcagagaggtactgcacaaagttggagctgaaagagcttgtgctgctgcaattactttggatacccctggtgcaaactatagagctgtctgggcattgaacaaatatttcccaaatgtgaagacatttgttagagcacatgatgttgatcatggtgttaatttggagaaagctggtgcaacagcggttgtccctgagaccttggagccaagtcttcagctagctgctgctgttcttgcacaagcaaaactcccaatgtcagagattcaggaaagcatcaacgagttccggaatcgtcatctgtcagagcttacagagttgtgtgctacgtcaggaaattctcttggctatgggttttccagagttatgtccaaatcgaagtctatcagctccgatgatgaaagcgaaacagtggatggcgcactagcaatttgaagacgattagataaaatgggatcccttgatagtactagatcgattgcactgttagtagataagcttgttgcatgtagaaaaatggaataaaaattaatgcaagagctgtcacaaaaatcggcgtgcaattttgtatgttagagtacttatatatttcttctctcccccaaaaaaattgtttgcatacaactcttcacaaagaaaaataatacactctagcagtgcacgtgaaaatgagacccttgtaagcagggaagaaaatagatgtcagaatgctgaatacttcccatgcttgctcaaaggagcatatggtacagtcaggccagttggacggttgggacctggctttgggtatgtttagtacaatttttgggtgtgtttgggacagttttttaaagagcttttctaaaaatctagaattttggataatctaactgtcacaagaatttagatatcgctagttgatctattcaaacgctgggttaagatcggattgtgggtcatatgacacggtctacgtttgacctgtgcatagggttaag

SEQ ID NO: 203803 - DNA, 3337 bp, Zea Mays
gcgcagttggcttttgcctcgtcccctccgccgccccgttgccgaaacaaaactcgctcttcggacaaaacgccaacgccagggcgagcgagcgaggtgaggtcacctaccagctcccacagtcgcactcccccctcgcgccgtcccgtcgtaggaatggaatgaggccgaggcccctcctcctcctcctcgtcgtcgtcgtcgtcgtcggtgcttctcccgtgacaggcctcccttcctccggtccggtcgccctctgacccaatccgcatacatccaccaaccagctttgatttgcgctgtttccgattgtactcgtgctccgcccgctacgatacaggacaggggaggatggatttgtccaggctcggctccggcgaggtctacgacgacgatgccaccagctcggggcccgacgacgacgacaatgacaagggccccgccgacgtggacggtctccgggagatgctgcagaggtgcaggaacgagctcgaggtggccaggctcaacagcaccatgttcgaggagaaggctcagcggatatccgagtcggccatcgcgctcaaggaccgcgccgaaggcgcccagagggacgtgtccgcggccgtcgccaccgtgcaggaggtcatcgtcaaggaggcggacgccaaggaggccgtccagaaggctaccatggcgctgtcgatggccgaggccaggctgcagctggcgtccgaggcgctggatgccaagcgggggtcggtcgggcccatggaggttagcatcgaaggcgtggaggaggaggcccttgtgtctgctcaggaagagatcaaggattgccgggcagccttgttgcggtgtgaggaggagctggaacgcatccaggaacagaaaatgaacctgcagaaggaggttgataggctcaccgagctcgctgagaaggcccagttggatgcatccaaggccgaagaagatgtcaccaatataatggtgttggctgagcaggcggtggctcttgagatgaaagccacgcagcgtgtcaacgacgcggaggcggtgctgctgaaagcggagaaggtcatatcctcggttgacaccgtggtggagctaacatcacttgctgaagagcagaaaagcgctgaagaggatagcgtttctgaagggtatgagtatagcagcaatggcactgatgatgttcctgtgagggatgaggtgtcaagtatcgagcgtctaatggtaggtgacttgactgttgagggcattgagcagcttgaaccatcccgtgaaatatatgatgaagcaagcagcgataagatgtccgttgagcctcagaaagaagctgagcctgattcagacaagttgaagcaagggaagaagcaggaaatggaacgaaaggagttcaccaaggaaccactgagtgctcaaaaatcactgaagaagagatcatcccgcttcttcccggcatctttcttctcctccaaagctgatggagagtttacacctacatctgtctttcgggggttaatgaaatcagtgcaaaaacaggctcccaagcttgttgttgggatattgcttcttggtgcaggggccttcttcttaaatagagctgagaagagtcaactatttcagcagcaagaaattgccacaagtattggaaaggtaacctccacgacaaagcccatagttcgtgagatacggcaaattccacagagagtaaagaagctaatagagctcttacctcatcaagaggtaaatgaggaagaagcttcacttttcgacatactgtatttgcttcttgccagtgttatttttgtaccattatttcagaaaatccctggaggcagtcctgttcttggatatcttgctgctggtgtcctcattggtccatatgggctctccatcatccgtaatgtgcatgggacaaaggcaattgcggaattcggagtcgtgttcttactgtttaacattggacttgagctttctgtggaaaggctaagttcgatgaagaagtatgtcttcggcttgggatctgctcaggtgctagctactactgcagctgttggtgtgatagctcatcgttttgctgtgctaccaggaccagcagcaattgttgttgggagtggcttggctctgtcatccacggctgttgtcttgcaagtattgcaagagcgtggtgaaagtacgtcgcgtcatggacgtgccacattttctgtgttattgttccaggatttggctgtggtggtcctgttgatattaatacctctcatatcacctaattcttcaaaaggaggggttggtttccaagcaatagcagaagccatgggaatggctgcagtcaaagcagtagctgctataactgccataattgctggaggtcgtctgttgcttcggcctatttacaagcaaattgctgaaaatcagaatgctgagatattttcagcaaatacactccttgttatttttggcacaagtcttcttacagcccgggctgggttatcgatggcacttggagcttttttggctggtctgttactagcagaaacagagttctccttacaggttgagtcagatatagctccttatcgtggtcttctgttaggacttttctttatgacggttggaatgtctattgacccaaagctgcttctgtcaaacttcccaatgatctctatgatattgggtctcttgataattggaaagacattgttggttacatttgtgggcagggtatttggggtttctactatagctgccattcgtgttggtctcttgcttgcgcctggtggtgagtttgcttttgttgcctttggagaagctgtcaaccagggtcttctatcacctcaattatcatcgttactgtttttagtcgttggcatttcaatggctctgacaccatggttagctgctggagggcagtttctggcatcaaaatttgagcagcatgatgtgaggagtttattgcctgtggaaagtgagactgacgatttgcacgaccatattattatattaggctttggacgtgttgggcagatcgttgcgcaactcctgtcagagcggttaattccttttgttgcccttgatgttagaagtgatcgggttgcagttgggcgtgcacttgaccttccggtatattttggggatgctggaagcagagaggtactgcacaaagttggagctgaaagagcttgtgctgctgcaattactttggatacccctggtgcaaactatagagctgtctgggcattgaacaaatatttcccaaatgtgaagacatttgttagagcacatgatgttgatcatggtgttaatttggagaaagctggtgcaacagcgtacttacaacatatcttctaatgga

SEQ ID NO: 203804 - DNA, 2627 bp, Zea Mays
gcctcgtcccctccgccgccccgttgccgaaacaaaactcgctcttcggacaaaacgccaacgccagggcgagcgagcgaggtgaggtcacctaccagctcccacagtcgcactcccccctcgcgccgtcccgtcgtaggaatggaatgaggccgaggcccttgtgtctgctcaggaagagatcaaggattgccgggcagccttgttgcggtgtgaggaggagctggaacgcatccaggaacagaaaatgaacctgcagaaggaggttgataggctcaccgagctcgctgagaaggcccagttggatgcatccaaggccgaagaagatgtcaccaatataatggtgttggctgagcaggcggtggctcttgagatgaaagccacgcagcgtgtcaacgacgcggaggcggtgctgctgaaagcggagaaggtcatatcctcggttgacaccgtggtggagctaacatcacttgctgaagagcagaaaagcgctgaagaggatagcgtttctgaagggtatgagtatagcagcaatggcactgatgatgttcctgtgagggatgaggtgtcaagtatcgagcgtctaatggtaggtgacttgactgttgagggcattgagcagcttgaaccatcccgtgaaatatatgatgaagcaagcagcgataagatgtccgttgagcctcagaaagaagctgagcctgattcagacaagttgaagcaagggaagaagcaggaaatggaacgaaaggagttcaccaaggaaccactgagtgctcaaaaatcactgaagaagagatcatcccgcttcttcccggcatctttcttctcctccaaagctgatggagagtttacacctacatctgtctttcgggggttaatgaaatcagtgcaaaaacaggctcccaagcttgttgttgggatattgcttcttggtgcaggggccttcttcttaaatagagctgagaagagtcaactatttcagcagcaagaaattgccacaagtattggaaaggtaacctccacgacaaagcccatagttcgtgagatacggcaaattccacagagagtaaagaagctaatagagctcttacctcatcaagaggtaaatgaggaagaagcttcacttttcgacatactgtatttgcttcttgccagtgttatttttgtaccattatttcagaaaatccctggaggcagtcctgttcttggatatcttgctgctggtgtcctcattggtccatatgggctctccatcatccgtaatgtgcatgggacaaaggcaattgcggaattcggagtcgtgttcttactgtttaacattggacttgagctttctgtggaaaggctaagttcgatgaagaagtatgtcttcggcttgggatctgctcaggtgctagctactactgcagctgttggtgtgatagctcatcgttttgctgtgctaccaggaccagcagcaattgttgttgggagtggcttggctctgtcatccacggctgttgtcttgcaagtattgcaagagcgtggtgaaagtacgtcgcgtcatggacgtgccacattttctgtgttattgttccaggatttggctgtggtggtcctgttgatattaatacctctcatatcacctaattcttcaaaaggaggggttggtttccaagcaatagcagaagccatgggaatggctgcagtcaaagcagtagctgctataactgccataattgctggaggtcgtctgttgcttcggcctatttacaagcaaattgctgaaaatcagaatgctgagatattttcagcaaatacactccttgttatttttggcacaagtcttcttacagcccgggctgggttatcgatggcacttggagcttttttggctggtctgttactagcagaaacagagttctccttacaggttgagtcagatatagctccttatcgtggtcttctgttaggacttttctttatgacggttggaatgtctattgacccaaagctgcttctgtcaaacttcccaatgatctctatgatattgggtctcttgataattggaaagacattgttggttacatttgtgggcagggtatttggggtttctactatagctgccattcgtgttggtctcttgcttgcgcctggtggtgagtttgcttttgttgcctttggagaagctgtcaaccagggtcttctatcacctcaattatcatcgttactgtttttagtcgttggcatttcaatggctctgacaccatggttagctgctggagggcagtttctggcatcaaaatttgagcagcatgatgtgaggagtttattgcctgtggaaagtgagactgacgatttgcacgaccatattattatattaggctttggacgtgttgggcagatcgttgcgcaactcctgtcagagcggttaattccttttgttgcccttgatgttagaagtgatcgggttgcagttgggcgtgcacttgaccttccggtatattttggggatgctggaagcagagagggtactgcacaaagttggagctgaaagagcttgtgctgctgcaattactttggatacccctggtgcaaactatagagctgtctgggcattgaacaaatatttcccaaatgtgaagaca

SEQ ID NO: 203805 - DNA, 3349 bp, Zea Mays
gccgaaacaaaactcgctcttcggacaaaacgccaacgccagggcgagcgagcgaggtgaggtcacctaccagctcccacagtcgcactcccccctcgcgccgtcccgtcgtaggaatggaatgaggccgaggcccctcctcctcctcctcgtcgtcgtcgtcgtcgtcggtgcttctcccgtgacaggcctcccttcctccggtccggtcgccctctgacccaatccgcatacatccaccaaccagacaggggaggatggatttgtccaggctcgcctccgtcgccgggcccagccgcgcggccccgcgggcgggcctgcagatcggcgccgccgggaatggcttccgcgtctgctccctgcggcaccgcggcgccgggaacgggcgcctcacgtccgccgccgccctcctccgcggcagcagcgggctcttctacctggctcccgcgcgcgggggccctccccgtctccgcgccagagggcggccgcggtgccagggcagcgactcgttggcctacgtcgacggccccttggaggccgccaagggctccggcgaggtctacgacgacgatgccaccagctcggggcccgacgacgacgacaatgacaagggccccgccgacgtggacggtctccgggagatgctgcagaggtgcaggaacgagctcgaggtggccaggctcaacagcaccatgttcgaggagaaggctcagcggatatccgagtcggccatcgcgctcaaggaccgcgccgaaggcgcccagagggacgtgtccgcggccgtcgccaccgtgcaggaggtcatcgtcaaggaggcggacgccaaggaggccgtccagaaggctaccatggcgctgtcgatggccgaggccaggctgcagctggcgtccgaggcgctggatgccaagcgggggtcggtcgggcccatggaggttagcatcgaaggcgtggaggaggaggcccttgtgtctgctcaggaagagatcaaggattgccgggcagccttgttgcggtgtgaggaggagctggaacgcatccaggaacagaaaatgaacctgcagaaggaggttgataggctcaccgagctcgctgagaaggcccagttggatgcatccaaggccgaagaagatgtcaccaatataatggtgttggctgagcaggcggtggctcttgagatgaaagccacgcagcgtgtcaacgacgcggaggcggtgctgctgaaagcggagaaggtcatatcctcggttgacaccgtggtggagctaacatcacttgctgaagagcagaaaagcgctgaagaggatagcgtttctgaagggtatgagtatagcagcaatggcactgatgatgttcctgtgagggatgaggtgtcaagtatcgagcgtctaatggtaggtgacttgactgttgagggcattgagcagcttgaaccatcccgtgaaatatatgatgaagcaagcagcgataagatgtccgttgagcctcagaaagaagctgagcctgattcagacaagttgaagcaagggaagaagcaggaaatggaacgaaaggagttcaccaaggaaccactgagtgctcaaaaatcactgaagaagagatcatcccgcttcttcccggcatctttcttctcctccaaagctgatggagagtttacacctacatctgtctttcgggggttaatgaaatcagtgcaaaaacaggctcccaagcttgttgttgggatattgcttcttggtgcaggggccttcttcttaaatagagctgagaagagtcaactatttcagcagcaagaaattgccacaagtattggaaaggtaacctccacgacaaagcccatagttcgtgagatacggcaaattccacagagagtaaagaagctaatagagctcttacctcatcaagaggtaaatgaggaagaagcttcacttttcgacatactgtatttgcttcttgccagtgttatttttgtaccattatttcagaaaatccctggaggcagtcctgttcttggatatcttgctgctggtgtcctcattggtccatatgggctctccatcatccgtaatgtgcatgggacaaaggcaattgcggaattcggagtcgtgttcttactgtttaacattggacttgagctttctgtggaaaggctaagttcgatgaagaagtatgtcttcggcttgggatctgctcaggtgctagctactactgcagctgttggtgtgatagctcatcgttttgctgtgctaccaggaccagcagcaattgttgttgggagtggcttggctctgtcatccacggctgttgtcttgcaagtattgcaagagcgtggtgaaagtacgtcgcgtcatggacgtgccacattttctgtgttattgttccaggatttggctgtggtggtcctgttgatattaatacctctcatatcacctaattcttcaaaaggaggggttggtttccaagcaatagcagaagccatgggaatggctgcagtcaaagcagtagctgctataactgccataattgctggaggtcgtctgttgcttcggcctatttacaagcaaattgctgaaaatcagaatgctgagatattttcagcaaatacactccttgttatttttggcacaagtcttcttacagcccgggctgggttatcgatggcacttggagcttttttggctggtctgttactagcagaaacagagttctccttacaggttggaatgtctattgacccaaagctgcttctgtcaaacttcccaatgatctctatgatattgggtctcttgataattggaaagacattgttggttacatttgtgggcagggtatttggggtttctactatagctgccattcgtgttggtctcttgcttgcgcctggtggtgagtttgcttttgttgcctttggagaagctgtcaaccagggtcttctatcacctcaattatcatcgttactgtttttagtcgttggcatttcaatggctctgacaccatggttagctgctggagggcagtttctggcatcaaaatttgagcagcatgatgtgaggagtttattgcctgtggaaagtgagactgacgatttgcacgaccatattattatattaggctttggacgtgttgggcagagcggttaattccttttgttgcccttgatgttagaagtgatcgggttgcagttgggcgtgcacttgaccttccggtatattttggggatgctggaagcagagaggtactgcacaaagttggagctgaaagagcttgtgctgctgcaattactttggatacccctggtgcaaactatagagctgtctgggcattgaacaaatatttcccaaatgtgaagaca

SEQ ID NO: 203806 - DNA, 2662 bp, Zea Mays
caacgccagggcgagcgagcgaggtgaggtcacctaccagctcccacagtcgcactcccccctcgcgccgtcccgtcgtaggaatggaatgaggccgaggcccctcctcctcctcctcgtcgtcgtcgtcgtcgtcggtgcttctcccgtgacaggcctcccttcctccggtccggtcgccctctgacccaatccgcatacatccaccaaccagacaggggaggatggatttgtccaggctcgcctccgtcgccgggcccagccgcgcggccccgcgggcgggcctgcagatcggcgccgccgggaatggcttccgcgtctgctccctgcggcaccgcggcgccgggaacgggcgcctcacgtccgccgccgccctcctccgcggcagcagcgggctcttctacctggctcccgcgcgcgggggccctccccgtctccgcgccagagggcggccgcggtgccagggcagcgactcgttggcctacgtcgacggccccttggaggccgccaagggctccggcgaggtctacgacgacgatgccaccagctcggggcccgacgacgacgacaatgacaagggccccgccgacgtggacggtctccgggagatgctgcagaggtgcaggaacgagctcgaggtggccaggctcaacagcaccatgttcgaggagaaggctcagcggatatccgagtcggccatcgcgctcaaggaccgcgccgaaggcgcccagagggacgtgtccgcggccgtcgccaccgtgcaggaggtcatcgtcaaggaggcggacgccaaggaggccgtccagaaggctaccatggcgctgtcgatggccgaggccaggctgcagctggcgtccgaggcgctggatgccaagcgggggtcggtcgggcccatggaggttagcatcgaaggcgtggaggaggaggcccttgtgtctgctcaggaagagatcaaggattgccgggcagccttgttgcggtgtgaggaggagctggaacgcatccaggaacagaaaatgaacctgcagaaggaggttgataggctcaccgagctcgctgagaaggcccagttggatgcatccaaggccgaagaagatgtcaccaatataatggtgttggctgagcaggcggtggctcttgagatgaaagccacgcagcgtgtcaacgacgcggaggcggtgctgctgaaagcggagaaggtcatatcctcggttgacaccgtggtggagctaacatcacttgctgaagagcagaaaagcgctgaagaggatagcgtttctgaagggtatgagtatagcagcaatggcactgatgatgttcctgtgagggatgaggtgtcaagtatcgagcgtctaatggtaggtgacttgactgttgagggcattgagcagcttgaaccatcccgtgaaatatatgatgaagcaagcagcgataagatgtccgttgagcctcagaaagaagctgagcctgattcagacaagttgaagcaagggaagaagcaggaaatggaacgaaaggagttcaccaaggaaccactgagtgctcaaaaatcactgaagaagagatcatcccgcttcttcccggcatctttcttctcctccaaagctgatggagagtttacacctacatctgtctttcgggggttaatgaaatcagtgcaaaaacaggctcccaagcttgttgttgggatattgcttcttggtgcaggggccttcttcttaaatagagctgagaagagtcaactatttcagcagcaagaaattgccacaagtattggaaaggtaacctccacgacaaagcccatagttcgtgagatacggcaaattccacagagagtaaagaagctaatagagctcttacctcatcaagaggcagtcctgttcttggatatcttgctgctggtgtcctcattggtccatatgggctctccatcatccgtaatgtgcatgggacaaaggcaattgcggaattcggagtcgtgttcttactgtttaacattggacttgagctttctgtggaaaggctaagttcgatgaagaagtatgtcttcggcttgggatctgctcaggtgctagctactactgcagctgttggtgtgatagctcatcgttttgctgtgctaccaggaccagcagcaattgttgttgggagtggcttggctctgtcatccacggctgttgtcttgcaagtattgcaagagcgtggtgaaagtacgtcgcgtcatggacgtgccacattttctgtgttattgttccaggatttggctgtggtggtcctgttgatattaatacctctcatatcacctaattcttcaaaaggaggggttggtttccaagcaatagcagaagccatgggaatggctgcagtcaaagcagtagctgctataactgccataattgctggaggtcgtctgttgcttcggcctatttacaagcaaattgctgaaaatcagaatgctgagatattttcagcaaatacactccttgttatttttggcacaagtcttcttacagcccgggctgggttatcgatggcacttggagcttttttggctggtctgttactagcagaaacagagttctccttacaggttgagtcagatatagctccttatcgtggtcttctgttaggacttttctttatgacgatggaaccattttaa

SEQ ID NO: 203807 - DNA, 2241 bp, Zea Mays
cacaaacagactctgctcatcaggtattttcgggtctacggtcggtcaatcggagtgtacacagcaagcgccggcccgcgggcgctctcccgaatcccgacacccggagttggagttggaggagcccggagaggcggcggagcgcagccaaaaaaaaaaaaaaaaaaccctgagtcccgcaaaacccctaaaccctagcccctcacctctcgcctccgccctcatccgcgcgacttgcagcggttggaggcgaagccggctccatgacgaccctcctcaggcgcgcgtcgctgcggcgcgtcattgccgccgccgccgcctcttcttttcaccctgagagctataagcaagggatctgtggctccacatttcattgccgagagttcgcatcaaaagcaaaaaagaagtcaagtggaacagactctggggaggagaacatgtcaaagaaagacttggctttacaccaggctattgatcagataacgtctgcatttgggaagggggcaataatgtggcttgggcgttcacaaggccatagagatgtaccagtcgtgtctactgggtctttggatttggatatggctctaggaactggtggtcttccaaaggggcgtgttgtagaggtatatggtccagaggcttcaggcaagacaacgcttgctctacatgtcattgcagaagcacaaaagaatggaggttactgtgcctttgtagatgcagagcacgctttggatccagctctcgccgagtcaattggtgttgacactaacaatttactcctttctcagcccgattgtgctgagcaggcactcagtcttgtggacacactgattcgaagtggatctgttgatgttgttgtagtagacagtgtaagacctaggtctatctagctgcttcaccgatcttttttttctcatcttaagcggggttgctttctatttgtgcaatattgcagttccttacgagttttgaagaacattttccaactggcagttcgatcttaataacttcaaagactccctttgttactgaagttagttgcacagttcatattatcttattctactatgcaggttgctgcgcttgttccaaagactgagcttgatggtgagatgggtgatgcacatattgctcttcaggctaggttgatgagtcaagcccttcgcaagcttagccactccctttcactttcacaaacaattttgttatttattaatcagatcagggccaaggtagccacatttggatttggaggaccaactgaggttacttctggtggcaacgccttgaagttttatgcatctgttcgcttgaacatcaggcgtattggtttggtaaagaaaggcgaagagacaataggtagtcagattgctgtgaagattgtaaaaaacaagcatgccccacccttcaagactgcacagtttgagcttgaatttggaaaggggatatgccgcagttctgagctttttgaacttggattgaagcacaagcttatccgaaagagtggtggttcgtattatagtttcaatggtaaggctttcaatggtaaaagtaaccttaaatcttaccttactgaaaacaagagtgttgccaatgatctggagatggaactaaagagattgatgggaactgatgcgtctaaagagcaggaggcaggagacagttcgcagagtgattttcctgaagagagtgtcacacctgaagcatcgtcagaagaggatctgggagccataattgaaggttagccagtgatctgatgtgctggcaagtgggaacagaatttctggagcagttgttcctgtaaaacaatatcttgggtcctgaagtcaccaccgtttggatcgacatgcctgtggtgttctggtgatctcatcatagcagacttcagtctttactgtgcttatacagtagtgcagcaggaagagaattcacattgtgtgaaatcatggtgatatctgagaggtggaagttgtagtaagccgggaagggtgaggtattgtggtccgtggcatttaaacttcagtaagcaaacgccgtgtatatatgatgtgcacattttgaaaccgggcattctttattgactgctgctagatttacattgagctccctccacttccaatacctaccttttttttgcgtggagctagttttttggatggtgcttctgcggaagcctgttgctggaagatccaatgtcgtagagctggggcatttctgaccttggctgatctatgttcgccg

SEQ ID NO: 203808 - DNA, 1577 bp, Zea Mays
gagtgacactccatttaactgtctcctcaaatatttgagaatttttggtgatagatattttagtccaaaatctctcacctcttaaaatagatctacggagacgaaaataaaaaaaaactgaaattaattaatagaggtagccttgttcattccacggcatgtcgatgatggcaagggttctgctgctgtcggtccagtaaaatacagtaacaacaagaaggatgctagggcaccctgtgaaaacaaaaatagattggtccgtcgcgccatcaagctacatgaaagaaggaatgcgtacaagtgttgaagcaatcctattggtgcaagagcacaaccatcctcacatactgctcctgcaaatcggtaatacattctgcaaacttcctggtggacggttgaagcctggagaaaatgaaatcgagggtttgaaaagaaagttatgcagcaaacttgctgtgaactcgccttcctttccacctaactggcaggttggagagtgcgttgctgtgtggtggaggccgaactttgagactgtgatgtatccttactgtcctccacatatcactaagcccaaggagtgcaagaaacttttcattgttcacctatccgaaagagagtattttgctgttccaaggaatctgaaactgcttgctgttccactgtttgaactctacgacaatgttcaggaatttgtcaagatttgtttctgaaacttgtttcctgtacattgatgtgcagaggtacgggcctgtcatctctaccatcccgcagcagctttctaggttccagttcaacatggttagctcttagggtgatgatacaagaaaaccaatgtggccaaggcagctcttcggttgctgagctagctgatcaacgtaccctgactgattttatttcattgtgctggatttttttatatagactactactatctagacatgcatttctgattgtattgttgttgaattatcctgttatgtcgcatcccatgggcagatccagtctaggatatgtacacctgataacttagttaaaaaaaagaaaagaaaaccgaaggtagtgtgtgtatagatcgtactgtagtatgcatgtaaccggatcagatccgttttcaggtagattgctctaggttgggttatttattgcattaattgcacaagctagatgccatgtgtactattgtcgaaaaggggttgcaggtcaaccttgcgtagatgttaaatgcagtctcaaatattttatccgaaggtgtgttctagtactggcatgccattgattacgtcatccaagcatatgttgttgcatcttatatgtgaatagccacatggtctgaacttaaagtttctagaggaacaagttcttcagatgatgctgcatcttacccgttggagttcttaactgttccagttgcatttgagctcgttattttcatcatcctcttcccatattgccatgtttccccttgagaatgaagtgcgctccgcattttccaagtactccacaagagagctaaagaacattctcaacaaagcatttttacccaaaaaacaaacaaacaaaccagattttggctacaa

SEQ ID NO: 203809 - DNA, 2625 bp, Zea Mays
ggaaatgttgcattattagaagaagaaatgttatatttgggtagaggttgatatagcactttctgcacatgcaaatgcaagacggtggtatgaaatgaagaagaaacaggaaagtaaacaagagaagactatcacagctcatgataaggcgtttaaagcagctgagaagaagacacgccttcagcttgctcaggaaaaaacagtagccgcaatcactcatatgcgcaaagttcactggtttgagaaattcaattggttcatcagcagtgaaaactacttgataatcagtggccgagatgctcaacaaaacgagttgattgtgaagcgctatatgtccaaaggagatctgtatgtgcatgccgagttgcatggagcttccagtactataatcaagaatcacaaacctgacactcctattccaccattaacattaaaccaagcaggatgcttcactgtttgccacagcaaagcatgggattcaaaaattgttacaagtgcttggtgggtgtatccacatcaagttagcaagacagctcctactggcgagtaccttactgttggtagttttatgatccgtggcaagaaaaattttcttccacctcacccccttgttatgggctttggtatactcttccgtttggacgagagctccctagcatctcatttgaatgaaaggagggttaggggtgaagatgaggccctccatgaaatggaagcagagtctcgcaagaagcaaagtaaccctgaatctgatgaagatattggtagtgaaggtgcaaataaggaaactcatgaagatgaatcaaacgggcaaactacaaacattcaacaaaacaatgatcttgagcttcctgatctgtctagcaacattggtactgccaactcatctgaactccttcctgaaatccaagctgaggaaaccttggacaatggaagttccattcttaaggaagaaacaatcgaagcttctgtttcatctcaacttgatgatctgctagataagactctttgccttggccctgcaaaggtgtcaggtaaaagctctctgcttaccagcatcccttcaagtttagcagaagatgatgatgatcttgaagtgaaaaggccaactataagagacaaaccatacatatcgaaagcagagagaagaaaattgaagaagggccaagttaatgatgaaactgctactgattctcaaaatggtgaagctgtagaaacaccaggtacatcaaagcaagaaaagggaaaggcagagacaaaggctactgattctaaagcaagtcagccagatacttcacagcaagaaaaaggaaaggcaaacacaaaggctactggttctaaattaagccagccaggtaattcacaacaagaaaaaggcaagggaagcactcacgctggtaacgctaaagtaagccgtggacagaaagggaagcttaagaagattaaagagaaatatgcagagcaggatgaagaagaaagagagatccgtatggcattgctcgcgtcatctgggaaagcattgcggaaggataaaccttcacaagatgtagaagaaacctctgttaaagaatcaaaaccatcagctggtgaagatgattcgtcaaaaatatgttataaatgcaaaaaggctggacatctttctcgcgattgcccagaaagcacatctgaggtggaccgaaatgatggcagtattagtagaagcagagacgatacgggtaccaatactgctcctgctggtggcaacagtcctatggacgaagacgatgttcaagaaattggtgatgaagagaaagaaaagttgattgacttggactacttaactggaaacccactaccaaatgatattttgctatatgctgtacctgtgtgtgccccttacaacgcattgcagacatacaaatatcgtgtaaagattaccccaggcactgcaaagaaagggaaagctgcaaaaaccgcgatgagcttgttcctgcacacacctgatgctaccaaccgtgagaaggagctcatgaaggcatgcacagaccctgagctggtggctgcaatcgtcgggaatgccaagatcacagcgcctggcctcactcaactgaagcagaaacagaagcagaaggggaagaagtctgcaaaacagaactagtgtgaaactggtgggtccaaagaactgatccatccccgattcgcaggaagtgaagctttgcctttgcagaaagtctgtggatgttgtggtttgtcagttgtcgctcgaggcgcatttgggggtatatgcagcctgtcagggagtacacccctttggcgtcacactggtgaggccagagcgacaggcacgcagtaggggacccaagctgcacgtctatgatgcaattgcgatatacagctcataataaaagaagtattgatttcatatgcaactgattggttctttattttatttgtgataccctgaaatgaattccgcacatacatttcatgtgcaattcccactaggcatgaatgagtcgtcgattgtgactcgatggtacatgcagaagcatgtcagaacacaagaaaattatataggttcgggttgcctgaatgagtagtaccatacattttatttggtgctaagtattgagtttgctggtggtg

SEQ ID NO: 203810 - DNA, 3137 bp, Zea Mays
gttcaaaacagcttctctgcatttgtgggggaaggcttgcctcgttttatcagtggaagtctccgacactggatatatgatgaatattgccctgttctgttgaatcaattcaagtcaagggaatataatgaatttgcgacatttgatgctgcattagacgagttctacagcaaaatagaaagtcaaaaggtgaatcaacagcagaaagcaaaagaggaatctgcagctcagaggctgaacaaaataaaattggatcaggagaatcgtgtgcatacattgaggaaggaagtggaccattgtgtcaaaatggcagaattaattgaatacaatttagaggatgtagatgcagcaattttggctgtgcgtgtttctcttgcaaatgaaatgagttgggaagctcttactcgcatgattaaagaggaaagaaaggctggaaacccagtagcaggacttatcgacaaactaaattttgaaagaaattgtatcactctactcttgagcaataatcttgatgacatggatgaggatgaaaaaactgcacctgtggagaaggtagaggttgatatagcactttctgcacatgcaaatgcaagacggtggtatgaaatgaagaagaaacaggaaagtaaacaagagaagactatcacagctcatgataaggcgtttaaagcagctgagaagaagacacgccttcagcttgctcaggaaaaaacagtagccgcaatcactcatatgcgcaaagttcactggtttgagaaattcaattggttcatcagcagtgaaaactacttgataatcagtggccgagatgctcaacaaaacgagttgattgtgaagcgctatatgtccaaaggagatctgtatgtgcatgccgagttgcatggagcttccagtactataatcaagaatcacaaacctgacactcctattccaccattaacattaaaccaagcaggatgcttcactgtttgccacagcaaagcatgggattcaaaaattgttacaagtgcttggtgggtgtatccacatcaagttagcaagacagctcctactggcgagtaccttactgttggtagttttatgatccgtggcaagaaaaattttcttccacctcacccccttgttatgggctttggtatactcttccgtttggacgagagctccctagcatctcatttgaatgaaaggagggttaggggtgaagatgaggccctccatgaaatggaagcagagtctcgcaagaagcaaagtaaccctgaatctgatgaagatattggtagtgaaggtgcaaataaggaaactcatgaagatgaatcaaacgggcaaactacaaacattcaacaaaacaatgatcttgagcttcctgatctgtctagcaacattggtactgccaactcatctgaactccttcctgaaatccaagctgaggaaaccttggacaatggaagttccattcttaaggaagaaacaatcgaagcttctgtttcatctcaacttgatgatctgctagataagactctttgccttggccctgcaaaggtgtcaggtaaaagctctctgcttaccagcatcccttcaagtttagcagaagatgatgatgatcttgaagtgaaaaggccaactataagagacaaaccatacatatcgaaagcagagagaagaaaattgaagaagggccaagttaatgatgaaactgctactgattctcaaaatggtgaagctgtagaaacaccaggtacatcaaagcaagaaaagggaaaggcagagacaaaggctactgattctaaagcaagtcagccagatacttcacagcaagaaaaaggaaaggcaaacacaaaggctactggttctaaattaagccagccaggtaattcacaacaagaaaaaggcaagggaagcactcacgctggtaacgctaaagtaagccgtggacagaaagggaagcttaagaagattaaagagaaatatgcagagcaggatgaagaagaaagagagatccgtatggcattgctcgcgtcatctgggaaagcattgcggaaggataaaccttcacaagatgtagaagaaacctctgttaaagaatcaaaaccatcagctggtgaagatgattcgtcaaaaatatgttataaatgcaaaaaggctggacatctttctcgcgattgcccagaaagcacatctgaggtggaccgaaatgatggcagtattagtagaagcagagacgatacgggtaccaatactgctcctgctggtggcaacagtcctatggacgaagacgatgttcaagaaattggtgatgaagagaaagaaaagttgattgacttggactacttaactggaaacccactaccaaatgatattttgctatatgctgtacctgtgtgtgccccttacaacgcattgcagacatacaaatatcgtgtaaagattaccccaggcactgcaaagaaagggaaagctgcaaaaaccgcgatgagcttgttcctgcacacacctgatgctaccaaccgtgagaaggagctcatgaaggcatgcacagaccctgagctggtggctgcaatcgtcgggaatgccaagatcacagcgcctggcctcactcaactgaagcagaaacagaagcagaaggggaagaagtctgcaaaacagaactagtgtgaaactggtgggtccaaagaactgatccatccccgattcgcaggaagtgaagctttgcctttgcagaaagtctgtggatgttgtggtttgtcagttgtcgctcgaggcgcatttgggggtatatgcagcctgtcagggagtacacccctttggcgtcacactggtgaggccagagcgacaggcacgcagtaggggacccaagctgcacgtctatgatgcaattgcgatatacagctcataataaaagaagtattgatttcatatgcaactgattggttctttattttatttgtgataccctgaaatgaattccgcacatacatttcatgtgcaattcccactaggcatgaatgagtcgtcgattgtgactcgatggtacatgcagaagcatgtcagaacacaagaaaattatataggttcgggttgcctgaatgagtagtaccatacattttatttggtgctaagtattgagtttgctggtggtg

SEQ ID NO: 203811 - DNA, 4244 bp, Zea Mays
ggcggcgtccttcaccgctccaggtccaggtgggcggccgcgaccagagtcgtgcccgagcccgactcgagccgacgaggagagagctcaggaggcggcggagagaagggagaaaatccccggtagggaggggggaaggaagccaaaggcccaaaggtctcggcgctgccgtagtaccggctgaggcaagatggtgaaggcacgaatgacgacgacggacgtggcggcggaggtgaagtgcctccgccgcctcatcggcatgcgcctagccaacgtctacgacatcacccccaaggggaaagcgagaaggtcttgttgctcatggagagtggtgtcaggttccacaccacccaatacgttcgtgacaagagtaccaccccttcaggtttcactctgaaactacgaaagcacattcgtaacaagagacttgaagatgtccgtatgctcggatatgacaggattatccttttccaatttgggcttggtagtaatgcacatttcataattttagagctatatgcacaaggaaacattcttctcacggattcagaatacacagtattgacactactccgttctcacagagatgacaacaaaggattggccatcatgtcacgtcatcgctatccagtagaagcttgccgtgtttttggcaggactgactttgcaaagttaaaggacatgttgacaaagcctgataaggctgatgataaagaggaaattacgtctggatcaaccgatgctcaggaaacttctcaatccaccaatgatgaagtgttggtaactgaaatatctgaaaaatcactgagtaaaaaagaaaagaaggctgctgcaaaagctaagcagtttggttcaaatgcaaaagtaaacaatggtgctcaatccaataaagctactctgaagacaattcttggtgaggcactggcttatggccctgcactagcagagcatatcatattggatgctggtttggttccaagtacaaaggttgggaaagacccagagagcactatcaatgacagcactgttcagtctctaatggaatctattacaaggtttgaggactggcttgtagatattatatccggccaaaggattcctgagggttatattctcatgcaaaataagatgaccgcaaagaacatcacacccttggaagaggcttcgattaatcataagatatatgatgaatattgccctgttctgttgaatcaattcaagtcaagggaatataatgaatttgcgacatttgatgctgcattagacgagttctacagcaaaatagaaagtcaaaaggtgaatcaacagcagaaagcaaaagaggaatctgcagctcagaggctgaacaaaataaaattggatcaggagaatcgtgtgcatacattgaggaaggaagtggaccattgtgtcaaaatggcagaattaattgaatacaatttagaggatgtagatgcagcaattttggctgtgcgtgtttctcttgcaaatgaaatgagttgggaagctcttactcgcatgattaaagaggaaagaaaggctggaaacccagtagcaggacttatcgacaaactaaattttgaaagaaattgtatcactctactcttgagcaataatcttgatgacatggatgaggatgaaaaaactgcacctgtggagaaggtagaggttgatatagcactttctgcacatgcaaatgcaagacggtggtatgaaatgaagaagaaacaggaaagtaaacaagagaagactatcacagctcatgataaggcgtttaaagcagctgagaagaagacacgccttcagcttgctcaggaaaaaacagtagccgcaatcactcatatgcgcaaagttcactggtttgagaaattcaattggttcatcagcagtgaaaactacttgataatcagtggccgagatgctcaacaaaacgagttgattgtgaagcgctatatgtccaaaggagatctgtatgtgcatgccgagttgcatggagcttccagtactataatcaagaatcacaaacctgacactcctattccaccattaacattaaaccaagcaggatgcttcactgtttgccacagcaaagcatgggattcaaaaattgttacaagtgcttggtgggtgtatccacatcaagttagcaagacagctcctactggcgagtaccttactgttggtagttttatgatccgtggcaagaaaaattttcttccacctcacccccttgttatgggctttggtatactcttccgtttggacgagagctccctagcatctcatttgaatgaaaggagggttaggggtgaagatgaggccctccatgaaatggaagcagagtctcgcaagaagcaaagtaaccctgaatctgatgaagatattggtagtgaaggtgcaaataaggaaactcatgaagatgaatcaaacgggcaaactacaaacattcaacaaaacaatgatcttgagcttcctgatctgtctagcaacattggtactgccaactcatctgaactccttcctgaaatccaagctgaggaaaccttggacaatggaagttccattcttaaggaagaaacaatcgaagcttctgtttcatctcaacttgatgatctgctagataagactctttgccttggccctgcaaaggtgtcaggtaaaagctctctgcttaccagcatcccttcaagtttagcagaagatgatgatgatcttgaagtgaaaaggccaactataagagacaaaccatacatatcgaaagcagagagaagaaaattgaagaagggccaagttaatgatgaaactgctactgattctcaaaatggtgaagctgtagaaacaccaggtacatcaaagcaagaaaagggaaaggcagagacaaaggctactgattctaaagcaagtcagccagatacttcacagcaagaaaaaggaaaggcaaacacaaaggctactggttctaaattaagccagccaggtaattcacaacaagaaaaaggcaagggaagcactcacgctggtaacgctaaagtaagccgtggacagaaagggaagcttaagaagattaaagagaaatatgcagagcaggatgaagaagaaagagagatccgtatggcattgctcgcgtcatctgggaaagcattgcggaaggataaaccttcacaagatgtagaagaaacctctgttaaagaatcaaaaccatcagctggtgaagatgattcgtcaaaaatatgttataaatgcaaaaaggctggacatctttctcgcgattgcccagaaagcacatctgaggtggaccgaaatgatggcagtattagtagaagcagagacgatacgggtaccaatactgctcctgctggtggcaacagtcctatggacgaagacgatgttcaagaaattggtgatgaagagaaagaaaagttgattgacttggactacttaactggaaacccactaccaaatgatattttgctatatgctgtacctgtgtgtgccccttacaacgcattgcagacatacaaatatcgtgtaaagattaccccaggcactgcaaagaaagggaaagctgcaaaaaccgcgatgagcttgttcctgcacacacctgatgctaccaaccgtgagaaggagctcatgaaggcatgcacagaccctgagctggtggctgcaatcgtcgggaatgccaagatcacagcgcctggcctcactcaactgaagcagaaacagaagcagaaggggaagaagtctgcaaaacagaactagtgtgaaactggtgggtccaaagaactgatccatccccgattcgcaggaagtgaagctttgcctttgcagaaagtctgtggatgttgtggtttgtcagttgtcgctcgaggcgcatttgggggtatatgcagcctgtcagggagtacacccctttggcgtcacactggtgaggccagagcgacaggcacgcagtaggggacccaagctgcacgtctatgatgcaattgcgatatacagctcataataaaagaagtattgatttcatatgcaactgattggttctttattttatttgtgataccctgaaatgaattccgcacatacatttcatgtgcaattcccactaggcatgaatgagtcgtcgattgtgactcgatggtacatgcagaagcatgtcagaacacaagaaaattatataggttcgggttgcctgaatgagtagtaccatacattttatttggtgctaagtattgagtttgctggtggtg

SEQ ID NO: 203812 - DNA, 4386 bp, Zea Mays
ggatacgcgacctgcggcccacctcagtaacaaaacgggccgaagataatgatccacggaccacggaccggcccatctcgtcctagcggcggcggcggcggcgtccttcaccgctccaggtccaggtgggcggccgcgaccagagtcgtgcccgagcccgactcgagccgacgaggagagagctcaggaggcggcggagagaagggagaaaatccccggtagggaggggggaaggaagccaaaggcccaaaggtctcggcgctgccgtagtaccggctgaggcaagatggtgaaggcacgaatgacgacgacggacgtggcggcggaggtgaagtgcctccgccgcctcatcggcatgcgcctagccaacgtctacgacatcacccccaagacataccttttcaagctgatgaacagcagtgggattactgaatcaggggaaagcgagaaggtcttgttgctcatggagagtggtgtcaggttccacaccacccaatacgttcgtgacaagagtaccaccccttcaggtttcactctgaaactacgaaagcacattcgtaacaagagacttgaagatgtccgtatgctcggatatgacaggattatccttttccaatttgggcttggtagtaatgcacatttcataattttagagctatatgcacaaggaaacattcttctcacggattcagaatacacagtattgacactactccgttctcacagagatgacaacaaaggattggccatcatgtcacgtcatcgctatccagtagaagcttgccgtgtttttggcaggactgactttgcaaagttaaaggacatgttgacaaagcctgataaggctgatgataaagaggaaattacgtctggatcaaccgatgctcaggaaacttctcaatccaccaatgatgaagtgttggtaactgaaatatctgaaaaatcactgagtaaaaaagaaaagaaggctgctgcaaaagctaagcagtttggttcaaatgcaaaagtaaacaatggtgctcaatccaataaagctactctgaagacaattcttggtgaggcactggcttatggccctgcactagcagagcatatcatattggatgctggtttggttccaagtacaaaggttgggaaagacccagagagcactatcaatgacagcactgttcagtctctaatggaatctattacaaggtttgaggactggcttgtagatattatatccggccaaaggattcctgagggttatattctcatgcaaaataagatgaccgcaaagaacatcacacccttggaagaggcttcgattaatcataagatatatgatgaatattgccctgttctgttgaatcaattcaagtcaagggaatataatgaatttgcgacatttgatgctgcattagacgagttctacagcaaaatagaaagtcaaaaggtgaatcaacagcagaaagcaaaagaggaatctgcagctcagaggctgaacaaaataaaattggatcaggagaatcgtgtgcatacattgaggaaggaagtggaccattgtgtcaaaatggcagaattaattgaatacaatttagaggatgtagatgcagcaattttggctgtgcgtgtttctcttgcaaatgaaatgagttgggaagctcttactcgcatgattaaagaggaaagaaaggctggaaacccagtagcaggacttatcgacaaactaaattttgaaagaaattgtatcactctactcttgagcaataatcttgatgacatggatgaggatgaaaaaactgcacctgtggagaaggtagaggttgatatagcactttctgcacatgcaaatgcaagacggtggtatgaaatgaagaagaaacaggaaagtaaacaagagaagactatcacagctcatgataaggcgtttaaagcagctgagaagaagacacgccttcagcttgctcaggaaaaaacagtagccgcaatcactcatatgcgcaaagttcactggtttgagaaattcaattggttcatcagcagtgaaaactacttgataatcagtggccgagatgctcaacaaaacgagttgattgtgaagcgctatatgtccaaaggagatctgtatgtgcatgccgagttgcatggagcttccagtactataatcaagaatcacaaacctgacactcctattccaccattaacattaaaccaagcaggatgcttcactgtttgccacagcaaagcatgggattcaaaaattgttacaagtgcttggtgggtgtatccacatcaagttagcaagacagctcctactggcgagtaccttactgttggtagttttatgatccgtggcaagaaaaattttcttccacctcacccccttgttatgggctttggtatactcttccgtttggacgagagctccctagcatctcatttgaatgaaaggagggttaggggtgaagatgaggccctccatgaaatggaagcagagtctcgcaagaagcaaagtaaccctgaatctgatgaagatattggtagtgaaggtgcaaataaggaaactcatgaagatgaatcaaacgggcaaactacaaacattcaacaaaacaatgatcttgagcttcctgatctgtctagcaacattggtactgccaactcatctgaactccttcctgaaatccaagctgaggaaaccttggacaatggaagttccattcttaaggaagaaacaatcgaagcttctgtttcatctcaacttgatgatctgctagataagactctttgccttggccctgcaaaggtgtcaggtaaaagctctctgcttaccagcatcccttcaagtttagcagaagatgatgatgatcttgaagtgaaaaggccaactataagagacaaaccatacatatcgaaagcagagagaagaaaattgaagaagggccaagttaatgatgaaactgctactgattctcaaaatggtgaagctgtagaaacaccaggtacatcaaagcaagaaaagggaaaggcagagacaaaggctactgattctaaagcaagtcagccagatacttcacagcaagaaaaaggaaaggcaaacacaaaggctactggttctaaattaagccagccaggtaattcacaacaagaaaaaggcaagggaagcactcacgctggtaacgctaaagtaagccgtggacagaaagggaagcttaagaagattaaagagaaatatgcagagcaggatgaagaagaaagagagatccgtatggcattgctcgcgtcatctgggaaagcattgcggaaggataaaccttcacaagatgtagaagaaacctctgttaaagaatcaaaaccatcagctggtgaagatgattcgtcaaaaatatgttataaatgcaaaaaggctggacatctttctcgcgattgcccagaaagcacatctgaggtggaccgaaatgatggcagtattagtagaagcagagacgatacgggtaccaatactgctcctgctggtggcaacagtcctatggacgaagacgatgttcaagaaattggtgatgaagagaaagaaaagttgattgacttggactacttaactggaaacccactaccaaatgatattttgctatatgctgtacctgtgtgtgccccttacaacgcattgcagacatacaaatatcgtgtaaagattaccccaggcactgcaaagaaagggaaagctgcaaaaaccgcgatgagcttgttcctgcacacacctgatgctaccaaccgtgagaaggagctcatgaaggcatgcacagaccctgagctggtggctgcaatcgtcgggaatgccaagatcacagcgcctggcctcactcaactgaagcagaaacagaagcagaaggggaagaagtctgcaaaacagaactagtgtgaaactggtgggtccaaagaactgatccatccccgattcgcaggaagtgaagctttgcctttgcagaaagtctgtggatgttgtggtttgtcagttgtcgctcgaggcgcatttgggggtatatgcagcctgtcagggagtacacccctttggcgtcacactggtgaggccagagcgacaggcacgcagtaggggacccaagctgcacgtctatgatgcaattgcgatatacagctcataataaaagaagtattgatttcatatgcaactgattggttctttattttatttgtgataccctgaaatgaattccgcacatacatttcatgtgcaattcccactaggcatgaatgagtcgtcgattgtgactcgatggtacatgcagaagcatgtcagaacacaagaaaattatataggttcgggttgcctgaatgagtagtaccatacattttatttggtgctaagtattgagtttgctggtggtg

SEQ ID NO: 203813 - DNA, 2428 bp, Zea Mays
acaggtctcgctagggttcttcggtcctccacccacctttgcccgcgaaatgtttcccgccatttcgtgtccgcatttcccgctacccgcctcgctctgctccccagatccctcgccccctcttccctctccgctcccccacgtcatctagtcgccgcccccgctcaccgattgtcctccgctgtggagcgagcaagcagcggcgaagcgatggaggaggagatccgaaaggagttccagagtaacggcttctccatcggaggagccggccccgaggacgccgcccagatcctctccacgctgctgacctactgcatcaactacaagatgagccccgcggatctcgtctcaaactgggaggtctactacctcaataggcaattggatggcttaaagctcgaaagctcgtatcttgatggttttctgtcacaccttcaaaatgaagttaaagacaggataataaaagaagaagccaaccttcacatttactccagtaacgatgttgacatgctcttaagcaattcacatgtagatgaagcagcattccatgacacaccaggctatgaacaggaaaaggcacctgaaggatcatctatctctgagttaactcctctggcaagtgacagaccatcatccagcagagtggccaaaacaaatgctgatcgtattaccccttttgcaacacgagtaaataaatttacccaacagtatgttctcaatgctgataacgcagttggtgtgccaagtaaaagtgctgaaatcacagaagatgaaataattagaagagttcaacctagtcaaagatgttacttacaagttcagcgctcacagcctgaaccaggttgcagattcatgtatgacagaatggaagacagatttaattacttggaagatcggatacggaaatcggcgagcttgttttctgcatctggattttgtggacaacctgcagatgctacccttgcttcagaggagaaaatgtttgcagtcggtacagtagcctgtgacggggaaggtcatttgaatgaaaagtctatcttgctacagggcagtgttgaacactccagggggcagtgtgtgcgccttgacttgaaggatcttgatcacttctctttgtttcctgggcaggtggtgggtattgaaggccacaatcccagtggacactgttttgttgcatcaaaattatttgattccataccggtctctgtggatgctcaacttcccagtgctaagaaacaagctattgataatgaaagcaaccaaaattctgacgctggcactctgtcaagagcattgtcatcggtccctatacaacaaccgataatatgttgtttgagccacttcaagaacttctttcatatgcttgtcgaaagccgcctcagcttctcatattgatgggacccttcattgactctgatcatcctgacataaaaaagggaactattgaccagagctttcatgacatttttcattttgaagttctgagaaagattcaagactttacccagtatctggggaacaccgttcgtgtaattctcattccatctgtgcgagatgctcaccatgactttgttttccctcagcctgcatttgatttgaatttgctagaagataccacccatcagattacttctctggcaaatccatgtctcttcggttccaacgagataaattttggctgttgtacagtggacattctgaaacagctcagtggccaagaaatttctcgcaagccacctggcggaaagcctggagacaggattggtagacttgcctcacacatactaaagcagcaaagttactaccctctatatcctcctgcccccggtgtgccgttagacttgtcactcgctaaggaagcgctggagatcccatcagcgccagatgttctcctccttccttctgatctcgcaccatttgtgaaggtgctctcccttggagaaggtagcgacgacgacagacggtttatctgtgtgaaccctgggaggttggcgaagggtattggcgggggcacatttgtggagctttactacaacgagggcatcgacaagaccaatgcctccatcatccgcatataggatcgctgaaactagggtgcgccgcagaaaatcacgtacgtagtttttgagctcggaaaatccatctcagcgtttgttatcccaggaagtgttgcttaacatgtggcatctccgctgcaaccgagtacctggactgaaatgttcatgttatcgtcaactaacaactgacctggtttacttcaggccctactgtataattacaggaattggttggtccatctttgctgttttccacagcattcttatggtaaaattattactgggagtttgttgtccagattaagctgtaatgcgccatacaacttccccgaatactggaatatgaagtgattgatgaacctaaactttgg

SEQ ID NO: 203814 - DNA, 2373 bp, Zea Mays
ttttgttcaagcccaaaaggcccaaacaggtctcgctagggttcttcggtcctccacccacctttgcccgcgaaatgtttcccgccatttcgtgtccgcatttcccgctacccgcctcgctctgctccccagatccctcgccccctcttccctctccgctcccccacgtcatctagtcgccgcccccgctcaccgattgtcctccgctgtggagcgagcaagcagcggcgaagcgatggaggaggagatccgaaaggagttccagagtaacggcttctccatcggaggagccggccccgaggacgccgcccagatcctctccacgctgctgacctactgcatcaactacaagatgagccccgcggatctcgtctcaaactgggaggtctactacctcaataggcaattggatggcttaaagctcgaaagctcgtatcttgatggttttctgtcacaccttcaaaatgaagttaaagacaggataataaaagaagaagccaaccttcacatttactccagtaacgatgttgacatgctcttaagcaattcacatgtagatgaagcagcattccatgacacaccaggctatgaacaggaaaaggcacctgaaggatcatctatctctgagttaactcctctgtatgttctcaatgctgataacgcagttggtgtgccaagtaaaagtgctgaaatcacagaagatgaaataattagaagagttcaacctagtcaaagatgttacttacaagttcagcgctcacagcctgaaccaggttgcagattcatgtatgacagaatggaagacagatttaattacttggaagatcggatacggaaatcggcgagcttgttttctgcatctggattttgtggacaacctgcagatgctacccttgcttcagaggagaaaatgtttgcagtcggtacagtagcctgtgacggggaaggtcatttgaatgaaaagtctatcttgctacagggcagtgttgaacactccagggggcagtgtgtgcgccttgacttgaaggatcttgatcacttctctttgtttcctgggcaggtggtgggtattgaaggccacaatcccagtggacactgttttgttgcatcaaaattatttgattccataccggtctctgtggatgctcaacttcccagtgctaagaaacaagctattgataatgaaagcaaccaaaattctgacgctggcactctgtcaagagcattgtcatcgatcatcgcagcaggtccctatacaacaaccgataatatgttgtttgagccacttcaagaacttctttcatatgcttgtcgaaagccgcctcagcttctcatattgatgggacccttcattgactctgatcatcctgacataaaaaagggaactattgaccagagctttcatgacatttttcattttgaagttctgagaaagattcaagactttacccagtatctggggaacaccgttcgtgtaattctcattccatctgtgcgagatgctcaccatgactttgttttccctcagcctgcatttgatttgaatttgctagaagataccacccatcagattacttctctggcaaatccatgtctcttcggttccaacgagataaattttggctgttgtacagtggacattctgaaacagctcagtggccaagaaatttctcgcaagccacctggcggaaagcctggagacaggattggtagacttgcctcacacatactaaagcagcaaagttactaccctctatatcctcctgcccccggtgtgccgttagacttgtcactcgctaaggaagcgctggagatcccatcagcgccagatgttctcctccttccttctgatctcgcaccatttgtgaaggtgctctcccttggagaaggtagcgacgacgacagacggtttatctgtgtgaaccctgggaggttggcgaagggtattggcgggggcacatttgtggagctttactacaacgagggcatcgacaagaccaatgcctccatcatccgcatataggatcgctgaaactagggtgcgccgcagaaaatcacgtacgtagtttttgagctcggaaaatccatctcagcgtttgttatcccaggaagtgttgcttaacatgtggcatctccgctgcaaccgagtacctggactgaaatgttcatgttatcgtcaactaacaactgacctggtttacttcaggccctactgtataattacaggaattggttggtccatctttgctgttttccacagcattcttatggtaaaattattactgggagtttgttgtccagattaagctgtaatgcgccatacaacttccccgaatactggaatatgaagtgattgatgaacctaaactttgg

SEQ ID NO: 203815 - DNA, 912 bp, Zea Mays
cctatgtgctataacgactggactgttgtgcaggtgcttcatggctttatggagccctatttccgtggtacagtttctccaatgatggatgggccttatgacgctattgaattagagacaagaatttccaagctaaaagaatccatgtgcaatttacacagcctacaaatgaagttgaaggtacctgaggatgaaccactgcaaactaacatcagggcatctctactgtggtccgagaaagaaagttttgaagagtataatgagtcttttatccctggacgcccagaacgtctctcatttgctgcgtaccaaacagtttcaggcatgtcagatgaacttctcactgtgcaaaactacaagatacaagcaatggattcgacagacacccttgaaaggctgaacactggtatcaagtttgtagaacataacatcggaatgatagccgcaaggcttgccattcaaaatatatgatcctcattggcagtgtttagttcatatgctaaatgatgtccgtgatgctaactccatctggtcgtaaaaaagaactcaaagcttttcaagtttcaactgtaaacgtggaaggtctgatctggtacattcggataacttctgacataactttgatatacattcagagaacagtacgaagatgaagaacacaatatgaagttgcctgctcatttaaatttgcatggataagctaacagaaaacaccatataagttgttcaagcatccagtacaacattattccatcagataaactatgcaactgtttatcaggtattgagatagaacataaaaaatgtctgatcagacaaaacataccataccatcttcagtgttcttaaggcgtcgcctaagcgtccaggcgctcgggcaaaggtggttgcctggtgcatttgctcgcctag

SEQ ID NO: 203816 - DNA, 883 bp, Zea Mays
tgatgggaatcaaggcaagatggagccctatttccgtggtacagtttctccaatgatggatgggccttatgacgctattgaattagagacaagaatttccaagctaaaagaatccatgtgcaatttacacagcctacaaatgaagttgaaggtacctgaggatgaaccactgcaaactaacatcagggcatctctactgtggtccgagaaagaaagttttgaagagtataatgagtcttttatccctggacgcccagaacgtctctcatttgctgcgtaccaaacagtttcaggcatgtcagatgaacttctcactgtgcaaaactacaagatacaagcaatggattcgacagacacccttgaaaggctgaacactggtatcaagtttgtagaacataacatcggaatgatagccgcaaggcttgccattcaaaatatatgatcctcattggcagtgtttagttcatatgctaaatgatgtccgtgatgctaactccatctggtcgtaaaaaagaactcaaagcttttcaagtttcaactgtaaacgtggaaggtctgatctggtacattcggataacttctgacataactttgatatacattcagagaacagtacgaagatgaagaacacaatatgaagttgcctgctcatttaaatttgcatggataagctaacagaaaacaccatataagttgttcaagcatccagtacaacattattccatcagataaactatgcaactgtttatcaggtattgagatagaacataaaaaatgtctgatcagacaaaacataccataccatcttcagtgttcttaaggcgtcgcctaagcgtccaggcgctcgggcaaaggtggttgcctggtgcatttgctcgcctag

SEQ ID NO: 203817 - DNA, 1238 bp, Zea Mays
gacgcaacgaaaaactgacaaagtttgctctatagcccagagttgatgttcttcagcgctaaggcagacgacagtagcatctgtttccaaatcttttctgaattcaagcattttaggtgttgataccatctgaatcgaagactctacacttgtatgaagcaagatatatagcattgcttgaggaggccttgtacaagagggaaaaatcttttgttcactttgtgcttgatccagttgtagatagctctactaaagcttcatttgctgtaagatatggctgcttggtccacatagaaagtgttcaaaagctggagattggagcgttgttatcaattagaggagtgtgccgtgtaaacatttcgaatcttttggatatggagccctatttccgtggtacagtttctccaatgatggatgggccttatgacgctattgaattagagacaagaatttccaagctaaaagaatccatgtgcaatttacacagcctacaaatgaagttgaaggtacctgaggatgaaccactgcaaactaacatcagggcatctctactgtggtccgagaaagaaagttttgaagagtataatgagtcttttatccctggacgcccagaacgtctctcatttgctgcgtaccaaacagtttcaggcatgtcagatgaacttctcactgtgcaaaactacaagatacaagcaatggattcgacagacacccttgaaaggctgaacactggtatcaagtttgtagaacataacatcggaatgatagccgcaaggcttgccattcaaaatatatgatcctcattggcagtgtttagttcatatgctaaatgatgtccgtgatgctaactccatctggtcgtaaaaaagaactcaaagcttttcaagtttcaactgtaaacgtggaaggtctgatctggtacattcggataacttctgacataactttgatatacattcagagaacagtacgaagatgaagaacacaatatgaagttgcctgctcatttaaatttgcatggataagctaacagaaaacaccatataagttgttcaagcatccagtacaacattattccatcagataaactatgcaactgtttatcaggtattgagatagaacataaaaaatgtctgatcagacaaaacataccataccatcttcagtgttcttaaggcgtcgcctaagcgtccaggcgctcgggcaaaggtggttgcctggtgcatttgctcgcctag

SEQ ID NO: 203818 - DNA, 1244 bp, Zea Mays
ttcccatccgctgaaaatctctccaccccggccccggccccggccgcggccatggcggcctccgctcccatccacctcctcctctcgccctcccgctctacatggccgccacaagatccgagcctgaggcccataccgcccctccacgcgtggccggcgcgccaacgccatctccgcgctgcccgctgcgcgttgtcgccgcctacgccgtcgctcgacctcccgctcctcccgttccagcctgcggaggtgttgataccatctgaatcgaagactctacacttgtatgaagcaagatatatagcattgcttgaggaggccttgtacaagagggaaaaatcttttgttcactttgtgcttgatccagttgtagatagctctactaaagcttcatttgctgtaagatatggctgcttggtccacatagaaagttgtaggttcaaaagctggagattggagcgttgttatcaattagaggagtgtgccgtgtaaacatttcgaatcttttggatgtacctgaggatgaaccactgcaaactaacatcagggcatctctactgtggtccgagaaagaaagttttgaagagtataatgagtcttttatccctggacgcccagaacgtctctcatttgctgcgtaccaaacagtttcaggcatgtcagatgaacttctcactgtgcaaaactacaagatacaagcaatggattcgacagacacccttgaaaggctgaacactggtatcaagtttgtagaacataacatcggaatgatagccgcaaggcttgccattcaaaatatatgatcctcattggcagtgtttagttcatatgctaaatgatgtccgtgatgctaactccatctggtcgtaaaaaagaactcaaagcttttcaagtttcaactgtaaacgtggaaggtctgatctggtacattcggataacttctgacataactttgatatacattcagagaacagtacgaagatgaagaacacaatatgaagttgcctgctcatttaaatttgcatggataagctaacagaaaacaccatataagttgttcaagcatccagtacaacattattccatcagataaactatgcaactgtttatcaggtattgagatagaacataaaaaatgtctgatcagacaaaacataccataccatcttcagtgttcttaaggcgtcgcctaagcgtccaggcgctcgggcaaaggtggttgcctggtgcatttgctcgcctag

SEQ ID NO: 203819 - DNA, 1442 bp, Zea Mays
aaaagaaaacagtaggaaaatggttcctttcagcattatctccgtttgctgtcccgccaacgcacggaccattcccatccgctgaaaatctctccaccccggccccggccccggccgcggccatggcggcctccgctcccatccacctcctcctctcgccctcccgctctacatggccgccacaagatccgagcctgaggcccataccgcccctccacgcgtggccggcgcgccaacgccatctccgcgctgcccgctgcgcgttgtcgccgcctacgccgtcgctcgacctcccgctcctcccgttccagcctgcggaggtgttgataccatctgaatcgaagactctacacttgtatgaagcaagatatatagcattgcttgaggaggccttgtacaagagggaaaaatcttttgttcactttgtgcttgatccagttgtagatagctctactaaagcttcatttgctgtaagatatggctgcttggtccacatagaaagtgttcaaaagctggagattggagcgttgttatcaattagaggagtgtgccgtgtaaacatttcgaatcttttggatatggagccctatttccgtggtacagtttctccaatgatggatgggccttatgacgctattgaattagagacaagaatttccaagctaaaagaatccatgtgcaatttacacagcctacaaatgaagttgaaggtacctgaggatgaaccactgcaaactaacatcagggcatctctactgtggtccgagaaagaaagttttgaagagtataatgagtcttttatccctggacgcccagaacgtctctcatttgctgcgtaccaaacagtttcaggcatgtcagatgaacttctcactgtgcaaaactacaagatacaagcaatggattcgacagacacccttgaaaggctgaacactggtatcaagtttgtagaacataacatcggaatgatagccgcaaggcttgccattcaaaatatatgatcctcattggcagtgtttagttcatatgctaaatgatgtccgtgatgctaactccatctggtcgtaaaaaagaactcaaagcttttcaagtttcaactgtaaacgtggaaggtctgatctggtacattcggataacttctgacataactttgatatacattcagagaacagtacgaagatgaagaacacaatatgaagttgcctgctcatttaaatttgcatggataagctaacagaaaacaccatataagttgttcaagcatccagtacaacattattccatcagataaactatgcaactgtttatcaggtattgagatagaacataaaaaatgtctgatcagacaaaacataccataccatcttcagtgttcttaaggcgtcgcctaagcgtccaggcgctcgggcaaaggtggttgcctggtgcatttgctcgcctag

SEQ ID NO: 203820 - DNA, 1459 bp, Zea Mays
cccaccatgccaaaaagaaaacagtaggaaaatggttcctttcagcattatctccgtttgctgtcccgccaacgcacggaccattcccatccgctgaaaatctctccaccccggccccggccccggccgcggccatggcggcctccgctcccatccacctcctcctctcgccctcccgctctacatggccgccacaagatccgagcctgaggcccataccgcccctccacgcgtggccggcgcgccaacgccatctccgcgctgcccgctgcgcgttgtcgccgcctacgccgtcgctcgacctcccgctcctcccgttccagcctgcggaggtgttgataccatctgaatcgaagactctacacttgtatgaagcaagatatatagcattgcttgaggaggccttgtacaagagggaaaaatcttttgttcactttgtgcttgatccagttgtagatagctctactaaagcttcatttgctgtaagatatggctgcttggtccacatagaaagttgtaggttcaaaagctggagattggagcgttgttatcaattagaggagtgtgccgtgtaaacatttcgaatcttttggatatggagccctatttccgtggtacagtttctccaatgatggatgggccttatgacgctattgaattagagacaagaatttccaagctaaaagaatccatgtgcaatttacacagcctacaaatgaagttgaaggtacctgaggatgaaccactgcaaactaacatcagggcatctctactgtggtccgagaaagaaagttttgaagagtataatgagtcttttatccctggacgcccagaacgtctctcatttgctgcgtaccaaacagtttcaggcatgtcagatgaacttctcactgtgcaaaactacaagatacaagcaatggattcgacagacacccttgaaaggctgaacactggtatcaagtttgtagaacataacatcggaatgatagccgcaaggcttgccattcaaaatatatgatcctcattggcagtgtttagttcatatgctaaatgatgtccgtgatgctaactccatctggtcgtaaaaaagaactcaaagcttttcaagtttcaactgtaaacgtggaaggtctgatctggtacattcggataacttctgacataactttgatatacattcagagaacagtacgaagatgaagaacacaatatgaagttgcctgctcatttaaatttgcatggataagctaacagaaaacaccatataagttgttcaagcatccagtacaacattattccatcagataaactatgcaactgtttatcaggtattgagatagaacataaaaaatgtctgatcagacaaaacataccataccatcttcagtgttcttaaggcgtcgcctaagcgtccaggcgctcgggcaaaggtggttgcctggtgcatttgctcgcctag

SEQ ID NO: 203821 - DNA, 3805 bp, Zea Mays
gcaaaaccccaagcctccttcctacgatggcctctcgtgggcgcggtggtggcggagggaaaggccctagcggtgggcggggcggtgaaggcagggggcgggggatccgtggcgggggaggttaccatcacggcgacgatggaggcggcgaacgcggaggcagaggcgacccgggccgagggcgcggggtcggcggtcgtggccgcggtcccggaggccgaggtgtcgacgaccaccagcagcagccgccgccgctcgggaacacagagggcggaggccagggccgcggcggcatggcggtagcggtaccgccagcccgccccgccgcgccctgtcctctagcgccggacgccgctgccccggcatttcccgcagcagcggcctcgtcttctgcgcaagcgcctcgagcccccaccgaggcggctggagctgccttggcggatggcatggggaagttggccgtggcggacgaccggcccgctgctcctcccgtgcccgcaggtaaacccgtcgcgcaaggtcccgcgcaccagccccaggaggctccgccactctcgaggaagaggatcgtgccgccgccccgccccggtttaggcacgtctgggagaaagctggcggttcgcgcgaaccacttctttgtcgaggtgtccgtgaacgacatcttccattacgacgttttaatcaatcctgaaccaaaagcaagaaaaaccaacaggatgctgctctcagagcttgtcaagatacatggcgcgacatctctcgcccacaagacacctgcatatgatggaagcaagagcctgtacactgcaggcgagctgccgttcaaatcaatggagtttgttgtcaagttggggaaggcgggccgagaagttgactacaaggtgacaatccgatacgcggcacggcctaacgtgtaccaacttaagcaattgatcaattctcagctaaggaacacgccatttgacgcaatccaagcactggatgttgtcttgagagagtcgccttctctcaactatgtaactctttctcgatccttcttctccaagaagttcggtgatgacgacattggcggtgggctagagtgctggagaggatattaccagagcttgcgtccaactcaaatgggcctctcattgaacattgtttcagtatgggaattttgtgtgtaagccagacacaagtcgctatgctggtgtgccattgttggttcgacatttatgtgtatttcagtggagctttgcatctcaagttcagttggcgcataaatatgaaccgtgctatttggcgtaatcaaaatagccaacttgtgtggtggcatgcatttctgaaagttgaaaatttgcctccaacataggtcttgtttggtagagctctcaacggctcttatagtagaaatttagaaatgcccatgttcatatgttttcgtttttaacctcttgagctcacctctgttcagatatatgctccctcgtttttaacctcttgaatctcacttctgttcagatacatgctcgacttcattttaccaacctatcgatgtggtaaaatttgttgccgattgtctccagctgacaaaccctggccaaccttttttggacagggatcgtttaaagcttaagagagccctgcgcggagttcttgttgagactgaacaccagcagggaaagagaagcatctacaggataactgggattacttctgttccattggctcaactgagcttttcttgtaacgaaggccctcagctgactgttgttgagtactttgcacaacggtacaatgtccagctgcgctacactgcttggccctgcctgcagtcgggcaatgattctaagccgatatatttaccaatggaggtgtgcaaaatcattgaagggcagaagtaccctaggaagctcagcgacacacaggtggccaacatactgaaggcaacctgtaaacgtcctcaggatagggaggagaacattattaagatggttcgccacaacaactattctgctgataagatggcacaggtgtttgggatcactgtggccaaccagatggctaatgtgcaagcccgtgttctgcctccacctatgctgaaataccacgaatctggaaaggagaaaaccgttgcaccaagcttggggcaatggaatatgattaacaagaaaatggtcaatggtggaaccattcacagctggacttgtctgagcttttcgcggatcccgcttcgtttggtagacgaaatatgccatgaattggttcaaaagtgcaattccattggcatgagtttcaatccaaggccggtgacagaagttcagaaagactcacacaacaacatagaagctgctttaagggatgttcacaggagggctccgaatctgcagctgcttattgtgattcttccagatgttactggttattatggggaaattaagaggatgtgcgagactgaccttggtatagtatctcagtgcatcaatccgaagaagaatagaaacaagcagtattttgaaaatcttgcccttaaaatcaatgtgaaggctggagggcgcaatacagtgcttgagagagcctctgtgcctaatgggataccttttgtctcagatgtgccaacaatcatttttggtgctgatgttacccatcctacagcaggagaagaatcctcggcttctgttggagctgtggttgcatccatggactggccacaggtcacaacatataaagctctggtctcggcacaagcacacagggaagagattatacaaaatctcggcggaatgataagggagttgctgatttcgttctataagaggactggcaaaaagcccaaaaggattatattttacaggtatgtgcttgacttaactatctagataactcttggatgaagccttcatttcgtgacttcctttgcttttgttttgtttatttagggatggaataagtgaaggacaattcaaccatgttttgctccttgaaatggacgcgataaggaaggcttgtgcctctctggaagatgggtatctacccccagtgacatttgtcgtaatacagaaaaggcaccacacaaggctcttccctggagttcatggaaggagagatgttactgacagaagtgggaacattcttcctggaactgtggttgataccgagatttgtcatccgcgggagtttgatttctacctttgtagccatgctggaattcagggaaccagcaggccaatacactatcatgtcctctacgatgaaaaccgtttctcggctgatgggctgcagatactcacaaacagcctgtgctacacatacgcacgatgcacgcgcgctgtctcagttgttccaccagcctactacgctcacctggcagcattccgcgggaggtactacgacgaacaaggtagcagccccgcccccgatggaacctcagttgtcggtggcgatgccgctgcagccggtgatgatccacctgcgtgccgcaggctcccccagatcaaggagaatgtgaaggaagtgatgttcttctgctagttgctcagcgcgagctgcatgtcttgattcaggctgcctcaatatacaagaggccttttttttgtgataaactggtatcgatggttgtcctgactattttgcatcagtggctgctaattagggcttgtttgataacaatgtttcttaaaatcatgattttacattttttttaattgtcaggatgataccgtagttttcaatcagctccaagaatattatatgttatttggatacaatattagaaaacatggtatttgctagacaaaagcaagtcttgttatgaaaactttgg

SEQ ID NO: 203822 - DNA, 2470 bp, Zea Mays
cgagattacgagacaagagacaagtagacaacccagctctccagcggtccagcggtccagcctctcctagccgaggccaaaacccccataccaacacacacttcgcttctcgctgcctccgcggcggcgcgccgctccgctccgagccctcttcctcctcctcctctgcccgttcggtcgagaatgttctactcgcatcagcttctcgcgcggaaggcgccgctcggccagatatggatggcggcgacgctccactcgaagatcaaccgcaaacggctcgacaagctcgacatcatcaaaatctgtgaggaaattttgaacccctcggtgcccatggctctgaggctctctggaatcctcatgggtggcgtggtgatcgtgtacgagaggaaggtgaagcttctctacactgatgtctctcggcttctgactgagatcaacgaggcatggcggatcaaaccggtcacagaccccaccgtcctccccaagggtaaaactcaagccaagtatgaagcagtaacactgccagagatcaatatggtggtggaacagcccatgtttttctcagagcctgatggtgccaagttccgacgaatgatctggatgaacagtatgttcaagtcaatcttgatgatgatgacttctctcatgctgatgatcgtcatcaagctaaagcagtgaatataaccctggtcgataattttgagtctgggcttgcagaaactgatttattcaatcactttgagagatttgacatagcagatgatgagaccacagtcaatatcactcctgatgagtacccacaagttccaagtacgctgattccgtcaccacctaggcaggaagacattcctcaacaagaagaaccgtactacgctgccccctcccctgttcatggagaacctcaacaagggggaccagaggaccaagaggaacagaagatgaagcaaccaccgaaagcatcaaagcggaaagcacgttgggaagtcccacgagtaattatggacaataaccagatgatgatcccaggaaacatatatcagacatggctgaaggatgcatcaagccttgtctcaaaaaggcgtaaacttaacagcaattttaattttattcgatcaaccaagataagtgatctcatgcacatccccccggttgctctaatatctcatgacaacttgttctcagaattatgttatcctaagccacttatgcagctctggaaggactgcactgaggtcaagtccacaaaagcttcttcaggagggcagcgatcatcatcacaagaaccacaaccgaaaaactcaccacctcaggctgggggagagtatgagatggaaacaggtggtctgccgatggatttaacagatggcattgaaaaactcagggcaaacatgagtgcaaaatatgacagagcttacaatattcttcacagtgaccatagtgttactcctggaagtcctgggttaagtcgcaggtctgcttcaagctctggtggctctggatcggcgtttatacaattggatccagaagtacaattgccatcaggaagtggaaggtccaaaagggggcagcattcatctgcaagaagcttggggaatcttgatactgttgaggaagattttccactggagcaggaagtgagggacttcaagatgagaaggctttcagattatgtgccaactcctggttggttgcattctgtcctttgctatatataaacatgtgaaactgtctctggacgactggaacataaactgtttcaaccaacatagaagttaacaattttactccaactcctgacctactggaagaaactgaaccgactcaaaccccatatgagaggcgctccaatccaatggacaagatcacagaaacaatccagtcgcatctcaaacttcatttcgataccccaggtgtcccacaatctgaatccttaagtcatttagctcatggaatgaccaaagccagggcagcccgactattctatcaaatagctgttttggcaacttgtgattacatcaaggttactcagctggaacggaaaggagatgaactgtacggagacatcttgatctccagaggattaaagatgtgacttggtgatgttggaaacaattttgctgcggtggttcccggtgcacatctcgtgtttatattacagaatgcttacatattgcataggatgtcttgtagttaacacataatctatacatggtgatctggtgaaagaaagggagcgagatatgaggcagtagttttgtgttatgtggcaagcaaaattctaagctgttattttagaggtttcataatttaagtacgaacatgtgttatactattatgaaactaagttgtcctgaaagcacttactgaaagggagaaatttacatggtaccttgtcaacgatgaaacatacatcggaggacaacataaagatgcacactgtatcctgctcttcggctgcttcatgtta

SEQ ID NO: 203823 - DNA, 2398 bp, Zea Mays
cgagattacgagacaagagacaagtagacaacccagctctccagcggtccagcggtccagcctctcctagccgaggccaaaacccccataccaacacacacttcgcttctcgctgcctccgcggcggcgcgccgctccgctccgagccctcttcctcctcctcctctgcccgttcggtcgagaatgttctactcgcatcagcttctcgcgcggaaggcgccgctcggccagatatggatggcggcgacgctccactcgaagatcaaccgcaaacggctcgacaagctcgacatcatcaaaatctgtgaggaaattttgaacccctcggtgcccatggctctgaggctctctggaatcctcatgggtggcgtggtgatcgtgtacgagaggaaggtgaagcttctctacactgatgtctctcggcttctgactgagatcaacgaggcatggcggatcaaaccggtcacagaccccaccgtcctccccaagggtaaaactcaagccaagtatgaagcagtaacactgccagagatcaatatggtggtggaacagcccatgtttttctcagagcctgatggtgccaagttccgacgaatgggattggaagatctggatgaacagtatgttcaagtcaatcttgatgatgatgacttctctcatgctgatgatcgtcatcaagctaaagcagtgaatataaccctggtcgataattttgagtctgggcttgcagaaactgatttattcaatcactttgagagatttgacatagcagatgatgagaccacagtcaatatcactcctgatgagtacccacaagttccaagtacgctgattccgtcaccacctaggcaggaagacattcctcaacaagaagaaccgtactacgctgccccctcccctgttcatggagaacctcaacaagggggaccagaggaccaagaggaacagaagatgaagcaaccaccgaaagcatcaaagcggaaagcacgttgggaagtcccacgagtaattatggacaataaccagatgatgatcccaggaaacatatatcagacatggctgaaggatgcatcaagccttgtctcaaaaaggcgtaaacttaacagcaattttaattttattcgatcaaccaagttatgcagctctggaaggactgcactgaggtcaagtccacaaaagcttcttcaggagggcagcgatcatcatcacaagaaccacaaccgaaaaactcaccacctcaggctgggggagagtatgagatggaaacaggtggtctgccgatggatttaacagatggcattgaaaaactcagggcaaacatgagtgcaaaatatgacagagcttacaatattcttcacagtgaccatagtgttactcctggaagtcctgggttaagtcgcaggtctgcttcaagctctggtggctctggatcggcgtttatacaattggatccagaagtacaattgccatcaggaagtggaaggtccaaaagggggcagcattcatctgcaagaagcttggggaatcttgatactgttgaggaagattttccactggagcaggaagtgagggacttcaagatgagaaggctttcagattatgtgccaactcctggttggttgcattctgtcctttgctatatataaacatgtgaaactgtctctggacgactggaacataaactgtttcaaccaacatagaagttaacaattttactccaactcctgacctactggaagaaactgaaccgactcaaaccccatatgagaggcgctccaatccaatggacaagatcacagaaacaatccagtcgcatctcaaacttcatttcgataccccaggtgtcccacaatctgaatccttaagtcatttagctcatggaatgaccaaagccagggcagcccgactattctatcaaatagctgttttggcaacttgtgattacatcaaggttactcagctggaacggaaaggagatgaactgtacggagacatcttgatctccagaggattaaagatgtgacttggtgatgttggaaacaattttgctgcggtggttcccggtgcacatctcgtgtttatattacagaatgcttacatattgcataggatgtcttgtagttaacacataatctatacatggtgatctggtgaaagaaagggagcgagatatgaggcagtagttttgtgttatgtggcaagcaaaattctaagctgttattttagaggtttcataatttaagtacgaacatgtgttatactattatgaaactaagttgtcctgaaagcacttactgaaagggagaaatttacatggtaccttgtcaacgatgaaacatacatcggaggacaacataaagatgcacactgtatcctgctcttcggctgcttcatgtta

SEQ ID NO: 203824 - DNA, 2378 bp, Zea Mays
cgagattacgagacaagagacaagtagacaacccagctctccagcggtccagcggtccagcctctcctagccgaggccaaaacccccataccaacacacacttcgcttctcgctgcctccgcggcggcgcgccgctccgctccgagccctcttcctcctcctcctctgcccgttcggtcgagaatgttctactcgcatcagcttctcgcgcggaaggcgccgctcggccagatatggatggcggcgacgctccactcgaagatcaaccgcaaacggctcgacaagctcgacatcatcaaaatctgtgaggaaattttgaacccctcggtgcccatggctctgaggctctctggaatcctcatgggtggcgtggtgatcgtgtacgagaggaaggtgaagcttctctacactgatgtctctcggcttctgactgagatcaacgaggcatggcggatcaaaccggtcacagaccccaccgtcctccccaagggtaaaactcaagccaagtatgaagcagtaacactgccagagatcaatatggtggtggaacagcccatgtttttctcagagcctgatggtgccaagttccgacgaatgggattggaagatctggatgaacagtatgttcaagtcaatcttgatgatgatgacttctctcatgctgatgatcgtcatcaagctaaagcagtgaatataaccctggtcgataattttgagtctgggcttgcagaaactgatttattcaatcactttgagagatttgacatagcagatgatgagaccacagtcaatatcactcctgatgagtacccacaagttccaagtacgctgattccgtcaccacctaggcaggaagacattcctcaacaagaagaaccgtactacgctgccccctcccctgttcatggagaacctcaacaagggggaccagaggaccaagaggaacagaagatgaagcaaccaccgaaagcatcaaagcggaaagcacgttgggaagtcccacgagtaattatggacaataaccagatgatgatcccaggaaacatatatcagacatggctgaaggatgcatcaagccttgtctcaaaaaggcgtaaacttaacagcaattttaattttattcgatcaaccaagataagtgatctcatgcacatccccccggttgctctaatatctcatgacaacttgttctcagaattatgttatcctaagccacttatgcagctctggaaggactgcactgaggtcaagtccacaaaagcttcttcaggtcacttcataatttgtaatatcatgtcactcttgactaaagaaaccatattattttaacatgctaaaggccaattgaaaaaccttaactgtttcttactttcttaaaggagggcagcgatcatcatcacaagaaccacaaccgaaaaactcaccacctcaggttattctagattcttttcagaaaagaaaaacacccttccctagtgactcatcataattatcattaaatttgtccctggtgagtggttgaattttcaggctgggggagagtatgagatggaaacaggtggtctgccgatggatttaacagatggcattgaaaaactcagggcaaacatgagtgcaaaatatgacagagcttacaatattcttcacagtgaccatagtgttactcctggaagtcctgggttaagtcgcaggtctgcttcaagctctggtggctctggatcggcgtttatacaattggatccagaagtacaattgccatcaggaagtggaaggtccaaaagggggcagcattcatctgcaagaagcttggggaatcttgatactgttgaggaagattttccactggagcaggaagtgagggacttcaagatgagaaggctttcagattatgtgccaactcctggttggttgcattctgtcctttgctatatataaacatgtgaaactgtctctggacgactggaacataaactgtttcaaccaacatagaagttaacaattttactccaactcctgacctactggaagaaactgaaccgactcaaaccccatatgagaggcgctccaatccaatggacaagatcacagaaacaatccagtcgcatctcaaacttcatttcgataccccaggtgtcccacaatctgaatccttaagtcatttagctcatggaatgaccaaagccagggcagcccgactattctatcaaatagctgttttggcaacttgtgattacatcaaggttactcagctggaacggaaaggagatgaactgtacggagacatcttgatctccagaggattaaagatgtgacttggtgatgttggaaacaattttgctgcggtggttcccggggacgtccactcaccaggatacaag

SEQ ID NO: 203825 - DNA, 2268 bp, Zea Mays
tcagttttcacccatcccttcccagttctgtccctctcgaaccctaactccaaaaaccctcgctctcctctcatggccgccgccgcagctgacgacgcagccgaggtggagcggctttacgagctcggcgagcgcctctcctccgccaatgacaagtccgagcatgcggcggactacgaggcgattattgcagcggtgaagggacagagtgccaaggcgaagcagctcgcagcgcagcttatccccagatcagaatacaagctattcgtggctttccacttcttggcaaagatactgaatttgtgtcaaaaattgcagatgttttgggtcagctccttacaagcgaggaaaatgttgagcgtgatgctgttcataaagcgctcatgtcccttatacggcaagatgttaaaaattcattacaacctttatttaagcatgtggagcaaggatcagagattcgtgagaagattatttgttttcttcgagacaaggtctttcctcttaaagcagagctgctgaaacctcaagcagaaatggagagatttataacggatttgataaagaaaagtgtgcaagatgtaactggttcagaattcgaactattcatggggttcttgcgaagcttgagcatatttggggattctgctcctagagagtcctttcaagaactaattgaaattattcaagcacaggctgatctgaattcacaattcaacgtttctgacattgaccacattgagaggtggatttcatgcatgtatatggctcttccgatcttcatgagaggagcatcagcaagcaagttcctcaattacttcgttaaacaaattgttccagcatttgagaagattcctgaagaaaagaaactggatttgctaaagactattgcttcaagttcaccatatgctgcagcacaagattcacgtcagctgcttccatctgttgttcagttactcaagaagtatatgcctgggaagaaggtggaagatatcaaccataattatgttgagtgcttgctatacacttttcatcatttggctcacaagactccaaacacaacgaacagtctatgtggttacaagattgttactgggcaaccatcagatagacttggagaggacttctcagagcattacaaagatttcacagagaggttaactggaacagaagagacggtacgagcagcctccaagcgactaactcaggggatggcagatttcaacaaggcaatatcttcagcaaaaactgacgaggaaaagactaaaattaaaggcgatcagcaaacttcaacaaggacaatgaggtcatataacaatatattggcaatgacacagtcattgcattcaaaatcccctttatttatcggtgataagaaaatcactctgtcatggatggagcagcccaacaaagcagcagctacgaaagcaggggggaagaggtcacaacctagtacaaatgggaatgaccctgcaaacaagaaggggagaggaggaatgcaaaaccagctagtgaacagagcttttgaaggactgtctcatgttggaagaggcagtggaagagggcggggcaggggtggccgaggaagaggaagaggatggagtgggtaccactgagatgacctggaaattctgttcaaacctgacaagggatgagctttctgcttccaccagagagtaaactccaaggtcgatgttttattggtgtgcattactgcaacgcgttgaaatggatcaaggcacacaacagcagaaatgcgtacacagagaaaggatgctaagaaatgtctgcaagtttgtgcatctttcttattcatttaccatctcatcgtgttctttgccaccctaaccgtcgtgtcacttgcgttggctggctgtttgatgaactgggcagttcgatatctttgttctttattttattttacagtgtttgaagagacgaccaagcttgtgctgactttgtttgagttcgttttatgtttcgtccttgtactgacacagatgtattagtgatgtttaacttttatgtaacgattgatctagctgtaatataagttaagcatttaatgagatataaaaatgaaaagaaatatttggtgtcaatcaatacaaatttaacaaatcatgatttccatttgagaaaaataactgaatcagatcatccattagcagggaaccaatgaacatcctgatcaacactaatgtgtctggttcagctataaactatgaaaaaaactgtttttgagttgtctgctttgaaaaaaaaaatata

SEQ ID NO: 203826 - DNA, 842 bp, Zea Mays
ggcagttcctcgctggtcctttgcgcaaaagagtactctctccctcctaccacacacagcctccggactgctccggacgcgcgcctcagatctactccaacacctccgcagcggcggcgcccgcgggtggaggagcaggagaggcggcgccatggtcgggaccgggaagagggagcggatagcgatacggaggatcgacaacctggcggccaggcaggtgaccttctccaagaggcggcggggcctgttcaagaaggccgaggagctctccatcctctgcgacgccgaggtcggccttgtcgtcttctccgccaccggcaaactcttccacttcgccagctccagcatgaagcaggtaatcgatcggtacgactctcattccaagactctccagaggtccgaaccgcagtcgtctcaactgcagtcacatatggatgacggcacttgtgcaaggctaaaggaggaacttgctgaaacaagccttaagctcaggcagatgagaggagaggagctccagaggctgagcgtcgaacagctgcaggagctcgagaagaccctcgaatccggcctcggctctgtactcaaaaccaagagccaaaaaatccttgacgagatcagcggtctggaaagaaagagaacgcagctgatcgaggagaactcaaggctgaaggagcaactgcaggtgacacggatgtcgaggatggagacgcagcttggcgccgatccagagttcgtgtacgaggaagggcagtcgtctgaatccgtgacgaacacgtcctatccgcgcccgtccaccgacaccgacgactgctccgacacatcgctcaggctcggctccaaat

SEQ ID NO: 203827 - DNA, 1219 bp, Zea Mays
ggcagttcctcgctggtcctttgcgcaaaagagtactctctccctcctaccacacacagcctccggactgctccggacgcgcgcctcagatctactccaacacctccgcagcggcggcgcccgcgggtggaggagcaggagaggcggcgccatggtcgggaccgggaagagggagcggatagcgatacggaggatcgacaacctggcggccaggcaggtgaccttctccaagaggcggcggggcctgttcaagaaggccgaggagctctccatcctctgcgacgccgaggtcggccttgtcgtcttctccgccaccggcaaactcttccacttcgccagctccagcatgaagcaggtaatcgatcggtacgactctcattccaagactctccagaggtccgaaccgcagtcgtctcaactgcagtcacatatggatgacggcacttgtgcaaggctaaaggaggaacttgctgaaacaagccttaagctcaggcagatgagaggagaggagctccagaggctgagcgtcgaacagctgcaggagctcgagaagaccctcgaatccggcctcggctctgtactcaaaaccaagagccaaaaaatccttgacgagatcagcggtctggaaagaaagagaacgcagctgatcgaggagaactcaaggctgaaggagcaagtgacacggatgtcgaggatggagacgcagcttggcgccgatccagagttcgtgtacgaggaagggcagtcgtctgaatccgtgacgaacacgtcctatccgcgcccgtccaccgacaccgacgactgctccgacacatcgctcaggctcggctccaagtgacggagatttgacatgtccggtagcggagcggtgccgattgcttgcccttctccactctagataggtctggattgggggagagcaagcactgctggatcgggaagacccaagtgaccaacgcgtcgcatcagaataaggcattttgagtgctgtatgatgtgtgtattctggctctgaaagtgagacctgcttttgttataatacatacatacaggcagcatggcaatacgtgacggggtatccgctgcctgcagtccgtgacctgtctgtcgtctctgtttctagtacccgtataatcaccctgcaattacctgcagctggtcatcgttaggagaaactccagtccatgcaaatgaactcccagcacttgtgctcttcgcg

SEQ ID NO: 203828 - DNA, 1505 bp, Zea Mays
ctctcctctccctccctccctcctctcctctcctctcctctcgtctctctctctctctcgtcgctattggctagttcgcgcgtcttgttccataaataggagtagtaggcagttcctcgctggtcctttgcgcaaaagagtactctctccctcctaccacacacagcctccggactgctccggacgcgcgcctcagatctactccaacacctgtaaggattcctctggccgtgtggcctttccggcaactatagctagggttctccttctcccctccctccgcccgcttgctcttggacggtgcttcctcttctttaccagctagtcaaagtaaccacgcgtgctgcttcatctctcccttccttcctgccgtgtggttgttggcagccgcagcggcggcgcccgcgggtggaggagcaggagaggcggcgccatggtcgggaccgggaagagggagcggatagcgatacggaggatcgacaacctggcggccaggcaggtgaccttctccaagaggcggcggggcctgttcaagaaggccgaggagctctccatcctctgcgacgccgaggtcggccttgtcgtcttctccgccaccggcaaactcttccacttcgccagctccagcatgaagcaggtaatcgatcggtacgactctcattccaagactctccagaggtccgaaccgcagtcgtctcaactgcagtcacatatggatgacggcacttgtgcaaggctaaaggaggaacttgctgaaacaagccttaagctcaggcagatgagaggagaggagctccagaggctgagcgtcgaacagctgcaggagctcgagaagaccctcgaatccggcctcggctctgtactcaaaaccaaggtagagccaaaaaatccttgacgagatcagcggtctggaaagaaagagaacgcagctgatcgaggagaactcaaggctgaaggagcaagtgacacggatgtcgaggatggagacgcagcttggcgccgatccagagttcgtgtacgaggaagggcagtcgtctgaatccgtgacgaacacgtcctatccgcgcccgtccaccgacaccgacgactgctccgacacatcgctcaggctcggctccaagtgacggagatttgacatgtccggtagcggagcggtgccgattgcttgcccttctccactctagataggtctggattgggggagagcaagcactgctggatcgggaagacccaagtgaccaacgcgtcgcatcagaataaggcattttgagtgctgtatgatgtgtgtattctggctctgaaagtgagacctgcttttgttataatacatacatacaggcagcatggcaatacgtgacggggtatccgctgcctgcagtccgtgacctgtctgtcgtctctgtttctagtacccgtataatcaccctgcaattacctgcagctggtcatcgttaggagaaactccagtccatgcaaatgaactcccagcacttgtgctcttcgcg

SEQ ID NO: 203829 - DNA, 1356 bp, Zea Mays
ctgttcctgtcatccatccactctctctcctctccctccctccctcctctcctctcctctcctctcgtctctctctctctctcgtcgctattggctagttcgcgcgtcttgttccataaataggagtagtaggcagttcctcgctggtcctttgcgcaaaagagtactctctccctcctaccacacacagcctccggactgctccggacgcgcgcctcagatctactccaacacctccgcagcggcggcgcccgcgggtggaggagcaggagaggcggcgccatggtcgggaccgggaagagggagcggatagcgatacggaggatcgacaacctggcggccaggcaggtgaccttctccaagaggcggcggggcctgttcaagaaggccgaggagctctccatcctctgcgacgccgaggtcggccttgtcgtcttctccgccaccggcaaactcttccacttcgccagctccagcatgaagcaggtaatcgatcggtacgactctcattccaagactctccagaggtccgaaccgcagtcgtctcaactgcagtcacatatggatgacggcacttgtgcaaggctaaaggaggaacttgctgaaacaagccttaagctcaggcagatgagaggagaggagctccagaggctgagcgtcgaacagctgcaggagctcgagaagaccctcgaatccggcctcggctctgtactcaaaaccaagagccaaaaaatccttgacgagatcagcggtctggaaagaaagagaacgcagctgatcgaggagaactcaaggctgaaggagcaactgcaggtgacacggatgtcgaggatggagacgcagcttggcgccgatccagagttcgtgtacgaggaagggcagtcgtctgaatccgtgacgaacacgtcctatccgcgcccgtccaccgacaccgacgactgctccgacacatcgctcaggctcggctccaagtgacggagatttgacatgtccggtagcggagcggtgccgattgcttgcccttctccactctagataggtctggattgggggagagcaagcactgctggatcgggaagacccaagtgaccaacgcgtcgcatcagaataaggcattttgagtgctgtatgatgtgtgtattctggctctgaaagtgagacctgcttttgttataatacatacatacaggcagcatggcaatacgtgacggggtatccgctgcctgcagtccgtgacctgtctgtcgtctctgtttctagtacccgtataatcaccctgcaattacctgcagctggtcatcgttaggagaaactccagtccatgcaaatgaactcccagcacttgtgctcttcgcg

SEQ ID NO: 203830 - DNA, 1742 bp, Zea Mays
agcgagactaagaattcccccctccccctcccgtttcttttcttttttttgttgcctatacagctagaggaatgagtgatgatagcctgggaatgtaatggtatcctgtgtgctggatttgctttcatttgtcgatggttttggtgaattgacctggaagcaaatggaattggccttgatctggtggtcaaactagggaagaattgtgggtcagtgcatgttttatggggcgactggaatcattgatgcagtgcagtttgctggttatttacaccacattttttttatcaattggtctgtcctggtaaaagtatgatctttggatgtggaatccacacataatgctgtctcattttaatttttatgttccattgcgggaaccttgatcattctactctactagtgcatgctttatggggcgactggaatgcattgatcattgatgcagtgcagtttgctggttatttacaccacatttttgatcaattgatctgtcctggtaaaagtatgatctttggctgtggaattcacacataatgctgtctcattttaaactttatgttccattgtggcaaccttgatcattctactctactagaaatatatacaggaagaaacaggttggggcttttctttttagaaaatgaaaattatccacagtgattgtaggccttgagttcaatcatcagatttccagatagatggtcaaggaacgcttgtaacagtgaagccaggcaaggagataaacacatagagttcttattgtgtttataaacaagaatgttctatttggtttgtcttattgccctattttggcaaaaggatgattatgcatcaagggttcttgattcttttttcccacagttttgatgtatatgatacatcagcgtgcactttatggaagatcagctataaatttatgattcaagtctgaacaggtgtttatactgtttctcatgcagaagtaagtttgatttcttcttgtttttttaaacaaaggtacaaggagaacaggtgggatcccaagcagcttatcggctctggtggcatgccatcatcacattctgccacggttacagcactagcagtagcgattgggttgcaagatggctttaactgctccctctttgcaacagcaactatatttgcaagtgtggtaatgtacgatgcttctggtatcagattgcatgctggaaagcaagcagcggtactgaaccaaatagtttgtgaacttccttctgaacatcccttgtctgaaacaagaccactgcgagaacttttaggccatacaccaacccaggttgttgctggcgcattgcttgggtgtacgatagccacagcaggacaattattcgtttgaactccgaaggtgcaggagaaatgttgtagcatttgcatcgcggggacttgagaagaagtttctctagtgttctgctactttaggtattggttatttttactgtagcctagaggcttcacacatgggctgtgctgcggaggtagaactgatgcaatttttttggtaatggttacgtaacatttgactcaagtgaccaaggagtttttttccttggaagcatgcttggcggtctagtcttcggattgatagccactagtgtgtatctttagattctgctggtctgtgtggctcttgtgggcagaggacggaagtgacttttaaggactggtatcacctcgatgtactgttcttgaataaataaaaatccttccttttcaaaaaa

SEQ ID NO: 203831 - DNA, 1434 bp, Zea Mays
gtctcactgagtcaccaagttgtgggttcgaagcaatatctttgcatttacattttatagagggaagacttgcctcggtttatcccttctccagatcctactcatgtgggagcctctggcctagttaggagtcttgtttgcataaagtaaagaggaatcgcaccgagggataggcattgtgagtatgacgtgtgctttgcatgggccagcacctgactcagttcctgtgaaatcatgaatccaccaacggaggtcaaatacctgactgcagccagccagaatgtttacagccacacatgatgatcctatagctggctagaagaagaagaaatatttacagccatccagcataaccttagagctggtttgaagaggatgcaaccggtgcagctgcacaaatgcacaaggacatggagtacccaagaaggacactgctgcacacccctttctccgggcatccctctggtccaagccagccaatagatggagccacggccacagacggaagcaacttcgacgcgaacgtggtcatgatcctggctgtcctcctgtgcgcgctgatctgcgctctcgggctcaactccatcgtccggtgcgcgctgcggtgctcgagccgggtggtggtgggtcctgaaccgaaccaggtgacgcggcttgtccagagcgggctgaggaggaaggcgctccgagccatgccggtcctggtctactcgcctgggctgaggatcaatgctgccaacccgacatgcgcgatctgcctctcggacttcgaggcaggggagcatgtcagggtcctccccaaatgcaaccacggcttccatgtcaggtgcatcgaccggtggctgctggcgcggtcgacgtgcccgacgtgccggcagtccctgttcggagtgccgcagaaggcctccggctgctccgaggcgagccgggctgccgagccagagcctgcgcctgcgcctgcgcctgctcgctctgtccttgtgccgctcagacctgaaggtttggtcactcattatgatttttagaatgttcggttgcttcttagtcgttgcataaatgatgagagggaggctgagaaaaagtagaaacaaaaactgtgagcattagatcttactgccaatctggtttgtacattgttggttgctagagaaaaaaaagatgtgaaggttttctagttttttttttacttgctgtgtcagtgccaattgttgctggggaatgtgccatggaaaataccagctggtgctatctgctatgggttccttttctgaatcaccattcaatgttggttttgtaaaaagaagaagaagaagagggacatgattggccggtctgatcatatggctgggagtgcagagtgctgcgccaccactatggtgactggagatcaggctttagctgctaagcttcttcggggcttcagatttcagtggg

SEQ ID NO: 203832 - DNA, 299 bp, Zea Mays
cggtcgacctggagcaaaagcggcgggtgtgcgctgcttggattgcagccattaagagagagaaacaagggtagaaggacgtgggtccattcgcgggtgagaattgagctcgtccgcaaccttcacgcagtgccagacaatggtgcatccttgcactacgcgaggactcgcccacggggtcactgtgtcggagaccgggtgcctcgttgtcgacgtcaagagatccggcgcgccaccagtctccgtggacaactacactggtgcctcgaaaacgcacaatgaggaacaaacgaggagct

SEQ ID NO: 203833 - DNA, 1745 bp, Zea Mays
aaaaaatgaaaaccatatagaacgtcgttcgcgaccccaccgtatccccctccctcgccccctcactgctctcgctttcgctcgccatccgccgtcccgctccgcacaccggccctgcccgatgccttcgcccgccgcggccgcggcggcgcctttccaccgcatcgcatgcgcgcgtcagcacctccctcaaacccgtctcttcttcctcccatcccgcgcgctgctcaaatccgaccgcctcaccgtcccggctccgctgcgcgtccacgcgctgaggctgcctccgacggtgccacgggcggcaagccacgatgccgccacgggcgtgagatcgcccacatctggcggccagatgctggtgttcgtcccgccgcacccgctcataaagcattgggtctccgtgctgcgcaacgaacagacaccctgcgtcatcttcaagagtgccatggcagagcttggtcggctgctcatatacgaagcatccagagattggttggtaagttgaaatcttttgcctggttgatcatttttctgttattcttctttctcttctaatgttaacattaagctgtgctagtgaagtcggagtaaagctaagctgtaacatggtatgggcaattatatttgtagggaagaatattgagtgtaatatatgaatcaaaattcatcacaattttttagaagtcttcatggtcacttcttagtttcctcatgtactttaatcaaacatgtagctatgtatcgtttctgagaatactgaccacaacaccaaggcatgaacatgtttcctcatctttctatatcacgaacaatgtgttgcgccataaaaagatgtttggatcagtcattattagacagggcaatcaactcaatgaatagaacaccaggaatcgtgataaaccgttctgaacccttgcagcctacaatcacaggagagattgagacacctgtagctgtagctagcgtagaatttattgatccaagagagcctgttctggttattccaatactgagagctggtcttgcactagctgaacttgcttcatcagttctgccagccaccaagacttaccacctcggctttcgtagggatgaagaaacgcttcaaccttcaatatacctgaacaacctgccagacaagattccagagggtactcgtgtgctagttgttgacccaatgctggccactggtgggacaatggttgctgctattgacttgttaatcgagtgcggagttactagcaagcagattaaagttatatctgctattgcatcacctcctgccctgcaaaagctcaataacaagttccctgggctccacgtgtacacaggaatgattgatccagaagtaaatgagaaaggttttatagttccaggactgggggatgctggcgacagaagctttgccacataatcagactgcccaatttgattgggtcagtgttcgacctgcgagaatctttgcttgagtttcacagaaacggagcgactgccagtagcagtgtttattgctgtagattactttcgtttgagattttgttccttttttcagtgttatcagctgcctaccattttgtagcacccattctgtatgattgtgtagaatacaaggctagttcaaatgtccccagatggtaaaatgctcgagagaacaaggttccgttcaaaatgacggattattgaagtttctgctctctaatattttgccagtcgatggaataaacatacgtcattgtgcttaa

SEQ ID NO: 203834 - DNA, 3384 bp, Zea Mays
tgtgactcgtgatttgtctaatgatcagacactcgtctccttatatctccacagcattcatctttctctccatgttggattgttcgcggccgccggtcctgctcctgtcctctccacgtcgccaatcacttcaccctctcaagtctcatctcccttgccaccatggctacgcttctctccccccctgcccacgctgccgttgctcatctaatcctctcctcccagtcccaaaccatagcctcctgccaaagctgccatagttgaagttgcccacatgtgccactttggtcatcgtcgtctagttggatacattcgaggcgacgacacacatgtgatagagctcgaatagttacgactgggcattgggctcgccggaagccatggatatggttcttcccgtcgtcaccgaagaagcgtaaattacaggaccccaaacgaccccaaaacgtttcagactccagactgaaaaattcccccgctgtttgtgcctgagacgcagcgcgtgctcactagctagcgtgtcactgagcgccgggcccgtcctcggtgcgccaccttccctttccgctttccccgcgtttccatttcgtttcagtcagtggctcagtgcgcgactgaaggctgccgcaacaccattaaaccaccaaactgcttctcctccagtctccgcttcccgtgcgccgcgggaacaaggttctggaagcttcggagatggggaggagtagacgccacgaaggaggaggaggaggagaacgacggggtgcgggtgctggaggggtggccgccgccgccttcgccgctctgctgctgggctgcgtcgtcatggccctcgtcggcggcgccgccgcgcagggcccccggctcccctccgactacaaaaccctcagcggcgccgctccgctcgtggtggccagaggcgggttctcaggagcgttcccggactccagcgagggcgcctactccttcggggcgtccgccagcgcgcctggcacggccatgtggtgcgacgtccagctgaccaaggacggcgtcgggctctgcctccgcgacgtcaacatgaagaactgcaccaccgtcgaccagacgtaccccgggaggaagcggacctacgtcatcgacggcgtccacaagaccggctggttcgtcccggacttcaccagcgccgagcttcttcagtccgtgtacctaacacaagcaatctggtctcgcactgagaggatggacggcatataccctatcgtcactgtccctgacgttcagtccatcgtcaacacgtctcctatctggctgaatgtccagcatcccatcttctacaaacaacgcgatctggacatgagcagctacatacactcgatccggaagctggtgcgcatggactacatctcgtcgcctgagatcggcttcctcagaaacatatccgcaagagtccgccgcagaaccaagctcgtgttcagctttctcgacaaaaaactcctggatcactccgtgaaccagacatacggttcgctggcgaggaacctgacgttcgtcaggtccgtcgcgtctggcatactggtcccgaaggactacatctggccggtgacggccgataactacctgctgccgtccacgtcgatcgtcaccgaagcgcacgaagcggggctggagatatacgcctctggttttgtgaacgataaggctgtcccctttaactacagctacgatcctctggcggagtacctgaacttcgtcggcgatggtggcttctcggttgatggcgtactgtcggactaccctattactgcatcagaggcaattggttgttttgctaacctgaattcaagtaagactgatcatgttacagggaaacccttagttatctcccacaatggcgctagtggagactacccggactgtacagacctggcctaccacagtgccgttgacgatggcgcagatgtcatcgactgtcctgttcaagtgacaagcgatggagtcctcatgtgcatgagttccattaacctgcttgacaccaccaataatgctgcgttcatagcaaagtcactagggatcgacatggttgactccgtaaccgccgccttaagtgccgccggcttcagtaaccagaccaccaaggaagttctgatccggtcaacagacagcgccgtcctcgtcaaactgaagcagcagaaaacgagatgcaagctcgtgtacaccctccccctaggcatcggggacgcttccaaaccctcgctgaaggacatcaaggcgttcgcggaagccgtagtcgtcgacaggacctccgtcttcgctctgagctacgatttcatcatgggacagaacaggatcgtgcgagacctgcaggcggcggggctggctgtgtacgcgcaggtgttccggaacgagtacgtagcgcacccgtttgatttcttgggggatccgaccgtggagatcaactactatgttcagacgtttaatctgtccggcatgatcactgatttccccaagacagtcagaagatacaaagagaacacctgtacagctctggggaaggatatgcccaagtacatgcggccagttgaggctggctcccttgcagatttcctccggtccttccaaacccagccgccgtctgtggcaccgatgccggcgctgaactcttcaagcgtggaggagccgcctcttccaactgctgcgccgagaaacgtgccgcctggtggtggcgccccagcggacgccgccgggactgctggcggcgctgctccttctgatgcgagttccggcggcgctcctccttctgacgcgcgtcacacggctaccggaagtagcggtatgctgcttgtggtgctggtttccgcggctctgctgatctgattctgagcagacacatgagactgtatagtagacagagccgaagcaaatgcaaatctccgttggattcgatcaagctttgaccagcgatataccatacacttgtttttctcgggtatatatgtttgtatttggccgcatttttcacgtccacatgtgtaaaaaattgtcagtggaaacgttatatgtatcagccggaaattttatccggcgatgatcaaagttctgacaaggattaagcgatcaccacaaactcccaataatatggtgttatgtaactgtgaatgatttactctttattgttatatttatatctccacgctaaaaatctttactacttattaaggctgcaatagtagtctgccaccattccatgttctacaattctcatgtcttgttctgcctttctgattccctcctccccgcgcacagtccatttcccatgttatgccaccattttatatctatcattttcattctccctccccgcaaagctcattcccatttccattcccccgtacagtcgacgtctag

SEQ ID NO: 203835 - DNA, 2921 bp, Zea Mays
cgctgtttgtgcctgagacgcagcgcgtgctcactagctagcgtgtcactgagcgccgggcccgtcctcggtgcgccaccttccctttccgctttccccgcgtttccatttcgtttcagtcagtggctcagtgcgcgactgaaggctgccgcaacaccattaaaccaccaaactgcttctcctccagtctccgcttcccgtgcgccgcgggaacaaggttctggaagcttcggagatggggaggagtagacgccacgaaggaggaggaggaggagaacgacggggtgcgggtgctggaggggtggccgccgccgccttcgccgctctgctgctgggctgcgtcgtcatggccctcgtcggcggcgccgccgcgcagggcccccggctcccctccgactacaaaaccctcagcggcgccgctccgctcgtggtggccagaggcgggttctcaggagcgttcccggactccagcgagggcgcctactccttcggggcgtccgccagcgcgcctggcacggccatgtggtgcgacgtccagctgaccaaggacggcgtcgggctctgcctccgcgacgtcaacatgaagaactgcaccaccgtcgaccagacgtaccccgggaggaagcggacctacgtcatcgacggcgtccacaagaccggctggttcgtcccggacttcaccagcgccgagcttcttcagtccgtgtacctaacacaagcaatctggtctcgcactgagaggatggacggcatataccctatcgtcactgtccctgacgttcagtccatcgtcaacacgtctcctatctggctgaatgtccagcatcccatcttctacaaacaacgcgatctggacatgagcagctacatacactcgatccggaagctggtgcgcatggactacatctcgtcgcctgagatcggcttcctcagaaacatatccgcaagagtccgccgcagaaccaagctcgtgttcagctttctcgacaaaaaactcctggatcactccgtgaaccagacatacggttcgctggcgaggaacctgacgttcgtcaggtccgtcgcgtctggcatactggtcccgaaggactacatctggccggtgacggccgataactacctgctgccgtccacgtcgatcgtcaccgaagcgcacgaagcggggctggagatatacgcctctggttttgtgaacgataaggctgtcccctttaactacagctacgatcctctggcggagtacctgaacttcgtcggcgatggtggcttctcggttgatggcgtactgtcggactaccctattactgcatcagaggcaattggttgttttgctaacctgaattcaagtaagactgatcatgtgcatctttacagttacagggaaacccttagttatctcccacaatggcgctagtggagactacccggactgtacagacctggcctaccacagtgccgttgacgatggcgcagatgtcatcgactgtcctgttcaagtgacaagcgatggagtcctcatgtgcatgagttccattaacctgcttgacaccaccaataatgctgcgttcatagcaaagtcactagggatcgacatggttgactccgtaaccgccgccttaagtgccgccggcttcagtaaccagaccaccaaggaagttctgatccggtcaacagacagcgccgtcctcgtcaaactgaagcagcagaaaacgagatgcaagctcgtgtacaccctccccctaggcatcggggacgcttccaaaccctcgctgaaggacatcaaggcgttcgcggaagccgtagtcgtcgacaggacctccgtcttcgctctgagctacgatttcatcatgggacagaacaggatcgtgcgagacctgcaggcggcggggctggctgtgtacgcgcaggtgttccggaacgagtacgtagcgcacccgtttgatttcttgggggatccgaccgtggagatcaactactatgttcagacgtttaatctgtccggcatgatcactgatttccccaagacagtcagaagatacaaagagaacacctgtacagctctggggaaggatatgcccaagtacatgcggccagttgaggctggctcccttgcagatttcctccggtccttccaaacccagccgccgtctgtggcaccgatgccggcgctgaactcttcaagcgtggaggagccgcctcttccaactgctgcgccgagaaacgtgccgcctggtggtggcgccccagcggacgccgccgggactgctggcggcgctgctccttctgatgcgagttccggcggcgctcctccttctgacgcgcgtcacacggctaccggaagtagcggtatgctgcttgtggtgctggtttccgcggctctgctgatctgattctgagcagacacatgagactgtatagtagacagagccgaagcaaatgcaaatctccgttggattcgatcaagctttgaccagcgatataccatacacttgtttttctcgggtatatatgtttgtatttggccgcatttttcacgtccacatgtgtaaaaaattgtcagtggaaacgttatatgtatcagccggaaattttatccggcgatgatcaaagttctgacaaggattaagcgatcaccacaaactcccaataatatggtgttatgtaactgtgaatgatttactctttattgttatatttatatctccacgctaaaaatctttactacttattaaggctgcaatagtagtctgccaccattccatgttctacaattctcatgtcttgttctgcctttctgattccctcctccccgcgcacagtccatttcccatgttatgccaccattttatatctatcattttcattctccctccccgcaaagctcattcccatttccattcccccgtacagtcgacgtctag

SEQ ID NO: 203836 - DNA, 2794 bp, Zea Mays
caaataattgataacgaaggtatgtttcaaccaaaaggaataaaatcacctgggaaactaagccgcatagaaaggtaatttatagaaaggttattattgtgagtaagatatctagtttcaaaattcaacgacccacgaggccacgcaacgcaattttttccttggtcaccgaatacctctgctgggctttgtctgtgtctcagcatgtccggttcgacgactcgtgccaacggccgaaccaacttagccacaggccacaacacagcccacagcccacattgtggaggcagcggcggagccttcgccggaggaactggggccaccgaggtagttggtggtgggagcctgggagggcttgcaaggggcgaaggaggtcgacgcagtctacaaggtcgtcggggagagggagatcgacgtcctcgcggcccggtgttgccgctgcctggtcgcctcgtcggtagcaccaagcgccacctagttatactataaaaccaaacttgtttgcgcctttggaatgtgcacacccatgggaatttttcttgatggtccactgctgacatgcacagacatctcttctacctctgccaattcaaaggccatgctgttataccagcagtagctgcaacgattcaactagttgtggcaaatttcggcacatccccaacactcgagatatcaagaaagcaaaggtgtgctaaccttcaaaatgcattgagaattttggaccttgtaccatccaagcatcatcatgaccaagaggaagttccgtcacatcaccgccttatcaatggctgtatgggtgacatctcgggagtccaatcaagactgcacactatgcgtaggggtaaagagagctttgctaactcaaactcaaatcaagcacagcctaaacacggtaacattgtctcaaataatacctcggtttgcccctccataactagactcacaaaggaagacatgtttatgcaaattgtggagttacataggaggggacaaatcagttcagatgcatccattttggcatctgcactgagttactgtgctgatgagaaaactcttaccacaggtgtacagttccatgctcaactagtgaaagtaggatatgtctcatctatccccattggcagctcgctgatcagtttttattcacgatgcagccaattggaaattgctcatcggattttccaaaatatgacagcaaaaagtactgtgacatggacagcattaatttctggttatgcccaagataatcaggtcgaaccatgtctccatttatttgcactgatgaggcagtctgtgtgcaagccaaatgacatcacatttgcaactatcttgagtgtctgcactaatcatgcatttcttgtacttggtaaaagtgtgcaagccctacaaatgagaatgggttttggttcctatgtgcatgtgtccaatgcattgatatcaatgtatgcaaaatgcgggagcattggtgaagcacgagctgtatttgagagcattacatgcaaagacctggtctcttggaactccttgatctttggatattcacagcatggccttgctgagcattgcctatacttgctaagagaaatggaaggacatataataccggatgcaatctccttcctaggtgtgctctcatcatgccggcatgcatgccttgtggcagagggccgacgctgcttcagggcaatgattgaacatggagtaataccagagatagatcactactcatgtatggttgatctttttggccgtgcaggactgcttgatgaagcatgggatctgatccagacgatgcccatgcctccaaatggtgtcatatggggctccctgctagcttcctgtaggctgcatgggagcatttcgatcggcatacaagctgcagagcaccgtctaaagctggaaccaagttgtgctgcaactcatgtccagctagcgaatttgtatgggagcattgggtgctgggatgatgtggcaagagtgaggaaagtgatgaaggagagagggctgaaaacaaatatcgggtgcagttggatagaagttggcaataaagtttatacatttacagcagaaaacagatcaaagaaccaggtaaacaatgtcctagttgttctcgattgcttgcagtcacatatggatcacaagtatgatatactgattgagggtctggattgggatgatcctgaacatataaagttgagtttaaacaatatataaatttgaagatcattgcccgccatgttcagcttcatttgaagaggcactcaataggaattgacatgtgtcattcacacctcaaatatcttcaatctcgatgtaacatctaatggtgtaatggaccgggcattgcaacgagcacacaagatatttagtggttctctctcaaacagctattagtgtggcttacttaattttttattgcacacaagaatgcatgctcggctctcctcaccaggcaagaataggcaaagcaagcaaagctacctgtttggttctgttttgtcctatctctcttttcctcttccattgctttggttgaacaccaccaaacagagcaaagcaaatcttgctagctcgggagagcgaatttgactcgcccatgcagatgcaaccaaggaaaaccttcccgtgcaaagccagtttcaactctgctgcgaaacaggtatcccagtggagcgaggcaaaacaggaactggcaagagaaccaagcagccccttagttgttctagatcaacacataaaatcttgtgttagggcaactctaccagattgattaaaaccattcctgtttccc

SEQ ID NO: 203837 - DNA, 2782 bp, Zea Mays
caaataattgataacgaaggtatgtttcaaccaaaaggaataaaatcacctgggaaactaagccgcatagaaaggtaatttatagaaaggttattattgtgagtaagatatctagtttcaaaattcaacgacccacgaggccacgcaacgcaattttttccttggtcaccgaatacctctgctgggctttgtctgtgtctcagcatgtccggttcgacgactcgtgccaacggccgaaccaacttagccacaggccacaacacagcccacagcccacattgtggaggcagcggcggagccttcgccggaggaactggggccaccgaggtagttggtggtgggagcctgggagggcttgcaaggggcgaaggaggtcgacgcagtctacaaggtcgtcggggagagggagatcgacgtcctcgcggcccggtgttgccgctgcctggtcgcctcgtcggtagcaccaagcgccacctagttatactataaaaccaaacttgtttgcgcctttggaatgtgcacacccatgggaatttttcttgatggtccactgctgacatgcacagacatctcttctacctctgccaattcaaaggccatgctgttataccagcagtagctgcaacgattcaactagttgtggcaaatttcggcacatccccaacactcgagatatcaagaaagcaaaggtgtgctaaccttcaaaatgcattgagaattttggaccttgtaccatccaagcatcatcatgaccaagaggaagttccgtcacatcaccgccttatcaatggctgtatgggtgacatctcgggagtccaatcaagactgcacactatgcgtaggggtaaagagagctttgctaactcaaactcaaatcaagcacagcctaaacacggtaacattgtctcaaataatacctcggtttgcccctccataactagactcacaaaggaagacatgtttatgcaaattgtggagttacataggaggggacaaatcagttcagatgcatccattttggcatctgcactgagttactgtgctgatgagaaaactcttaccacaggtgtacagttccatgctcaactagtgaaagtaggatatgtctcatctatccccattggcagctcgctgatcagtttttattcacgatgcagccaattggaaattgctcatcggattttccaaaatatgacagcaaaaagtactgtgacatggacagcattaatttctggttatgcccaagataatcaggtcgaaccatgtctccatttatttgcactgatgaggcagtctgtgtgcaagccaaatgacatcacatttgcaactatcttgagtgtctgcactaatcatgcatttcttgtacttggtaaaagtgtgcaagccctacaaatgagaatgggttttggttcctatgtgcatgtgtccaatgcattgatatcaatgtatgcaaaatgcgggagcattggtgaagcacgagctgtatttgagagcattacatgcaaagacctggtctcttggaactccttgatctttggatattcacagcatggccttgctgagcattgcctatacttgctaagagaaatggaaggacatataataccggatgcaatctccttcctaggtgtgctctcatcatgccggcatgcatgccttgtggcagagggccgacgctgcttcagggcaatgattgaacatggagtaataccagagatagatcactactcatgtatggttgatctttttggccgtgcaggactgcttgatgaagcatgggatctgatccagacgatgcccatgcctccaaatggtgtcatatggggctccctgctagcttcctgtaggctgcatgggagcatttcgatcggcatacaagctgcagagcaccgtctaaagctggaaccaagttgtgctgcaactcatgtccagctagcgaatttgtatgggagcattgggtgctgggatgatgtggcaagagtgaggaaagtgatgaaggagagagggctgaaaacaaatatcgggtgcagttggatagaagttggcaataaagtttatacatttacagcagaaaacagatcaaagaaccaggtaaacaatgtcctagttgttctcgattgcttgcagtcacatatggatcacaagtatgatatactgattgagggtctggattgggatgatcctgaacatataaagttgagtttaaacaatatataaatttgaagatcattgcccgccatgttcagcttcatttgaagaggcactcaataggaattgacatgtgtcattcacacctcaaatatcttcaatctcgatgtaacatttaggagtcttgtttgcataaagtaaagaggaatcgcaccgagggataggcattgtgagtatgacgtgtgctttgcatgggccagcacctgactcagttcctgtgaaatcatgaatccaccaacggaggtcaaatacctgactgcagccagccagaatgtttacagccacacatgatgatcctatagctggctagaagaagaagaaatatttacagccatccagcataaccttagagctggtttgaagaggatgcaaccggtgcagctgcacaaatgaaggacggattggccagtgataaagcttgggcgctgtgtcaaattgctattgctcgtgataattttctcctgtttgcttaggcgatgtggctctcgtatcagctgctttagagaatcgacaagaacgttggtttgtgctcgctgagagagaagtgcctggatgcccactcataagctttttg

SEQ ID NO: 203838 - DNA, 5653 bp, Zea Mays
ccttgctcgccttcgcttccctcctcttctctttcctagactagactagacttggcttgccttggattctcatctcgtctcttctttcttctcgctccaatcggcgcggacgtagcccccgcgcacgctaccgcctaccggagagattccgccgcccgttgggtggattccagcgccgttgagcaacaggactctagcgccgcaccggacaccaaccactagacgctgctgcctccctccgccgtctcggggcaccgaaggaggagcagagagatccatcggaccgctcggcggggtgcggccgccctcgctcctcatccaaattatccaatccactcgattccgattggcaactacccttcaccccgcgcgcgcaaccgctagctcctgccgccaagcgcaaccggacgaccgccgccctccctacgccaggaggtgcccaggtgtaggtccttcgccggcgacgaacacccacaagagcaaccgcaagggcatgtgacaagctgccgcctgcctttgccgcaggcaatgtgctccgacatgtcgggtcagcgccaccaccacgcaaccagggagaatgcaccggaagataatggttaccatcgcactccccatggtgcggatcatctcgagcagagccaggctgcagatacagataataagcatataaatcatctgtccacagatgacaatgttccctccagtgcttcaggccacaaacatggtgctatcagccgccatccatctacatcttctgttgatgatcgctccatcaagtccggtgatgattctgatggggccgagagtaccagtggcagaagcagtaatacagagatctcatttatgaataatgataccatctggataccacctcaagcggcagataaggaggatgaggcccagagttttgctacgagcattgcttatgacgacgacgatgacgattatagtgatggtataaagtggggccagtcaagtttcccatcccctggtaagcagcatgacgccgacactagcaatcatagggaggaacgagaaaaggcaatgctagaagctatgaatggccagctgaaggtacttgtcagtcggtttctcgcatctgctggcattccatcttccaacgaagagggtagcgatagctggcttgatattgtcacctccctgtcatgggaagcagcactacttatcaaacctgatggtagcatgggaaaggaaatggaccctggctcttacatcaaagtcaaatgcgtagcatctggtactcgccggcaaagtgaggtgatcaaggggttagtcttcaagaagaacactgctcataagcacatgccgacaaattgccacaatcctaggcttctacttctcaaaggagttcttgggcattctgatattggtttgtcatcatttagttcaatggatcaggaaaaggacctgttggagagagctattggtaaaatgatggagatatgcagtcccaatgttgttctggtcgagaaaactgtttcacgaaacattcaagaacttcttctgaaagaaggtgtcactctaattctcgatatgaaactcaaccggctacaaagaattgcacgctgtacaggctctcccataatttcgttttcagaagttttggataaaccaaagctgaagcaatgtgactactttcatatcgaaaaatttatcgaggagcacaacaacgccagtgagggtggaaagatgccatctaaaacattaatgttcttggaaggctttccacgtccactcggttgcacgatactgctaaaaggagcaaacagtgaagaattgaagaaagtcaaacaagtaatgcattttacggtctttgcagcatatcacttgatccttgaaacatctttctttgaagatcaaagggtttttctaaatgataaaagtacccccaaagaaatttctgttactgctacagaaggggcatcaccaactgcttatgatgttgctgctcttagtggtgctatccctagctttccttcacatggtgaccctccagcacttagactattccatgccacttctaatagctatgctgatgtgaacaaacctttgacatatccagaaaatggggatgcattcagttcagtatccagcagctctgcaaatgaccttgaacaaggtacaagtatcaggcccaataatgctgagaggttaacatcactagtccaagggccactaagaaaactgttcactgacatgttacgtcaccagaatatttacttacctgttacatcattgcaagaggcaaatgatattagtaaggaagtcagggctgaatcaagtcaagaaactgttattaatggtttccataggccagagatagaagagtctgtggtttcaattgaaaatggagattccataaatgatgcccagaaacaagaaattgctcaagcaataatgccaagaggttcttctgcaaatgataaagatgcagaatcgtctgttatgggagacaatggggcacatagtacaagtatcattatcaaagagaaatatgtcgatgatgatcaagctgatgatgcacttgattctcacagcatactgattttgatgtctagccagtgcccggaaaagcaggttatctgtgagcaaagtcatttaacccgtataaaatactacgggagttttgatgtgtccttgggcagatatttgcaagatattctgcagaatcagaaactgagttgctcctcatgtggagagcctccagagtcgcacatgtactcttacacgcaccgcaatggaaatttgaccgttctagtgaaacatctggtgccccaacaccatttgcctggtgaatctgaaggaaaagtatggatgtggactaggtgctcaagatgtgatcatgaacatggggtatccaaaccaactccaagagtactaatatcagctgaagcgcgtaacctctcgtttgggaaattcctggaactcagtttttcgagccactctgcagcaagaaggctgggctctaaagttgctatgtttcggtactcatctgttgagatctacactacctgcaaaccacaacctactctccagttcgtcaaccccatcagacaggattggtttgaaggacaaaggaggaatgttcatgctaaaggtatggcgcttttctctggggttgcaagatttctacagaacttgaagaatgaacatcctgatgcaataacgttagcaatccattgtggccttgcattccctgttaaggacttcactgaactagaagagttgttgataaaagaaaaggcccagtttgagagttctgtggacaaggccactgatcaaaatggggtaccaacctcttctgtgcatgaactgttgaatataaattggtactatcaggaccttctacttgagctttacatttgggaccgccgtctacatcaattattctattgtaaatctgtcaaactagaaagtgtttctaattacaagaatcttgctgatactgttgatgggatctgtggtgataaattcggtgttgataagaaaattgatgaatttacatatgatgaaactacggcagctttgggggtagccagtaccacagaacctgcaagtaacaaacttgaccatcaatcaggggatgctgcagcatccttacttgatgaaagccaggaagctgggcactcagaaattccttgcaatggaggtagtaaagctgagaaatcttccattgctcatggtcaaataaaggtagatggcacaacaaaaaccggaaatgatccttgcttcgaaatatccaatgataagaaggtccaggtcaatcttacagtagcagatccaatatctatggaacaggagcgttgtagcactctccaacagttcaaatatccttattgggatgacagggaaaggtggatttggaattcaatttctgagtcacaattggcttacaggaatgacattcaaattggatatttggaaaaattcgaactcattaacaattatttgccacattaccttcctcccttgtttgaacaacatgatgatgcggactctccgcatttcgcggtaggtcctggtggtaatattctgtgcataatggaagatgagatatccagcataatagctcgtgctcttgccatatctgacgaacgccgccatttgatagatttaaaatttgagaatggaatggattactccaagggagagcatgctaaagcaatggagaaatcctatagttttctgtctgaaaattctttcacctcatcaccatggtcatctacagattctgaagcaagcttgtcatctctgtcttcattttcatcattttcatctgatgacttttctggttatgatagctcttctttattgtcctcgatgcatccagaaatgactgtgaacgggaaaataactctgaaaggcaaatattcagtcactgttgtatatgacaatcaattctttgcactccgaaaaaagtgttgcccatccgagcttgcatatattacttccttaagccgctgcaagaagtggaatgctcaaggtggaaagagcaaggcctattttgcaaagacaacagatgacaggttcatcataaagcaaatcaagaaaacagagttcgattcatttattaaatttgcacctgattactttaggcatgtttaccattctctggacactggaagccaaacttgccttgccaagatattaggaatatatcaggttaagcagattagacatggcaaagaggtaaagatcgacttgatggtgatggaaaatcttctctttggccacaatatttcacgaatttatgatctcaaaggtgttactttttcgcgacgcgtcactgactcaaatgatcatgatactgtttacctggaccaaaattatgttgaggacatgggtttttctccaatctatattggtggaagaacaaagcatcttttgcagcgtgcaatatggaatgacacgtctttcctcacttcggtgaatgtcatggactattctctacttgtcggagtggacaaagagaagcatgaacttgtgtttggcatcattgattatctgaggcaatatacttgggacaaacaattggaaacatgggtgaagacttctctggtagtacccaagaatgtttcaccaactgtaatttcccccaaggaatacaaaaaaaggtttaggaagttcatggcaaagtacttcctgtcagttccagacacatggagctctgataattcatctaatccatgcaaatcctttggtcagagcaatcacaagttagcggaagtccacaatggtgatagcctgcttcagcacccaaatgaagctgaggggtgtgtctaatcacgtgcaggacttcctggcattttttaagcctatcccattgttgtttggcttttcactttgtaaaatggtgtacattggaggacctcactgttgatctatccaaaagtttgtgtttttaggcaaattgttggacaagtggggtccacaggacatgtacctatacaaatgttcattgttaatttcacaattattatagtgaaattaagaatttgtatgatcattttttggacctatcacttgtgtgactgaagctgtctattcttcacttatgactaactgtccaagatagacatttcctacctctattgaaattaggtcaatttgagtattatgttgtactgtatac

SEQ ID NO: 203839 - DNA, 5572 bp, Zea Mays
ccttgctcgccttcgcttccctcctcttctctttcctagactagactagacttggcttgccttggattctcatctcgtctcttctttcttctcgctccaatcggcgcggacgtagcccccgcgcacgctaccgcctaccggagagattccgccgcccgttgggtggattccagcgccgttgagcaacaggactctagcgccgcaccggacaccaaccactagacgctgctgcctccctccgccgtctcggggcaccgaaggaggagcagagagatccatcggaccgctcggcggggtgcggccgccctcgctcctcatccaaattatccaatccactcgattccgattggcaactacccttcaccccgcgcgcgcaaccgctagctcctgccgccaagcgcaaccggacgaccgccgccctccctacgccaggaggtgcccaggtgtaggtccttcgccggcgacgaacacccacaagagcaaccgcaagggcatgtgacaagctgccgcctgcctttgccgcaggcaatgtgctccgacatgtcgggtcagcgccaccaccacgcaaccagcagggagaatgcaccggaagataatggttaccatcgcactccccatggtgcggatcatctcgagcagagccaggctgcagatacagataataagcatataaatcatctgtccacagatgacaatgttccctccagtgcttcaggccacaaacatggtgctatcagccgccatccatctacatcttctgttgatgatcgctccatcaagtccggtgatgattctgatggggccgagagtaccagtggcagaagcagtaatacagagatctcatttatgaataatgataccatctggataccacctcaagcggcagataaggaggatgaggcccagagttttgctacgagcattgcttatgacgacgacgatgacgattatagtgatggtataaagtggggccagtcaagtttcccatcccctggtaagcagcatgacgccgacactagcaatcatagggaggaacgagaaaaggcaatgctagaagctatgaatggccagctgaaggtacttgtcagtcggtttctcgcatctgctggcattccatcttccaacgaagagggtagcgatagctggcttgatattgtcacctccctgtcatgggaagcagcactacttatcaaacctgatggtagcatgggaaaggaaatggaccctggctcttacatcaaagtcaaatgcgtagcatctggtactcgccggcaaagtgaggtgatcaaggggttagtcttcaagaagaacactgctcataagcacatgccgacaaattgccacaatcctaggcttctacttctcaaaggagttcttgggcattctgatattggtttgtcatcatttagttcaatggatcaggaaaaggacctgttggagagagctattggtaaaatgatggagatatgcagtcccaatgttgttctggtcgagaaaactgtttcacgaaacattcaagaacttcttctgaaagaagaagttttggataaaccaaagctgaagcaatgtgactactttcatatcgaaaaatttatcgaggagcacaacaacgccagtgagggtggaaagatgccatctaaaacattaatgttcttggaaggctttccacgtccactcggttgcacgatactgctaaaaggagcaaacagtgaagaattgaagaaagtcaaacaagtaatgcattttacggtctttgcagcatatcacttgatccttgaaacatctttctttgaagatcaaagggtttttctaaatgataaaagtacccccaaagaaatttctgttactgctacagaaggggcatcaccaactgcttatgatgttgctgctcttagtggtgctatccctagctttccttcacatggtgaccctccagcacttagactattccatgccacttctaatagctatgctgatgtgaacaaacctttgacatatccagaaaatggggatgcattcagttcagtatccagcagctctgcaaatgaccttgaacaaggtacaagtatcaggcccaataatgctgagaggttaacatcactagtccaagggccactaagaaaactgttcactgacatgttacgtcaccagaatatttacttacctgttacatcattgcaagaggcaaatgatattagtaaggaagtcagggctgaatcaagtcaagaaactgttattaatggtttccataggccagagatagaagagtctgtggtttcaattgaaaatggagattccataaatgatgcccagaaacaagaaattgctcaagcaataatgccaagaggttcttctgcaaatgataaagatgcagaatcgtctgttatgggagacaatggggcacatagtacaagtatcattatcaaagagaaatatgtcgatgatgatcaagctgatgatgcacttgattctcacagcatactgattttgatgtctagccagtgcccggaaaagcaggttatctgtgagcaaagtcatttaacccgtataaaatactacgggagttttgatgtgtccttgggcagatatttgcaagatattctgcagaatcagaaactgagttgctcctcatgtggagagcctccagagtcgcacatgtactcttacacgcaccgcaatggaaatttgaccgttctagtgaaacatctggtgccccaacaccatttgcctggtgaatctgaaggaaaagtatggatgtggactaggtgctcaagatgtgatcatgaacatggggtatccaaaccaactccaagagtactaatatcagctgaagcgcgtaacctctcgtttgggaaattcctggaactcagtttttcgagccactctgcagcaagaaggctgggctctaaagttgctatgtttcggtactcatctgttgagatctacactacctgcaaaccacaacctactctccagttcgtcaaccccatcagacaggattggtttgaaggacaaaggaggaatgttcatgctaaaggtatggcgcttttctctggggttgcaagatttctacagaacttgaagaatgaacatcctgatgcaataacgttagcaatccattgtggccttgcattccctgttaaggacttcactgaactagaagagttgttgataaaagaaaaggcccagtttgagagttctgtggacaaggccactgatcaaaatggggtaccaacctcttctgtgcatgaactgttgaatataaattggtactatcaggaccttctacttgagctttacatttgggaccgccgtctacatcaattattctattgtaaatctgtcaaactagaaagtgtttctaattacaagaatcttgctgatactgttgatgggatctgtggtgataaattcggtgttgataagaaaattgatgaatttacatatgatgaaactacggcagctttgggggtagccagtaccacagaacctgcaagtaacaaacttgaccatcaatcaggggatgctgcagcatccttacttgatgaaagccaggaagctgggcactcagaaattccttgcaatggaggtagtaaagctgagaaatcttccattgctcatggtcaaataaaggtagatggcacaacaaaaaccggaaatgatccttgcttcgaaatatccaatgataagaaggtccaggtcaatcttacagtagcagatccaatatctatggaacaggagcgttgtagcactctccaacagttcaaatatccttattgggatgacagggaaaggtggatttggaattcaatttctgagtcacaattggcttacaggaatgacattcaaattggatatttggaaaaattcgaactcattaacaattatttgccacattaccttcctcccttgtttgaacaacatgatgatgcggactctccgcatttcgcggtaggtcctggtggtaatattctgtgcataatggaagatgagatatccagcataatagctcgtgctcttgccatatctgacgaacgccgccatttgatagatttaaaatttgagaatggaatggattactccaagggagagcatgctaaagcaatggagaaatcctatagttttctgtctgaaaattctttcacctcatcaccatggtcatctacagattctgaagcaagcttgtcatctctgtcttcattttcatcattttcatctgatgacttttctggttatgatagctcttctttattgtcctcgatgcatccagaaatgactgtgaacgggaaaataactctgaaaggcaaatattcagtcactgttgtatatgacaatcaattctttgcactccgaaaaaagtgttgcccatccgagcttgcatatattacttccttaagccgctgcaagaagtggaatgctcaaggtggaaagagcaaggcctattttgcaaagacaacagatgacaggttcatcataaagcaaatcaagaaaacagagttcgattcatttattaaatttgcacctgattactttaggcatgtttaccattctctggacactggaagccaaacttgccttgccaagatattaggaatatatcaggttaagcagattagacatggcaaagaggtaaagatcgacttgatggtgatggaaaatcttctctttggccacaatatttcacgaatttatgatctcaaaggtgttactttttcgcgacgcgtcactgactcaaatgatcatgatactgtttacctggaccaaaattatgttgaggacatgggtttttctccaatctatattggtggaagaacaaagcatcttttgcagcgtgcaatatggaatgacacgtctttcctcacttcggtgaatgtcatggactattctctacttgtcggagtggacaaagagaagcatgaacttgtgtttggcatcattgattatctgaggcaatatacttgggacaaacaattggaaacatgggtgaagacttctctggtagtacccaagaatgtttcaccaactgtaatttcccccaaggaatacaaaaaaaggtttaggaagttcatggcaaagtacttcctgtcagttccagacacatggagctctgataattcatctaatccatgcaaatcctttggtcagagcaatcacaagttagcggaagtccacaatggtgatagcctgcttcagcacccaaatgaagctgaggggtgtgtctaatcacgtgcaggacttcctggcattttttaagcctatcccattgttgtttggcttttcactttgtaaaatggtgtacattggaggacctcactgttgatctatccaaaagtttgtgtttttaggcaaattgttggacaagtggggtccacaggacatgtacctatacaaatgttcattgttaatttcacaattattatagtgaaattaagaatttgtatgatcattttttggacctatcacttgtgtgactgaagctgtctattcttcacttatgactaactgtccaagatagacatttcctacctctattgaaattaggtcaatttgagtattatgttgtactgtatac

SEQ ID NO: 203840 - DNA, 5707 bp, Zea Mays
ccttgctcgccttcgcttccctcctcttctctttcctagactagactagacttggcttgccttggattctcatctcgtctcttctttcttctcgctccaatcggcgcggacgtagcccccgcgcacgctaccgcctaccggagagattccgccgcccgttgggtggattccagcgccgttgagcaacaggactctagcgccgcaccggacaccaaccactagacgctgctgcctccctccgccgtctcggggcaccgaaggaggagcagagagatccatcggaccgctcggcggggtgcggccgccctcgctcctcatccaaattatccaatccactcgattccgattggcaactacccttcaccccgcgcgcgcaaccgctagctcctgccgccaagcgcaaccggacgaccgccgccctccctacgccaggaggtgcccaggtgtaggtccttcgccggcgacgaacacccacaagagcaaccgcaagggcatgtgacaagctgccgcctgcctttgccgcaggcaatgtgctccgacatgtcgggtcagcgccaccaccacgcaaccagcagggagaatgcaccggaagataatggttaccatcgcactccccatggtgcggatcatctcgagcagagccaggctgcagatacagataataagcatataaatcatctgtccacagatgacaatgttccctccagtgcttcaggccacaaacatggtgctatcagccgccatccatctacatcttctgttgatgatcgctccatcaagtccggtgatgattctgatggggccgagagtaccagtggcagaagcagtaatacagagatctcatttatgaataatgataccatctggataccacctcaagcggcagataaggaggatgaggcccagagttttgctacgagcattgcttatgacgacgacgatgacgattatagtgatggtataaagtggggccagtcaagtttcccatcccctggtaagcagcatgacgccgacactagcaatcatagggaggaacgagaaaaggcaatgctagaagctatgaatggccagctgaaggtacttgtcagtcggtttctcgcatctgctggcattccatcttccaacgaagagggtagcgatagctggcttgatattgtcacctccctgtcatgggaagcagcactacttatcaaacctgatggtagcatgggaaaggaaatggaccctggctcttacatcaaagtcaaatgcgtagcatctggtactcgccggcaaagtgaggtgatcaaggggttagtcttcaagaagaacactgctcataagcacatgccgacaaattgccacaatcctaggcttctacttctcaaaggagttcttgggcattctgatattggtttgtcatcatttagttcaatggatcaggaaaaggacctgttggagagagctattggtaaaatgatggagatatgcagtcccaatgttgttctggtcgagaaaactgtttcacgaaacattcaagaacttcttctgaaagaaggtgtcactctaattctcgatatgaaactcaaccggctacaaagaattgcacgctgtacaggctctcccataatttcgttttcagaagttttggataaaccaaagctgaagcaatgtgactactttcatatcgaaaaatttatcgaggagcacaacaacgccagtgagggtggaaagatgccatctaaaacattaatgttcttggaaggctttccacgtccactcggttgcacgatactgctaaaaggagcaaacagtgaagaattgaagaaagtcaaacaagtaatgcattttacggtctttgcagcatatcacttgatccttgaaacatctttctttgaagatcaaagggtttttctaaatgataaaagtacccccaaagaaatttctgttactgctacagaaggggcatcaccaactgcttatgatgttgctgctcttagtggtgctatccctagctttccttcacatggtgaccctccagcacttagactattccatgccacttctaatagctatgctgatgtgaacaaacctttgacatatccagaaaatggggatgcattcagttcagtatccagcagctctgcaaatgaccttgaacaaggtacaagtatcaggcccaataatgctgagaggttaacatcactagtccaagggccactaagaaaactgttcactgacatgttacgtcaccagaatatttacttacctgttacatcattgcaagaggcaaatgatattagtaaggaagtcagggctgaatcaagtcaagaaactgttattaatggtttccataggccagagatagaagagtctgtggtttcaattgaaaatggagattccataaatgatgcccagaaacaagaaattgctcaagcaataatgccaagaggttcttctgcaaatgataaagatgcagaatcgtctgttatgggagacaatggggcacatagtacaagtatcattatcaaagagaaatatgtcgatgatgatcaagctgatgatgcacttgattctcacagcatactgattttgatgtctagccagtgcccggaaaagcaggttatctgtgagcaaagtcatttaacccgtataaaatactacgggagttttgatgtgtccttgggcagatatttgcaagatattctgcagaatcagaaactgagttgctcctcatgtggagagcctccagagtcgcacatgtactcttacacgcaccgcaatggaaatttgaccgttctagtgaaacatctggtgccccaacaccatttgcctggtgaatctgaaggaaaagtatggatgtggactaggtgctcaagatgtgatcatgaacatggggtatccaaaccaactccaagagtactaatatcagctgaagcgcgtaacctctcgtttgggaaattcctggaactcagtttttcgagccactctgcagcaagaaggttatctatatgtggacatctggtcaacagggattgcttgcgtttttttgggctgggctctaaagttgctatgtttcggtactcatctgttgagatctacactacctgcaaaccacaacctactctccagttcgtcaaccccatcagacaggattggtttgaaggacaaaggaggaatgttcatgctaaaggtatggcgcttttctctggggttgcaagatttctacagaacttgaagaatgaacatcctgatgcaataacgttagcaatccattgtggccttgcattccctgttaaggacttcactgaactagaagagttgttgataaaagaaaaggcccagtttgagagttctgtggacaaggccactgatcaaaatggggtaccaacctcttctgtgcatgaactgttgaatataaattggtactatcaggaccttctacttgagctttacatttgggaccgccgtctacatcaattattctattgtaaatctgtcaaactagaaagtgtttctaattacaagaatcttgctgatactgttgatgggatctgtggtgataaattcggtgttgataagaaaattgatgaatttacatatgatgaaactacggcagctttgggggtagccagtaccacagaacctgcaagtaacaaacttgaccatcaatcaggggatgctgcagcatccttacttgatgaaagccaggaagctgggcactcagaaattccttgcaatggaggtagtaaagctgagaaatcttccattgctcatggtcaaataaaggtagatggcacaacaaaaaccggaaatgatccttgcttcgaaatatccaatgataagaaggtccaggtcaatcttacagtagcagatccaatatctatggaacaggagcgttgtagcactctccaacagttcaaatatccttattgggatgacagggaaaggtggatttggaattcaatttctgagtcacaattggcttacaggaatgacattcaaattggatatttggaaaaattcgaactcattaacaattatttgccacattaccttcctcccttgtttgaacaacatgatgatgcggactctccgcatttcgcggtaggtcctggtggtaatattctgtgcataatggaagatgagatatccagcataatagctcgtgctcttgccatatctgacgaacgccgccatttgatagatttaaaatttgagaatggaatggattactccaagggagagcatgctaaagcaatggagaaatcctatagttttctgtctgaaaattctttcacctcatcaccatggtcatctacagattctgaagcaagcttgtcatctctgtcttcattttcatcattttcatctgatgacttttctggttatgatagctcttctttattgtcctcgatgcatccagaaatgactgtgaacgggaaaataactctgaaaggcaaatattcagtcactgttgtatatgacaatcaattctttgcactccgaaaaaagtgttgcccatccgagcttgcatatattacttccttaagccgctgcaagaagtggaatgctcaaggtggaaagagcaaggcctattttgcaaagacaacagatgacaggttcatcataaagcaaatcaagaaaacagagttcgattcatttattaaatttgcacctgattactttaggcatgtttaccattctctggacactggaagccaaacttgccttgccaagatattaggaatatatcaggttaagcagattagacatggcaaagaggtaaagatcgacttgatggtgatggaaaatcttctctttggccacaatatttcacgaatttatgatctcaaaggtgttactttttcgcgacgcgtcactgactcaaatgatcatgatactgtttacctggaccaaaattatgttgaggacatgggtttttctccaatctatattggtggaagaacaaagcatcttttgcagcgtgcaatatggaatgacacgtctttcctcacttcggtgaatgtcatggactattctctacttgtcggagtggacaaagagaagcatgaacttgtgtttggcatcattgattatctgaggcaatatacttgggacaaacaattggaaacatgggtgaagacttctctggtagtacccaagaatgtttcaccaactgtaatttcccccaaggaatacaaaaaaaggtttaggaagttcatggcaaagtacttcctgtcagttccagacacatggagctctgataattcatctaatccatgcaaatcctttggtcagagcaatcacaagttagcggaagtccacaatggtgatagcctgcttcagcacccaaatgaagctgaggggtgtgtctaatcacgtgcaggacttcctggcattttttaagcctatcccattgttgtttggcttttcactttgtaaaatggtgtacattggaggacctcactgttgatctatccaaaagtttgtgtttttaggcaaattgttggacaagtggggtccacaggacatgtacctatacaaatgttcattgttaatttcacaattattatagtgaaattaagaatttgtatgatcattttttggacctatcacttgtgtgactgaagctgtctattcttcacttatgactaactgtccaagatagacatttcctacctctattgaaattaggtcaatttgagtattatgttgtactgtatac

SEQ ID NO: 203841 - DNA, 2908 bp, Zea Mays
caatcctaggcttctacttctcaaaggagttcttgggcattctgatattggtttgtcatcatttagttcaatggatcaggaaaagtatggatgtggactaggtgctcaagatgtgatcatgaacatggggtatccaaaccaactccaagagtactaatatcagctgaagcgcgtaacctctcgtttgggaaattcctggaactcagtttttcgagccactctgcagcaagaaggctgggctctaaagttgctatgtttcggtactcatctgttgagatctacactacctgcaaaccacaacctactctccagttcgtcaaccccatcagacaggattggtttgaaggacaaaggaggaatgttcatgctaaaggtatggcgcttttctctggggttgcaagatttctacagaacttgaagaatgaacatcctgatgcaataacgttagcaatccattgtggccttgcattccctgttaaggacttcactgaactagaagagttgttgataaaagaaaaggcccagtttgagagttctgtggacaaggccactgatcaaaatggggtaccaacctcttctgtgcatgaactgttgaatataaattggtactatcaggaccttctacttgagctttacatttgggaccgccgtctacatcaattattctattgtaaatctgtcaaactagaaagtgtttctaattacaagaatcttgctgatactgttgatgggatctgtggtgataaattcggtgttgataagaaaattgatgaatttacatatgatgaaactacggcagctttgggggtagccagtaccacagaacctgcaagtaacaaacttgaccatcaatcaggggatgctgcagcatccttacttgatgaaagccaggaagctgggcactcagaaattccttgcaatggaggtagtaaagctgagaaatcttccattgctcatggtcaaataaaggtagatggcacaacaaaaaccggaaatgatccttgcttcgaaatatccaatgataagaaggtccaggtcaatcttacagtagcagatccaatatctatggaacaggagcgttgtagcactctccaacagttcaaatatccttattgggatgacagggaaaggtggatttggaattcaatttctgagtcacaattggcttacaggaatgacattcaaattggatatttggaaaaattcgaactcattaacaattatttgccacattaccttcctcccttgtttgaacaacatgatgatgcggactctccgcatttcgcggtaggtcctggtggtaatattctgtgcataatggaagatgagatatccagcataatagctcgtgctcttgccatatctgacgaacgccgccatttgatagatttaaaatttgagaatggaatggattactccaagggagagcatgctaaagcaatggagaaatcctatagttttctgtctgaaaattctttcacctcatcaccatggtcatctacagattctgaagcaagcttgtcatctctgtcttcattttcatcattttcatctgatgacttttctggttatgatagctcttctttattgtcctcgatgcatccagaaatgactgtgaacgggaaaataactctgaaaggcaaatattcagtcactgttgtatatgacaatcaattctttgcactccgaaaaaagtgttgcccatccgagcttgcatatattacttccttaagccgctgcaagaagtggaatgctcaaggtggaaagagcaaggcctattttgcaaagacaacagatgacaggttcatcataaagcaaatcaagaaaacagagttcgattcatttattaaatttgcacctgattactttaggcatgtttaccattctctggacactggaagccaaacttgccttgccaagatattaggaatatatcaggttaagcagattagacatggcaaagaggtaaagatcgacttgatggtgatggaaaatcttctctttggccacaatatttcacgaatttatgatctcaaaggtgttactttttcgcgacgcgtcactgactcaaatgatcatgatactgtttacctggaccaaaattatgttgaggacatgggtttttctccaatctatattggtggaagaacaaagcatcttttgcagcgtgcaatatggaatgacacgtctttcctcacttcggtgaatgtcatggactattctctacttgtcggagtggacaaagagaagcatgaacttgtgtttggcatcattgattatctgaggcaatatacttgggacaaacaattggaaacatgggtgaagacttctctggtagtacccaagaatgtttcaccaactgtaatttcccccaaggaatacaaaaaaaggtttaggaagttcatggcaaagtacttcctgtcagttccagacacatggagctctgataattcatctaatccatgcaaatcctttggtcagagcaatcacaagttagcggaagtccacaatggtgatagcctgcttcagcacccaaatgaagctgaggggtgtgtctaatcacgtgcaggacttcctggcattttttaagcctatcccattgttgtttggcttttcactttgtaaaatggtgtacattggaggacctcactgttgatctatccaaaagtttgtgtttttaggcaaattgttggacaagtggggtccacaggacatgtacctatacaaatgttcattgttaatttcacaattattatagtgaaattaagaatttgtatgatcattttttggacctatcacttgtgtgactgaagctgtctattcttcacttatgactaactgtccaagatagacatttcctacctctattgaaattaggtcaatttgagtattatgttgtactgtatac

SEQ ID NO: 203842 - DNA, 1486 bp, Zea Mays
gcagcagccacttgctcttcacctcttctctcttccactcatctcctctcctcatcgcctcctctcctcttgcggcacaataatatatatactgccacccatacggatccaattctctccgcctctactgtagccacggcccttggttcccctccattattcgacctcacctcaccttgccaccagccatggctgccgtgaccgccgcggccatctctctgtcctcctcctccgcctcctcccctgcggctgctgccaaggccaaggcggcgtccccgtcgtcgtcgccatgcaggcacctccagttcctgtcggcagcgagcccgcggcggcggtggcgggccggcgcccgcgcggtacgggcgcaggtgtccaccaccgagaccgcggcggcggggccggcgaagacgtccaagaagcaggacgaggggctggtcaccaacaagtacaagcccaaggagccgtacgtcgggaggtgcctgtccaacaccaggatcaccggcgacgacgcgccgggggagacgtggcacatggtcttcagcaccgaaggcgagatcccgtatagagaggggcagtccatcggcatcatcgctgatggcgaagacaagaacggcaagccgcacaagctcaggctatactccatcgccagcagcgccctcggagatttcggcgactccaagacggtatcgctttgcgtgaagaggctagtctacaccaacgatcagggggagattgtcaaaggagtctgctcaaacttcctgtgtgacttgaaacctggcgccgatgtgaagatcacagggccagtgggcaaggagatgctcatgcccaaagaccccaatgcaacagtcatcatgctcgcaacggggaccggtattgctccgttccgctccttcttgtggaagatgttcctggaggagcacgaggactacaagttcagcggccttgcgtggctgttcttgggagtcccgacgagcgacagcctgctgtacaaggaggagctggagaagatgaaggagatggcgccggacaacttccggctggacttcgcggtgagccgggagcagacgaacgcggcgggggagaagatgtacatccagacgcgcatggcggagtacagggaggagctgtgggagctgctgaagaaggacaacacctacgtctacatgtgcgggctcaagggcatggagaagggcatcgacgacatcatgctcaaccttgcagccaaggacgggatcgactggatgcagtacaagaagcagctcaagaagggcgagcaatggaacgtcgaggtctactgatccatccttccgttgacgactgcggagatcaatcaaatcgttggctcgtcgccgcgcccgagtctgtcagactcaggtctctatctaccgatgtacatataccttacgatgatgaaagacattctctatctatcaatgtacatacatacatacataacttaatttcacacggattgcatcgaaaataa

SEQ ID NO: 203843 - DNA, 1529 bp, Zea Mays
cccatctatactcgagcgtgaggactgaggacaaaagcaccgctcccacttacacatgggccccgccaattatgaacatacagacttccccgctttcccatccctgcggcccttatccccagcccaaaatggacgccaccaccgccgtggctgcgaggcgcctcctcctcctcccgctccgcgcccagccgccagcaccgcggggcgcagcgccggccacggcgaacccctggtgtcgatccgttccgcggagacgacgagtccgtgccgccccggcgcgcgcgtcgctggaccgcgccgcggtcctcctcgacaccgcggccgcggtggccaacggcgggacaggttactcgcaggcgagctactacacgtctctgggactcttcgttctctccgttccggggctgtggtccctcatcaagcgctccgtcaagtccaagattgtgcaaaagacatttgtcaaagacgaagggcagtcgatggcgccaaatcaggtggctggagagatcctgtcgttcttcactcgcaataacttcaccgtctcagaccgcggggaggtcatcacattcgagggcacaatgataccaaacagaggccaggcggcgctgctaaccttctgcacctgcattagcctcgggagtgtcgggcttgttctatcaatcgctgtcccagaaggtggcaacaactggttctggctcatgaccctgagccccttggcgggagcgtactactggacgaaagcgtcaaggaaagaagagatcaaggtcaagatgatcctatccgatgacgggaacgtgtccgagatccttgtgcagggcgatgacgtccaggttgagcagatgaggaaggacctcaagttcagcgagaaggggatggtctatgtgaagggcatctttgagacatgactgggagtttcatactctatctgtgagtgaacaatcgagtggagacgagtctttgctgcaacggaaactgcgtaagcgtaacccaggtgaggaaatgcaaattggacgggcaaatctgtaccttggcttaaaggaaaaaaagaagtgatcttcatacgggatttgattattgagagaaagaagtaactggaagtctgaccactgcacattggagttccaattggacaccagccgatcactcaaggggtctgcggcgagcggacgacgagttcgcggttggcggacggacgctgcaccgtcacaggcaacacaactaagatgggatcggcagtggtggacttccctaggggcgagctgcggcaacgacctccttagggcgtgagcgacgacgtgtttttatgctaccctgtatacatatttatgccaacgtcaatagatgtttacgacatatatttcagtcaatggttacccttacatctattgtctgtttatgatatttctattcacattttatgcaaacgtttatagatttgtatgtattatctcgttacctagcccattgtgtatatggggtttctaacatttacattagctcggtatttatgatcaaaactgagaggtttt

SEQ ID NO: 203844 - DNA, 932 bp, Zea Mays
cagacttccccgctttcccatccctgcggcccttatccccagcccaaaatggacgccaccaccgccgtggctgcgaggcgcctcctcctcctcccgctccgcgcccagccgccagcaccgcggggcgcagcgccggccacggcgaacccctggtgtcgatccgttccgcggagacgacgagtccgtgccgccccggcgcgcgcgtcgctggaccgcgccgcggtcctcctcgacaccgcggccgcggtggccaacggcgggacaggttactcgcaggcgagctactacacgtctctgggactcttcgttctctccgttccggggctgtggtccctcatcaagcgctccgtcaagtccaagattgtgcaaaagacatttgtcaaagacgaagggcagtcgatggcgccaaatcaggtggctggagagatcctgtcgttcttcactcgcaataacttcaccgtctcagaccgcggggaggtcatcacattcgagggcacaatgataccaaacagaggccaggcggcgctgctaaccttctgcacctgcattagcctcgggagtgtcgggcttgttctatcaatcgctgtcccagaaggtggcaacaactggttctggctcatgaccctgagccccttggcgggagcgtactactggacgaaagcgtcaaggaaagaagagatcaaggtcaagatgatcctatccgatgacgggaacgtgtccgagatccttgtgcagggcgatgacgtccaggttgagcagatgaggaaggacctcaagttcagcgagaaggggatggtctatgtgaagggcatctttgagacatgactgggagtttcatactctatctgtgagtgaacaatcgagtggagacgagtctttgctgcaacggaaactgcgtaagcgtaacccagggataggcgcgggggtggagg

SEQ ID NO: 203845 - DNA, 1471 bp, Zea Mays
cccgctttcccatccctgcggcccttatccccagcccaaaatggacgccaccaccgccgtggctgcgaggcgcctcctcctcctcccgctccgcgcccagccgccagcaccgcggggcgcagcgccggccacggcgaacccctggtgtcgatccgttccgcggagacgacgagtccgtgccgccccggcgcgcgcgtcgctggaccgcgccgcggtcctcctcgacaccgcggccgcggtggccaacggcgggacaggttactcgcaggcgagctactacacgtctctgggactcttcgttctctccgttccggggctgtggtccctcatcaagcgctccgtcaagtccaagattgtgcaaaagacatttgtcaaagacgaagggcagtcgatggcgccaaatcaggtggctggagagatcctgtcgttcttcactcgcaataacttcaccgtctcagaccgcggggaggtcatcacattcgagggcacaatgataccaaacagaggccaggcggcgctgctaaccttctgcacctgcattagcctcgggagtgtcgggcttgttctatcaatcgctgtcccagaaggtggcaacaactggttctggctcatgaccctgagccccttggcgggagcgtactactggacgaaagcgtcaaggaaagaagagatcaaggtcaagatgatcctatccgatgacgggaacgtgtccgagatccttgtgcagggcgatgacgtccaggttgagcagatgaggaaggacctcaagttcagcgagaaggggatggtctatgtgaagggcatctttgagacatgactgggagtttcatactctatctgtgagtgaacaatcgagtggagacgagtctttgctgcaacggaaactgcgtaagcgtaacccaggtgaggaaatgcaaattggacgggcaaatctgtaccttggcttaaaggaaaaaaagaagtgatcttcatacgggatttgattattgtaagtgttgcccgtatgaggatagttaatgagagaaagaagtaactggaagtctgaccactgcacattggagttccaattggacaccagccgatcactcaaggggtctgcggcgagcggacgacgagttcgcggttggcggacggacgctgcaccgtcacaggcaacacaactaagatgggatcggcagtggtggacttccctaggggcgagctgcggcaacgacctccttagggcgtgagcgacgacgtgtttttatgctaccctgtatacatatttatgccaacgtcaatagatgtttacgacatatatttcagtcaatggttacccttacatctattgtctgtttatgatatttctattcacattttatgcaaacgtttatagatttgtatgtattatctcgttacctagcccattgtgtatatggggtttctaacatttacattagctcggtatttatgatcaaaactgagaggtttt

SEQ ID NO: 203846 - DNA, 2326 bp, Zea Mays
tgtccaatactgctatagtagcttctccaagttatgacactgttaggaagatggttcaacttctctcgaaatgaagcttctgtcttcctatgtatagacaagttgttcagttaggaggtctagattctcttaaaatggtgctatctacgagttaggaggtctaggagcacactgaatgttttagaggttgatgaaatcgttgttttcctaaaaaagcattttttctgctttgtttgaaattgtttgggttttcctccccaactttcataattacctatttctattgtatgtttgatcatttggacttctactccatccacaattttggtttattcagtgaggaactatgtttttaaccactctatagtttgtatagacatgcaacattcatctcagggtcaagaaagaagctcaacttggcatgcttcctgtttaaagcaaggcaagaaacatccccgccagatctctgtcgccaaagcagggctggtgaagaagagctactgacaatggaaagcaacgattagagtaacttgatgagtgaggactattcattcagttgcttcgatcaataagtgaactaatggatgcatgtttcttttgataagtcacatatggaaagtgaagaacccaaatgatttcttcacaggaagcttggaccaatcttcaactcatggggcgcttcatcctcggcctcctacgcatgcacttctcctgcttctcctgctggtcatcgcccaagatgttgcatggtgtcagtgtgtcagatgtgccgtaacagatgactccaaaatggattgcatgctcttcaaatagctacagataactatcttcacataaaatggagagtacaatgtttataaaagaaggaatatggataaggatccagattctcctatagcatatgaagaggcaaaggaaatggcaagccaaagctgcacaatttctgatgatcactcgttgttactgttatccattatctcctcagaggcattgcttttaaattcaacagcagacatggcaggtacgtgtccactttcttctcaaggaattgcactagaggttggactttgtgggtcaagagaaatttaatgcctattgttaatacaacctttagctatttttccatgatgatggagttggacaagtaccatattgagtataagtgttagcctattatatctttgtacaaccatggcaaacgaataatttcttataacaccatgaagataatgtttaacgaagtgtgtttgcgtgcgtgtgtaatttcttcttttgttttgctgctaagtttgatagttcaaaacatgattcttgtaaagtttggttttagtctaacaaatacactcaagtcctgacatgtaaactgtaaagttggactgttgcttggtggatctgtattgaactttattttttttaaaatgttttatggcttgtatagtttgtattcacttctcacctaagctacaatttgtttttccagcctttcaagatttggcacattgacataatgacatgggttggtcacggattggatgtcaattttgctccctgtaccttgtagattatcggttatgtcaattttcgaaatttctatcgtgatggataacatttgaataaaacatagttaaataaacatgactactgtttcagtctttcgaaattctgatgctatagtgtcagtatactatgtcattttagggaaaatatatgtcatgtttattttgataaaattatatgatttctcactcaattcttgtcggtggcttcaggatttgttattttgtatatcgatctgtgtcatttgacaaagtactttgacttggtataatatgagtgttacttcgaccaaaagagcttggtaaagtgtgagaaactccgcaaacttcttctgcagacgatgactagcaacagttatgacgagggtcaagatagccgccatacatgatacattgagtacaacatcaagataaacactccctccccacacacaacttttgccttccgttcactctgtatgttgtgtttattacggttgcatatgttgtgtttattatggcatcaacacgttccattagaaaatataactattgtttgtcaagtacaaaatcataatcacatcagcttgtaataatattgcatcactgttttgtaccaaattgtaagttgttgtagcaacgcacgggcaccctactagtatatagagtaagttatcattaaattctcaaagcatcacatcaaaatggcacaagacatttaaaacatacttttggatatatatatacacacacacgcccaaacaagctcttagttgggctgtcactttaac

SEQ ID NO: 203847 - DNA, 3147 bp, Zea Mays
tgtccaatactgctatagtagcttctccaagttatgacactgttaggaagatggttcaacttctctcgaaatgaagcttctgtcttcctatgtatagacaagttgttcagttaggaggtctagattctcttaaaatggtgctatctacgagttaggaggtctaggagcacactgaatgttttagaggttgatgaaatcgttgttttcctaaaaaagcattttttctgctttgtttgaaattgtttgggttttcctccccaactttcataattacctatttctattgtatgtttgatcatttggacttctactccatccacaattttggtttattcagtgaggaactatgtttttaaccactctatagtttgtatagacatgcaacattcatctcagggtcaagaaagaagctcaacttggcatgcttcctgtttaaagcaaggcaagaaacatccccgccagatctctgtcgccaaagcagggctggtgaagaagttgtgtttccctcccggattgtcactactttcatatttgttcatttatgtttgttccaatttatgttggttttttacagttacagaatatgtttgttccagttgagttccagtttgaaaactggaacaaccactagcagatgcaaagttcacaaagtagcttgtcaaataatgtgcatgaactggaacaagcaacttgtgcacgaatgagcattactggaacaagtagcttgtgcatgaacgagtaatactgtagatgattggacatgagctactgacaatggaaagcaacgattagagtaacttgatgagtgaggactattcattcagttgcttcgatcaataagtgaactaatggatgcatgtttcttttgataagtcacatatggaaagtgaagaacccaaatgatttcttcacaggaagcaacaagctagaaaatgtggaatttgtcatatgtccggatgcaaaacgggtaacttcatgctttccacaatgtgtgtcgacatgatgcttgtagagatgcttggaccaatcttcaactcatggggcgcttcatcctcggcctcctacgcatgcacttctcctgcttctcctgctggtcatcgcccaaggtgcacttttcctccctgttctgttcacgtgcccatgtgtcattcttgtttttcactgtttaggatcgtgagggtgttattgcaataatagctgatggagaaatgagaatgattttcaaatgatgacaggattggcagaatgagagcgacaaaggaatgagctaaatcttttgaaatatgaagcaatatgatttctttccagtgttatatttttttatttcctatgcatttcttaaaagtgctattacatgttcacctactaatacccttgtttttcttgcatctcaaggatgaattgctgctcttgaccatagggattggagcagcatgtagtttatactttatcctggttttctctctcgagtgtgtcagatgtgccgtaacagatgactccaaaatggattgcatgctcttcaaatagctacagataactatcttcacataaaatggagagtacaatgtttataaaagaaggaatatggataaggatccagattctcctatagcatatgaagaggcaaaggaaatggcaagccaaagctgcacaatttctgatgatcactcgttgttactgttatccattatctcctcagaggcattgcttttaaattcaacagcagacatggcaggtgcaggtcctatcctatccattatctacccctgcatgtgtgccagctattctactctatgtttcaatagtttggaaataattcagagctaaggttttctgatacaggtacgtgtccactttcttctcaaggaattgcactagaggttggactttgtgggtcaagagaaatttaatgcctattgttaatacaacctttagctatttttccatgatgatggagttggacaagtaccatattgagtataagtgttagcctattatatctttgtacaaccatggcaaacgaataatttcttataacaccatgaagataatgtttaacgaagtgtgtttgcgtgcgtgtgtaatttcttcttttgttttgctgctaagtttgatagttcaaaacatgattcttgtaaagtttggttttagtctaacaaatacactcaagtcctgacatgtaaactgtaaagttggactgttgcttggtggatctgtattgaactttattttttttaaaatgttttatggcttgtatagtttgtattcacttctcacctaagctacaatttgtttttccagcctttcaagatttggcacattgacataatgacatgggttggtcacggattggatgtcaattttgctccctgtaccttgtagattatcggttatgtcaattttcgaaatttctatcgtgatggataacatttgaataaaacatagttaaataaacatgactactgtttcagtctttcgaaattctgatgctatagtgtcagtatactatgtcattttagggaaaatatatgtcatgtttattttgataaaattatatgatttctcactcaattcttgtcggtggcttcaggatttgttattttgtatatcgatctgtgtcatttgacaaagtactttgacttggtataatatgagtgttacttcgaccaaaagagcttggtaaagtgtgagaaactccgcaaacttcttctgcagacgatgactagcaacagttatgacgagggtcaagatagccgccatacatgatacattgagtacaacatcaagataaacactccctccccacacacaacttttgccttccgttcactctgtatgttgtgtttattacggttgcatatgttgtgtttattatggcatcaacacgttccattagaaaatataactattgtttgtcaagtacaaaatcataatcacatcagcttgtaataatattgcatcactgttttgtaccaaattgtaagttgttgtagcaacgcacgggcaccctactagtatatagagtaagttatcattaaattctcaaagcatcacatcaaaatggcacaagacatttaaaacatacttttggatatatatatacacacacacgcccaaacaagctcttagttgggctgtcactttaac

SEQ ID NO: 203848 - DNA, 4359 bp, Zea Mays
tgatgtccaatactgctatagtagcttctccaagttatgacactgttaggaagatggttcaacttctctcgaaatgaagcttctgtcttcctatgtatagacaagttgttcagttaggaggtctagattctcttaaaatggtgctatctacgagttaggaggtctaggagcacactgaatgttttagaggttgatgaaatcgttgttttcctaaaaaagcattttttctgctttgtttgaaattgtttgggttttcctccccaactttcataattacctatttctattgtatgtttgatcatttggacttctactccatccacaattttggtttattcagtgaggaactatgtttttaaccactctatagtttgtatagacatgcaacattcatctcagggtcaagaaagaagctcaacttggcatgcttcctgtttaaagcaaggcaagaaacatccccgccagatctctgtcgccaaagcagggctggtgaagaagttgtgtttccctcccggattgtcactactttcatatttgttcatttatgtttgttccaatttatgttggttttttacagttacagaatatgtttgttccagttgagttccagtttgaaaactggaacaaccactagcagatgcaaagttcacaaagtagcttgtcaaataatgtgcatgaactggaacaagcaacttgtgcacgaatgagcattactggaacaagtagcttgtgcatgaacgagtaatactgtagatgattggacatgtatgtctattttagatttttaatatttaatgttatatattcagctcataccatacatgaatttgcatttctgtactatactcacttaatgtcctacctgttttgttagcttcaactatccgctttaaactgacaaaaccagaccaaacatatgcaaatctcatatacctgtgaaagcaacaactgatttgccagattggttaattaaacgtaacaataaatagccccgattaaatggcttataaatatacttggatctgttcatttttcacatatcagctattaatgaagccttcactgggttcattttgtactactccattacttatttacagttacaagtattctaagaaacttaatatttcatcatcaaagttgtattcagacagtttcatttacattgctctgattttttgtactaggagctactgacaatggaaagcaacgattagagtaacttgatgagtgaggactattcattcagttgcttcgatcaataagtgaactaatggatgcatgtttcttttgataagtgagctaactactttagtcacaaagttcgtgttgatttctaaacatggtatgatggttttgtcatcctattcgattgagtttgggaaaaagcctgcacattctgaaaacaaacagactgcacattgtgtggctgataaggttgagtgggtaaataagatcaaagctattatttagacatactgaaaatatagtgaaggaagcgtaagcaatttttctgctatatttatgcattgtatccttgtaaaattatcaatattgttctgacttgtggggaaaggtatgagagtattcatttttttgcctcttttctgtttgcattccttcttcagtataatgtttgttagaataaccaggtgaatttacaaatttcatatccatatactttcttcgatgacaaatataaatctacctaggtttgtcataactcataggtcaatcattctaacttcaattgacattttttataaaaagtatcataaggaaaataatatattatcataaaagtgacgtccatctatatcaaattttagatattgatggtggtcagagttaaaaaacagtttgccttaagacaaaccaagatgaacttgtatttacaatcgaaggaaatattgcacattgcctagacatttaatttattagataaattcttttgttagttgttcaactttgtacgtcttataagtcacaggaacaatgtttatctagaacttcggtctcaaattatacagtagtgttcagccatacctgccatgtcacaagaaagagagataaaaagtatttaatagtagacctaatgatgctcatttgtaattgtagatattcgtatatcctttttctgcaaccttgtgaaacatgtgatggtttgacttggaacaaactttgggtctgatatagtaaaatgcaatgtatgtggagggaagtagtagaacaagacagaacaagtgccaaataaggttatatagtagaatacaatgtgtggagggaaatagtagaacaacacaaaacaagtgccaaataaggttacaaggtttatagtagcgattgcttagctgctacaacgacactcatagattagcctggcatttgcaatgtcgctcttgtatttgccataacctcacttaaggtcacacattgcctctgggaccttgacctccgctactgttgtcgcctggccgcgtcgacttcaccaatgccggggtgtccaacctcatcagcttcaccgtcgtcgactgctcccacacaaccgagctgtgggtcctggtcacatatggaaagtgaagaacccaaatgatttcttcacaggaagcttggaccaatcttcaactcatggggcgcttcatcctcggcctcctacgcatgcacttctcctgcttctcctgctggtcatcgcccaaggatgaattgctgctcttgaccatagggattggagcagcatgtagtttatactttatcctggttttctctctcgagatgttgcatggtgtcagtgtgtcagatgtgccgtaacagatgactccaaaatggattgcatgctcttcaaatagctacagataactatcttcacataaaatggagagtacaatgtttataaaagaaggaatatggataaggatccagattctcctatagcatatgaagaggcaaaggaaatggcaagccaaagctgcacaatttctgatgatcactcgttgttactgttatccattatctcctcagaggcattgcttttaaattcaacagcagacatggcaggtacgtgtccactttcttctcaaggaattgcactagaggttggactttgtgggtcaagagaaatttaatgcctattgttaatacaacctttagctatttttccatgatgatggagttggacaagtaccatattgagtataagtgttagcctattatatctttgtacaaccatggcaaacgaataatttcttataacaccatgaagataatgtttaacgaagtgtgtttgcgtgcgtgtgtaatttcttcttttgttttgctgctaagtttgatagttcaaaacatgattcttgtaaagtttggttttagtctaacaaatacactcaagtcctgacatgtaaactgtaaagttggactgttgcttggtggatctgtattgaactttattttttttaaaatgttttatggcttgtatagtttgtattcacttctcacctaagctacaatttgtttttccagcctttcaagatttggcacattgacataatgacatgggttggtcacggattggatgtcaattttgctccctgtaccttgtagattatcggttatgtcaattttcgaaatttctatcgtgatggataacatttgaataaaacatagttaaataaacatgactactgtttcagtctttcgaaattctgatgctatagtgtcagtatactatgtcattttagggaaaatatatgtcatgtttattttgataaaattatatgatttctcactcaattcttgtcggtggcttcaggatttgttattttgtatatcgatctgtgtcatttgacaaagtactttgacttggtataatatgagtgttacttcgaccaaaagagcttggtaaagtgtgagaaactccgcaaacttcttctgcagacgatgactagcaacagttatgacgagggtcaagatagccgccatacatgatacattgagtacaacatcaagataaacactccctccccacacacaacttttgccttccgttcactctgtatgttgtgtttattacggttgcatatgttgtgtttattatggcatcaacacgttccattagaaaatataactattgtttgtcaagtacaaaatcataatcacatcagcttgtaataatattgcatcactgttttgtaccaaattgtaagttgttgtagcaacgcacgggcaccctactagtatatagagtaagttatcattaaattctcaaagcatcacatcaaaatggcacaagacatttaaaacatacttttggatatatatatacacacacacgcccaaacaagctcttagttgggctgtcactttaac

SEQ ID NO: 203849 - DNA, 3622 bp, Zea Mays
tgatgtccaatactgctatagtagcttctccaagttatgacactgttaggaagatggttcaacttctctcgaaatgaagcttctgtcttcctatgtatagacaagttgttcagttaggaggtctagattctcttaaaatggtgctatctacgagttaggaggtctaggagcacactgaatgttttagaggttgatgaaatcgttgttttcctaaaaaagcattttttctgctttgtttgaaattgtttgggttttcctccccaactttcataattacctatttctattgtatgtttgatcatttggacttctactccatccacaattttggtttattcagtgaggaactatgtttttaaccactctatagtttgtatagacatgcaacattcatctcagggtcaagaaagaagctcaacttggcatgcttcctgtttaaagcaaggcaagaaacatccccgccagatctctgtcgccaaagcagggctggtgaagaagttgtgtttccctcccggattgtcactactttcatatttgttcatttatgtttgttccaatttatgttggttttttacagttacagaatatgtttgttccagttgagttccagtttgaaaactggaacaaccactagcagatgcaaagttcacaaagtagcttgtcaaataatgtgcatgaactggaacaagcaacttgtgcacgaatgagcattactggaacaagtagcttgtgcatgaacgagtaatactgtagatgattggacatgtatgtctattttagatttttaatatttaatgttatatattcagctcataccatacatgaatttgcatttctgtactatactcacttaatgtcctacctgttttgttagcttcaactatccgctttaaactgacaaaaccagaccaaacatatgcaaatctcatatacctgtgaaagcaacaactgatttgccagattggttaattaaacgtaacaataaatagccccgattaaatggcttataaatatacttggatctgttcatttttcacatatcagctattaatgaagccttcactgggttcattttgtactactccattacttatttacagttacaagtattctaagaaacttaatatttcatcatcaaagttgtattcagacagtttcatttacattgctctgattttttgtactaggagctactgacaatggaaagcaacgattagagtaacttgatgagtgaggactattcattcagttgcttcgatcaataagtgaactaatggatgcatgtttcttttgataagtcacatatggaaagtgaagaacccaaatgatttcttcacaggaagactgctaaccttcacacatctaataagatgaagcaacaagctagaaaatgtggaatttgtcatatgtccggatgcaaaacgggtaacttcatgctttccacaatgtgtgtcgacatgatgcttgtagagatgcttggaccaatcttcaactcatggggcgcttcatcctcggcctcctacgcatgcacttctcctgcttctcctgctggtcatcgcccaaggtgcacttttcctccctgttctgttcacgtgcccatgtgtcattcttgtttttcactgtttaggatcgtgagggtgttattgcaataatagctgatggagaaatgagaatgattttcaaatgatgacaggattggcagaatgagagcgacaaaggaatgagctaaatcttttgaaatatgaagcaatatgatttctttccagtgttatatttttttatttcctatgcatttcttaaaagtgctattacatgttcacctactaatacccttgtttttcttgcatctcaaggatgaattgctgctcttgaccatagggattggagcagcatgtagtttatactttatcctggttttctctctcgagatgttgcatggtgtcagtgtgtcagatgtgccgtaacagatgactccaaaatggattgcatgctcttcaaatagctacagataactatcttcacataaaatggagagtacaatgtttataaaagaaggaatatggataaggatccagattctcctatagcatatgaagaggcaaaggaaatggcaagccaaagctgcacaatttctgatgatcactcgttgttactgttatccattatctcctcagaggcattgcttttaaattcaacagcagacatggcaggtgcaggtcctatcctatccattatctacccctgcatgtgtgccagctattctactctatgtttcaatagtttggaaataattcagagctaaggttttctgatacaggtacgtgtccactttcttctcaaggaattgcactagaggttggactttgtgggtcaagagaaatttaatgcctattgttaatacaacctttagctatttttccatgatgatggagttggacaagtaccatattgagtataagtgttagcctattatatctttgtacaaccatggcaaacgaataatttcttataacaccatgaagataatgtttaacgaagtgtgtttgcgtgcgtgtgtaatttcttcttttgttttgctgctaagtttgatagttcaaaacatgattcttgtaaagtttggttttagtctaacaaatacactcaagtcctgacatgtaaactgtaaagttggactgttgcttggtggatctgtattgaactttattttttttaaaatgttttatggcttgtatagtttgtattcacttctcacctaagctacaatttgtttttccagcctttcaagatttggcacattgacataatgacatgggttggtcacggattggatgtcaattttgctccctgtaccttgtagattatcggttatgtcaattttcgaaatttctatcgtgatggataacatttgaataaaacatagttaaataaacatgactactgtttcagtctttcgaaattctgatgctatagtgtcagtatactatgtcattttagggaaaatatatgtcatgtttattttgataaaattatatgatttctcactcaattcttgtcggtggcttcaggatttgttattttgtatatcgatctgtgtcatttgacaaagtactttgacttggtataatatgagtgttacttcgaccaaaagagcttggtaaagtgtgagaaactccgcaaacttcttctgcagacgatgactagcaacagttatgacgagggtcaagatagccgccatacatgatacattgagtacaacatcaagataaacactccctccccacacacaacttttgccttccgttcactctgtatgttgtgtttattacggttgcatatgttgtgtttattatggcatcaacacgttccattagaaaatataactattgtttgtcaagtacaaaatcataatcacatcagcttgtaataatattgcatcactgttttgtaccaaattgtaagttgttgtagcaacgcacgggcaccctactagtatatagagtaagttatcattaaattctcaaagcatcacatcaaaatggcacaagacatttaaaacatacttttggatatatatatacacacacacgcccaaacaagctcttagttgggctgtcactttaac

SEQ ID NO: 203850 - DNA, 4007 bp, Zea Mays
tgatgtccaatactgctatagtagcttctccaagttatgacactgttaggaagatggttcaacttctctcgaaatgaagcttctgtcttcctatgtatagacaagttgttcagttaggaggtctagattctcttaaaatggtgctatctacgagttaggaggtctaggagcacactgaatgttttagaggttgatgaaatcgttgttttcctaaaaaagcattttttctgctttgtttgaaattgtttgggttttcctccccaactttcataattacctatttctattgtatgtttgatcatttggacttctactccatccacaattttggtttattcagtgaggaactatgtttttaaccactctatagtttgtatagacatgcaacattcatctcagggtcaagaaagaagctcaacttggcatgcttcctgtttaaagcaaggcaagaaacatccccgccagatctctgtcgccaaagcagggctggtgaagaagttgtgtttccctcccggattgtcactactttcatatttgttcatttatgtttgttccaatttatgttggttttttacagttacagaatatgtttgttccagttgagttccagtttgaaaactggaacaaccactagcagatgcaaagttcacaaagtagcttgtcaaataatgtgcatgaactggaacaagcaacttgtgcacgaatgagcattactggaacaagtagcttgtgcatgaacgagtaatactgtagatgattggacatgtatgtctattttagatttttaatatttaatgttatatattcagctcataccatacatgaatttgcatttctgtactatactcacttaatgtcctacctgttttgttagcttcaactatccgctttaaactgacaaaaccagaccaaacatatgcaaatctcatatacctgtgaaagcaacaactgatttgccagattggttaattaaacgtaacaataaatagccccgattaaatggcttataaatatacttggatctgttcatttttcacatatcagctattaatgaagccttcactgggttcattttgtactactccattacttatttacagttacaagtattctaagaaacttaatatttcatcatcaaagttgtattcagacagtttcatttacattgctctgattttttgtactaggagctactgacaatggaaagcaacgattagagtaacttgatgagtgaggactattcattcagttgcttcgatcaataagtgaactaatggatgcatgtttcttttgataagtgagctaactactttagtcacaaagttcgtgttgatttctaaacatggtatgatggttttgtcatcctattcgattgagtttgggaaaaagcctgcacattctgaaaacaaacagactgcacattgtgtggctgataaggttgagtgggtaaataagatcaaagctattatttagacatactgaaaatatagtgaaggaagcgtaagcaatttttctgctatatttatgcattgtatccttgtaaaattatcaatattgttctgacttgtggggaaaggtatgagagtattcatttttttgcctcttttctgtttgcattccttcttcagtataatgtttgttagaataaccaggtgaatttacaaatttcatatccatatactttcttcgatgacaaatataaatctacctaggtttgtcataactcataggtcaatcattctaacttcaattgacattttttataaaaagtatcataaggaaaataatatattatcataaaagtgacgtccatctatatcaaattttagatattgatggtggtcagagttaaaaaacagtttgccttaagacaaaccaagatgaacttgtatttacaatcgaaggaaatattgcacattgcctagacatttaatttattagataaattcttttgttagttgttcaactttgtacgtcttataagtcacaggaacaatgtttatctagaacttcggtctcaaattatacagtagtgttcagccatacctgccatgtcacaagaaagagagataaaaagtatttaatagtagacctaatgatgctcatttgtaattgtagatattcgtatatcctttttctgcaaccttgtgaaacatgtgatggtttgacttggaacaaactttgggtctgatatagtaaaatgcaatgtatgtggagggaagtagtagaacaagacagaacaagtgccaaataaggttatatagtagaatacaatgtgtggagggaaatagtagaacaacacaaaacaagtgccaaataaggttacaaggtttatagtagcgattgcttagctgctacaacgacactcatagattagcctggcatttgcaatgtcgctcttgtatttgccataacctcacttaaggtcacacattgcctctgggaccttgacctccgctactgttgtcgcctggccgcgtcgacttcaccaatgccggggtgtccaacctcatcagcttcaccgtcgtcgactgctcccacacaaccgagctgtgggtcctggtcacatatggaaagtgaagaacccaaatgatttcttcacaggaagcttggaccaatcttcaactcatggggcgcttcatcctcggcctcctacgcatgcacttctcctgcttctcctgctggtcatcgcccaaggatgaattgctgctcttgaccatagggattggagcagcatgtagtttatactttatcctggttttctctctcgagatgttgcatggtgtcagtgtgtcagatgtgccgtaacagatgactccaaaatggattgcatgctcttcaaatagctacagataactatcttcacataaaatggagagtacaatgtttataaaagaaggaatatggataaggatccagattctcctatagcatatgaagaggcaaaggaaatggcaagccaaagctgcacaatttctgatgatcactcgttgttactgttatccattatctcctcagaggcattgcttttaaattcaacagcagacatggcaggtgcaggtcctatcctatccattatctacccctgcatgtgtgccagctattctactctatgtttcaatagtttggaaataattcagagctaaggttttctgatacagcctttcaagatttggcacattgacataatgacatgggttggtcacggattggatgtcaattttgctccctgtaccttgtagattatcggttatgtcaattttcgaaatttctatcgtgatggataacatttgaataaaacatagttaaataaacatgactactgtttcagtctttcgaaattctgatgctatagtgtcagtatactatgtcattttagggaaaatatatgtcatgtttattttgataaaattatatgatttctcactcaattcttgtcggtggcttcaggatttgttattttgtatatcgatctgtgtcatttgacaaagtactttgacttggtataatatgagtgttacttcgaccaaaagagcttggtaaagtgtgagaaactccgcaaacttcttctgcagacgatgactagcaacagttatgacgagggtcaagatagccgccatacatgatacattgagtacaacatcaagataaacactccctccccacacacaacttttgccttccgttcactctgtatgttgtgtttattacggttgcatatgttgtgtttattatggcatcaacacgttccattagaaaatataactattgtttgtcaagtacaaaatcataatcacatcagcttgtaataatattgcatcactgttttgtaccaaattgtaagttgttgtagcaacgcacgggcaccctactagtatatagagtaagttatcattaaattctcaaagcatcacatcaaaatggcacaagacatttaaaacatacttttggatatatatatacacacacacgcccaaacaagctcttagttgggctgtcactttaac

SEQ ID NO: 203851 - DNA, 3915 bp, Zea Mays
tgatgtccaatactgctatagtagcttctccaagttatgacactgttaggaagatggttcaacttctctcgaaatgaagcttctgtcttcctatgtatagacaagttgttcagttaggaggtctagattctcttaaaatggtgctatctacgagttaggaggtctaggagcacactgaatgttttagaggttgatgaaatcgttgttttcctaaaaaagcattttttctgctttgtttgaaattgtttgggttttcctccccaactttcataattacctatttctattgtatgtttgatcatttggacttctactccatccacaattttggtttattcagtgaggaactatgtttttaaccactctatagtttgtatagacatgcaacattcatctcagggtcaagaaagaagctcaacttggcatgcttcctgtttaaagcaaggcaagaaacatccccgccagatctctgtcgccaaagcagggctggtgaagaagttgtgtttccctcccggattgtcactactttcatatttgttcatttatgtttgttccaatttatgttggttttttacagttacagaatatgtttgttccagttgagttccagtttgaaaactggaacaaccactagcagatgcaaagttcacaaagtagcttgtcaaataatgtgcatgaactggaacaagcaacttgtgcacgaatgagcattactggaacaagtagcttgtgcatgaacgagtaatactgtagatgattggacatgtatgtctattttagatttttaatatttaatgttatatattcagctcataccatacatgaatttgcatttctgtactatactcacttaatgtcctacctgttttgttagcttcaactatccgctttaaactgacaaaaccagaccaaacatatgcaaatctcatatacctgtgaaagcaacaactgatttgccagattggttaattaaacgtaacaataaatagccccgattaaatggcttataaatatacttggatctgttcatttttcacatatcagctattaatgaagccttcactgggttcattttgtactactccattacttatttacagttacaagtattctaagaaacttaatatttcatcatcaaagttgtattcagacagtttcatttacattgctctgattttttgtactaggagctactgacaatggaaagcaacgattagagtaacttgatgagtgaggactattcattcagttgcttcgatcaataagtgaactaatggatgcatgtttcttttgataagtgagctaactactttagtcacaaagttcgtgttgatttctaaacatggtatgatggttttgtcatcctattcgattgagtttgggaaaaagcctgcacattctgaaaacaaacagactgcacattgtgtggctgataaggttgagtgggtaaataagatcaaagctattatttagacatactgaaaatatagtgaaggaagcgtaagcaatttttctgctatatttatgcattgtatccttgtaaaattatcaatattgttctgacttgtggggaaaggtatgagagtattcatttttttgcctcttttctgtttgcattccttcttcagtataatgtttgttagaataaccaggtgaatttacaaatttcatatccatatactttcttcgatgacaaatataaatctacctaggtttgtcataactcataggtcaatcattctaacttcaattgacattttttataaaaagtatcataaggaaaataatatattatcataaaagtgacgtccatctatatcaaattttagatattgatggtggtcagagttaaaaaacagtttgccttaagacaaaccaagatgaacttgtatttacaatcgaaggaaatattgcacattgcctagacatttaatttattagataaattcttttgttagttgttcaactttgtacgtcttataagtcacaggaacaatgtttatctagaacttcggtctcaaattatacagtagtgttcagccatacctgccatgtcacaagaaagagagataaaaagtatttaatagtagacctaatgatgctcatttgtaattgtagatattcgtatatcctttttctgcaaccttgtgaaacatgtgatggtttgacttggaacaaactttgggtctgatatagtaaaatgcaatgtatgtggagggaagtagtagaacaagacagaacaagtgccaaataaggttatatagtagaatacaatgtgtggagggaaatagtagaacaacacaaaacaagtgccaaataaggttacaaggtttatagtagcgattgcttagctgctacaacgacactcatagattagcctggcatttgcaatgtcgctcttgtatttgccataacctcacttaaggtcacacattgcctctgggaccttgacctccgctactgttgtcgcctggccgcgtcgacttcaccaatgccggggtgtccaacctcatcagcttcaccgtcgtcgactgctcccacacaaccgagctgtgggtcctggtcacatatggaaagtgaagaacccaaatgatttcttcacaggaagcttggaccaatcttcaactcatggggcgcttcatcctcggcctcctacgcatgcacttctcctgcttctcctgctggtcatcgcccaagtgtgtcagatgtgccgtaacagatgactccaaaatggattgcatgctcttcaaatagctacagataactatcttcacataaaatggagagtacaatgtttataaaagaaggaatatggataaggatccagattctcctatagcatatgaagaggcaaaggaaatggcaagccaaagctgcacaatttctgatgatcactcgttgttactgttatccattatctcctcagaggcattgcttttaaattcaacagcagacatggcaggtgcaggtcctatcctatccattatctacccctgcatgtgtgccagctattctactctatgtttcaatagtttggaaataattcagagctaaggttttctgatacagcctttcaagatttggcacattgacataatgacatgggttggtcacggattggatgtcaattttgctccctgtaccttgtagattatcggttatgtcaattttcgaaatttctatcgtgatggataacatttgaataaaacatagttaaataaacatgactactgtttcagtctttcgaaattctgatgctatagtgtcagtatactatgtcattttagggaaaatatatgtcatgtttattttgataaaattatatgatttctcactcaattcttgtcggtggcttcaggatttgttattttgtatatcgatctgtgtcatttgacaaagtactttgacttggtataatatgagtgttacttcgaccaaaagagcttggtaaagtgtgagaaactccgcaaacttcttctgcagacgatgactagcaacagttatgacgagggtcaagatagccgccatacatgatacattgagtacaacatcaagataaacactccctccccacacacaacttttgccttccgttcactctgtatgttgtgtttattacggttgcatatgttgtgtttattatggcatcaacacgttccattagaaaatataactattgtttgtcaagtacaaaatcataatcacatcagcttgtaataatattgcatcactgttttgtaccaaattgtaagttgttgtagcaacgcacgggcaccctactagtatatagagtaagttatcattaaattctcaaagcatcacatcaaaatggcacaagacatttaaaacatacttttggatatatatatacacacacacgcccaaacaagctcttagttgggctgtcactttaac

SEQ ID NO: 203852 - DNA, 4296 bp, Zea Mays
tgatgtccaatactgctatagtagcttctccaagttatgacactgttaggaagatggttcaacttctctcgaaatgaagcttctgtcttcctatgtatagacaagttgttcagttaggaggtctagattctcttaaaatggtgctatctacgagttaggaggtctaggagcacactgaatgttttagaggttgatgaaatcgttgttttcctaaaaaagcattttttctgctttgtttgaaattgtttgggttttcctccccaactttcataattacctatttctattgtatgtttgatcatttggacttctactccatccacaattttggtttattcagtgaggaactatgtttttaaccactctatagtttgtatagacatgcaacattcatctcagggtcaagaaagaagctcaacttggcatgcttcctgtttaaagcaaggcaagaaacatccccgccagatctctgtcgccaaagcagggctggtgaagaagttgtgtttccctcccggattgtcactactttcatatttgttcatttatgtttgttccaatttatgttggttttttacagttacagaatatgtttgttccagttgagttccagtttgaaaactggaacaaccactagcagatgcaaagttcacaaagtagcttgtcaaataatgtgcatgaactggaacaagcaacttgtgcacgaatgagcattactggaacaagtagcttgtgcatgaacgagtaatactgtagatgattggacatgtatgtctattttagatttttaatatttaatgttatatattcagctcataccatacatgaatttgcatttctgtactatactcacttaatgtcctacctgttttgttagcttcaactatccgctttaaactgacaaaaccagaccaaacatatgcaaatctcatatacctgtgaaagcaacaactgatttgccagattggttaattaaacgtaacaataaatagccccgattaaatggcttataaatatacttggatctgttcatttttcacatatcagctattaatgaagccttcactgggttcattttgtactactccattacttatttacagttacaagtattctaagaaacttaatatttcatcatcaaagttgtattcagacagtttcatttacattgctctgattttttgtactaggagctactgacaatggaaagcaacgattagagtaacttgatgagtgaggactattcattcagttgcttcgatcaataagtgaactaatggatgcatgtttcttttgataagtgagctaactactttagtcacaaagttcgtgttgatttctaaacatggtatgatggttttgtcatcctattcgattgagtttgggaaaaagcctgcacattctgaaaacaaacagactgcacattgtgtggctgataaggttgagtgggtaaataagatcaaagctattatttagacatactgaaaatatagtgaaggaagcgtaagcaatttttctgctatatttatgcattgtatccttgtaaaattatcaatattgttctgacttgtggggaaaggtatgagagtattcatttttttgcctcttttctgtttgcattccttcttcagtataatgtttgttagaataaccaggtgaatttacaaatttcatatccatatactttcttcgatgacaaatataaatctacctaggtttgtcataactcataggtcaatcattctaacttcaattgacattttttataaaaagtatcataaggaaaataatatattatcataaaagtgacgtccatctatatcaaattttagatattgatggtggtcagagttaaaaaacagtttgccttaagacaaaccaagatgaacttgtatttacaatcgaaggaaatattgcacattgcctagacatttaatttattagataaattcttttgttagttgttcaactttgtacgtcttataagtcacaggaacaatgtttatctagaacttcggtctcaaattatacagtagtgttcagccatacctgccatgtcacaagaaagagagataaaaagtatttaatagtagacctaatgatgctcatttgtaattgtagatattcgtatatcctttttctgcaaccttgtgaaacatgtgatggtttgacttggaacaaactttgggtctgatatagtaaaatgcaatgtatgtggagggaagtagtagaacaagacagaacaagtgccaaataaggttatatagtagaatacaatgtgtggagggaaatagtagaacaacacaaaacaagtgccaaataaggttacaaggtttatagtagcgattgcttagctgctacaacgacactcatagattagcctggcatttgcaatgtcgctcttgtatttgccataacctcacttaaggtcacacattgcctctgggaccttgacctccgctactgttgtcgcctggccgcgtcgacttcaccaatgccggggtgtccaacctcatcagcttcaccgtcgtcgactgctcccacacaaccgagctgtgggtcctggtcacatatggaaagtgaagaacccaaatgatttcttcacaggaagcttggaccaatcttcaactcatggggcgcttcatcctcggcctcctacgcatgcacttctcctgcttctcctgctggtcatcgcccaaggtgcacttttcctccctgttctgttcacgtgcccatgtgtcattcttgtttttcactgtttaggatcgtgagggtgttattgcaataatagctgatggagaaatgagaatgattttcaaatgatgacaggattggcagaatgagagcgacaaaggaatgagctaaatcttttgaaatatgaagcaatatgatttctttccagtgttatatttttttatttcctatgcatttcttaaaagtgctattacatgttcacctactaatacccttgtttttcttgcatctcaaggatgaattgctgctcttgaccatagggattggagcagcatgtagtttatactttatcctggttttctctctcgagatgttgcatggtgtcagtgtgtcagatgtgccgtaacagatgactccaaaatggattgcatgctcttcaaatagctacagataactatcttcacataaaatggagagtacaatgtttataaaagaaggaatatggataaggatccagattctcctatagcatatgaagaggcaaaggaaatggcaagccaaagctgcacaatttctgatgatcactcgttgttactgttatccattatctcctcagaggcattgcttttaaattcaacagcagacatggcaggtgcaggtcctatcctatccattatctacccctgcatgtgtgccagctattctactctatgtttcaatagtttggaaataattcagagctaaggttttctgatacagcctttcaagatttggcacattgacataatgacatgggttggtcacggattggatgtcaattttgctccctgtaccttgtagattatcggttatgtcaattttcgaaatttctatcgtgatggataacatttgaataaaacatagttaaataaacatgactactgtttcagtctttcgaaattctgatgctatagtgtcagtatactatgtcattttagggaaaatatatgtcatgtttattttgataaaattatatgatttctcactcaattcttgtcggtggcttcaggatttgttattttgtatatcgatctgtgtcatttgacaaagtactttgacttggtataatatgagtgttacttcgaccaaaagagcttggtaaagtgtgagaaactccgcaaacttcttctgcagacgatgactagcaacagttatgacgagggtcaagatagccgccatacatgatacattgagtacaacatcaagataaacactccctccccacacacaacttttgccttccgttcactctgtatgttgtgtttattacggttgcatatgttgtgtttattatggcatcaacacgttccattagaaaatataactattgtttgtcaagtacaaaatcataatcacatcagcttgtaataatattgcatcactgttttgtaccaaattgtaagttgttgtagcaacgcacgggcaccctactagtatatagagtaagttatcattaaattctcaaagcatcacatcaaaatggcacaagacatttaaaacatacttttggatatatatatacacacacacgcccaaacaagctcttagttgggctgtcactttaac

SEQ ID NO: 203853 - DNA, 3938 bp, Zea Mays
tgatgtccaatactgctatagtagcttctccaagttatgacactgttaggaagatggttcaacttctctcgaaatgaagcttctgtcttcctatgtatagacaagttgttcagttaggaggtctagattctcttaaaatggtgctatctacgagttaggaggtctaggagcacactgaatgttttagaggttgatgaaatcgttgttttcctaaaaaagcattttttctgctttgtttgaaattgtttgggttttcctccccaactttcataattacctatttctattgtatgtttgatcatttggacttctactccatccacaattttggtttattcagtgaggaactatgtttttaaccactctatagtttgtatagacatgcaacattcatctcagggtcaagaaagaagctcaacttggcatgcttcctgtttaaagcaaggcaagaaacatccccgccagatctctgtcgccaaagcagggctggtgaagaagttgtgtttccctcccggattgtcactactttcatatttgttcatttatgtttgttccaatttatgttggttttttacagttacagaatatgtttgttccagttgagttccagtttgaaaactggaacaaccactagcagatgcaaagttcacaaagtagcttgtcaaataatgtgcatgaactggaacaagcaacttgtgcacgaatgagcattactggaacaagtagcttgtgcatgaacgagtaatactgtagatgattggacatgtatgtctattttagatttttaatatttaatgttatatattcagctcataccatacatgaatttgcatttctgtactatactcacttaatgtcctacctgttttgttagcttcaactatccgctttaaactgacaaaaccagaccaaacatatgcaaatctcatatacctgtgaaagcaacaactgatttgccagattggttaattaaacgtaacaataaatagccccgattaaatggcttataaatatacttggatctgttcatttttcacatatcagctattaatgaagccttcactgggttcattttgtactactccattacttatttacagttacaagtattctaagaaacttaatatttcatcatcaaagttgtattcagacagtttcatttacattgctctgattttttgtactaggagctactgacaatggaaagcaacgattagagtaacttgatgagtgaggactattcattcagttgcttcgatcaataagtgaactaatggatgcatgtttcttttgataagtgagctaactactttagtcacaaagttcgtgttgatttctaaacatggtatgatggttttgtcatcctattcgattgagtttgggaaaaagcctgcacattctgaaaacaaacagactgcacattgtgtggctgataaggttgagtgggtaaataagatcaaagctattatttagacatactgaaaatatagtgaaggaagcgtaagcaatttttctgctatatttatgcattgtatccttgtaaaattatcaatattgttctgacttgtggggaaaggtatgagagtattcatttttttgcctcttttctgtttgcattccttcttcagtataatgtttgttagaataaccaggtgaatttacaaatttcatatccatatactttcttcgatgacaaatataaatctacctaggtttgtcataactcataggtcaatcattctaacttcaattgacattttttataaaaagtatcataaggaaaataatatattatcataaaagtgacgtccatctatatcaaattttagatattgatggtggtcagagttaaaaaacagtttgccttaagacaaaccaagatgaacttgtatttacaatcgaaggaaatattgcacattgcctagacatttaatttattagataaattcttttgttagttgttcaactttgtacgtcttataagtcacaggaacaatgtttatctagaacttcggtctcaaattatacagtagtgttcagccatacctgccatgtcacaagaaagagagataaaaagtatttaatagtagacctaatgatgctcatttgtaattgtagatattcgtatatcctttttctgcaaccttgtgaaacatgtgatggtttgacttggaacaaactttgggtctgatatagtaaaatgcaatgtatgtggagggaagtagtagaacaagacagaacaagtgccaaataaggttatatagtagaatacaatgtgtggagggaaatagtagaacaacacaaaacaagtgccaaataaggttacaaggtttatagtagcgattgcttagctgctacaacgacactcatagattagcctggcatttgcaatgtcgctcttgtatttgccataacctcacttaaggtcacacattgcctctgggaccttgacctccgctactgttgtcgcctggccgcgtcgacttcaccaatgccggggtgtccaacctcatcagcttcaccgtcgtcgactgctcccacacaaccgagctgtgggtcctggtaccggtcacatatggaaagtgaagaacccaaatgatttcttcacaggaagcttggaccaatcttcaactcatggggcgcttcatcctcggcctcctacgcatgcacttctcctgcttctcctgctggtcatcgcccaagatgttgcatggtgtcagtgtgtcagatgtgccgtaacagatgactccaaaatggattgcatgctcttcaaatagctacagataactatcttcacataaaatggagagtacaatgtttataaaagaaggaatatggataaggatccagattctcctatagcatatgaagaggcaaaggaaatggcaagccaaagctgcacaatttctgatgatcactcgttgttactgttatccattatctcctcagaggcattgcttttaaattcaacagcagacatggcaggtgcaggtcctatcctatccattatctacccctgcatgtgtgccagctattctactctatgtttcaatagtttggaaataattcagagctaaggttttctgatacagcctttcaagatttggcacattgacataatgacatgggttggtcacggattggatgtcaattttgctccctgtaccttgtagattatcggttatgtcaattttcgaaatttctatcgtgatggataacatttgaataaaacatagttaaataaacatgactactgtttcagtctttcgaaattctgatgctatagtgtcagtatactatgtcattttagggaaaatatatgtcatgtttattttgataaaattatatgatttctcactcaattcttgtcggtggcttcaggatttgttattttgtatatcgatctgtgtcatttgacaaagtactttgacttggtataatatgagtgttacttcgaccaaaagagcttggtaaagtgtgagaaactccgcaaacttcttctgcagacgatgactagcaacagttatgacgagggtcaagatagccgccatacatgatacattgagtacaacatcaagataaacactccctccccacacacaacttttgccttccgttcactctgtatgttgtgtttattacggttgcatatgttgtgtttattatggcatcaacacgttccattagaaaatataactattgtttgtcaagtacaaaatcataatcacatcagcttgtaataatattgcatcactgttttgtaccaaattgtaagttgttgtagcaacgcacgggcaccctactagtatatagagtaagttatcattaaattctcaaagcatcacatcaaaatggcacaagacatttaaaacatacttttggatatatatatacacacacacgcccaaacaagctcttagttgggctgtcactttaac

SEQ ID NO: 203854 - DNA, 4833 bp, Zea Mays
tgatgtccaatactgctatagtagcttctccaagttatgacactgttaggaagatggttcaacttctctcgaaatgaagcttctgtcttcctatgtatagacaagttgttcagttaggaggtctagattctcttaaaatggtgctatctacgagttaggaggtctaggagcacactgaatgttttagaggttgatgaaatcgttgttttcctaaaaaagcattttttctgctttgtttgaaattgtttgggttttcctccccaactttcataattacctatttctattgtatgtttgatcatttggacttctactccatccacaattttggtttattcagtgaggaactatgtttttaaccactctatagtttgtatagacatgcaacattcatctcagggtcaagaaagaagctcaacttggcatgcttcctgtttaaagcaaggcaagaaacatccccgccagatctctgtcgccaaagcagggctggtgaagaagttgtgtttccctcccggattgtcactactttcatatttgttcatttatgtttgttccaatttatgttggttttttacagttacagaatatgtttgttccagttgagttccagtttgaaaactggaacaaccactagcagatgcaaagttcacaaagtagcttgtcaaataatgtgcatgaactggaacaagcaacttgtgcacgaatgagcattactggaacaagtagcttgtgcatgaacgagtaatactgtagatgattggacatgtatgtctattttagatttttaatatttaatgttatatattcagctcataccatacatgaatttgcatttctgtactatactcacttaatgtcctacctgttttgttagcttcaactatccgctttaaactgacaaaaccagaccaaacatatgcaaatctcatatacctgtgaaagcaacaactgatttgccagattggttaattaaacgtaacaataaatagccccgattaaatggcttataaatatacttggatctgttcatttttcacatatcagctattaatgaagccttcactgggttcattttgtactactccattacttatttacagttacaagtattctaagaaacttaatatttcatcatcaaagttgtattcagacagtttcatttacattgctctgattttttgtactaggagctactgacaatggaaagcaacgattagagtaacttgatgagtgaggactattcattcagttgcttcgatcaataagtgaactaatggatgcatgtttcttttgataagtgagctaactactttagtcacaaagttcgtgttgatttctaaacatggtatgatggttttgtcatcctattcgattgagtttgggaaaaagcctgcacattctgaaaacaaacagactgcacattgtgtggctgataaggttgagtgggtaaataagatcaaagctattatttagacatactgaaaatatagtgaaggaagcgtaagcaatttttctgctatatttatgcattgtatccttgtaaaattatcaatattgttctgacttgtggggaaaggtatgagagtattcatttttttgcctcttttctgtttgcattccttcttcagtataatgtttgttagaataaccaggtgaatttacaaatttcatatccatatactttcttcgatgacaaatataaatctacctaggtttgtcataactcataggtcaatcattctaacttcaattgacattttttataaaaagtatcataaggaaaataatatattatcataaaagtgacgtccatctatatcaaattttagatattgatggtggtcagagttaaaaaacagtttgccttaagacaaaccaagatgaacttgtatttacaatcgaaggaaatattgcacattgcctagacatttaatttattagataaattcttttgttagttgttcaactttgtacgtcttataagtcacaggaacaatgtttatctagaacttcggtctcaaattatacagtagtgttcagccatacctgccatgtcacaagaaagagagataaaaagtatttaatagtagacctaatgatgctcatttgtaattgtagatattcgtatatcctttttctgcaaccttgtgaaacatgtgatggtttgacttggaacaaactttgggtctgatatagtaaaatgcaatgtatgtggagggaagtagtagaacaagacagaacaagtgccaaataaggttatatagtagaatacaatgtgtggagggaaatagtagaacaacacaaaacaagtgccaaataaggttacaaggtttatagtagcgattgcttagctgctacaacgacactcatagattagcctggcatttgcaatgtcgctcttgtatttgccataacctcacttaaggtcacacattgcctctgggaccttgacctccgctactgttgtcgcctggccgcgtcgacttcaccaatgccggggtgtccaacctcatcagcttcaccgtcgtcgactgctcccacacaaccgagctgtgggtcctggtaccggtcgcgccccgcctctgctccttctgcttcagcgagtggcagactatcgatacactcgatttcaattgttttttacgctatttactgtattgcaatgggacaatggatgattaggatttgttttttaagactggcccatgatttatcgtcgtatactatttctttaatagattgttcgctacatctactgatctacatgttcacatgtttcaacttctgtcagcatccgtagttactatatgaatgctcattctgtgtcaccttttaagtttacaaatgctcttttccaggtcacatatggaaagtgaagaacccaaatgatttcttcacaggaaggtgcttacatcttgcttccatgcctcggtagtttcggtcactattagttttgctatgcctttcctacataaataattttgctacctcaaaatgcttctaaatatgatgatttatgctggagactgctaaccttcacacatctaataagatgaagcaacaagctagaaaatgtggaatttgtcatatgtccggatgcaaaacgggtaacttcatgctttccacaatgtgtgtcgacatgatgcttgtagagatgcttggaccaatcttcaactcatggggcgcttcatcctcggcctcctacgcatgcacttctcctgcttctcctgctggtcatcgcccaagatgttgcatggtgtcagtgtgtcagatgtgccgtaacagatgactccaaaatggattgcatgctcttcaaatagctacagataactatcttcacataaaatggagagtacaatgtttataaaagaaggaatatggataaggatccagattctcctatagcatatgaagaggcaaaggaaatggcaagccaaagctgcacaatttctgatgatcactcgttgttactgttatccattatctcctcagaggcattgcttttaaattcaacagcagacatggcaggtacgtgtccactttcttctcaaggaattgcactagaggttggactttgtgggtcaagagaaatttaatgcctattgttaatacaacctttagctatttttccatgatgatggagttggacaagtaccatattgagtataagtgttagcctattatatctttgtacaaccatggcaaacgaataatttcttataacaccatgaagataatgtttaacgaagtgtgtttgcgtgcgtgtgtaatttcttcttttgttttgctgctaagtttgatagttcaaaacatgattcttgtaaagtttggttttagtctaacaaatacactcaagtcctgacatgtaaactgtaaagttggactgttgcttggtggatctgtattgaactttattttttttaaaatgttttatggcttgtatagtttgtattcacttctcacctaagctacaatttgtttttccagcctttcaagatttggcacattgacataatgacatgggttggtcacggattggatgtcaattttgctccctgtaccttgtagattatcggttatgtcaattttcgaaatttctatcgtgatggataacatttgaataaaacatagttaaataaacatgactactgtttcagtctttcgaaattctgatgctatagtgtcagtatactatgtcattttagggaaaatatatgtcatgtttattttgataaaattatatgatttctcactcaattcttgtcggtggcttcaggatttgttattttgtatatcgatctgtgtcatttgacaaagtactttgacttggtataatatgagtgttacttcgaccaaaagagcttggtaaagtgtgagaaactccgcaaacttcttctgcagacgatgactagcaacagttatgacgagggtcaagatagccgccatacatgatacattgagtacaacatcaagataaacactccctccccacacacaacttttgccttccgttcactctgtatgttgtgtttattacggttgcatatgttgtgtttattatggcatcaacacgttccattagaaaatataactattgtttgtcaagtacaaaatcataatcacatcagcttgtaataatattgcatcactgttttgtaccaaattgtaagttgttgtagcaacgcacgggcaccctactagtatatagagtaagttatcattaaattctcaaagcatcacatcaaaatggcacaagacatttaaaacatacttttggatatatatatacacacacacgcccaaacaagctcttagttgggctgtcactttaac

SEQ ID NO: 203855 - DNA, 4290 bp, Zea Mays
tgatgtccaatactgctatagtagcttctccaagttatgacactgttaggaagatggttcaacttctctcgaaatgaagcttctgtcttcctatgtatagacaagttgttcagttaggaggtctagattctcttaaaatggtgctatctacgagttaggaggtctaggagcacactgaatgttttagaggttgatgaaatcgttgttttcctaaaaaagcattttttctgctttgtttgaaattgtttgggttttcctccccaactttcataattacctatttctattgtatgtttgatcatttggacttctactccatccacaattttggtttattcagtgaggaactatgtttttaaccactctatagtttgtatagacatgcaacattcatctcagggtcaagaaagaagctcaacttggcatgcttcctgtttaaagcaaggcaagaaacatccccgccagatctctgtcgccaaagcagggctggtgaagaagttgtgtttccctcccggattgtcactactttcatatttgttcatttatgtttgttccaatttatgttggttttttacagttacagaatatgtttgttccagttgagttccagtttgaaaactggaacaaccactagcagatgcaaagttcacaaagtagcttgtcaaataatgtgcatgaactggaacaagcaacttgtgcacgaatgagcattactggaacaagtagcttgtgcatgaacgagtaatactgtagatgattggacatgtatgtctattttagatttttaatatttaatgttatatattcagctcataccatacatgaatttgcatttctgtactatactcacttaatgtcctacctgttttgttagcttcaactatccgctttaaactgacaaaaccagaccaaacatatgcaaatctcatatacctgtgaaagcaacaactgatttgccagattggttaattaaacgtaacaataaatagccccgattaaatggcttataaatatacttggatctgttcatttttcacatatcagctattaatgaagccttcactgggttcattttgtactactccattacttatttacagttacaagtattctaagaaacttaatatttcatcatcaaagttgtattcagacagtttcatttacattgctctgattttttgtactaggagctactgacaatggaaagcaacgattagagtaacttgatgagtgaggactattcattcagttgcttcgatcaataagtgaactaatggatgcatgtttcttttgataagtgagctaactactttagtcacaaagttcgtgttgatttctaaacatggtatgatggttttgtcatcctattcgattgagtttgggaaaaagcctgcacattctgaaaacaaacagactgcacattgtgtggctgataaggttgagtgggtaaataagatcaaagctattatttagacatactgaaaatatagtgaaggaagcgtaagcaatttttctgctatatttatgcattgtatccttgtaaaattatcaatattgttctgacttgtggggaaaggtatgagagtattcatttttttgcctcttttctgtttgcattccttcttcagtataatgtttgttagaataaccaggtgaatttacaaatttcatatccatatactttcttcgatgacaaatataaatctacctaggtttgtcataactcataggtcaatcattctaacttcaattgacattttttataaaaagtatcataaggaaaataatatattatcataaaagtgacgtccatctatatcaaattttagatattgatggtggtcagagttaaaaaacagtttgccttaagacaaaccaagatgaacttgtatttacaatcgaaggaaatattgcacattgcctagacatttaatttattagataaattcttttgttagttgttcaactttgtacgtcttataagtcacaggaacaatgtttatctagaacttcggtctcaaattatacagtagtgttcagccatacctgccatgtcacaagaaagagagataaaaagtatttaatagtagacctaatgatgctcatttgtaattgtagatattcgtatatcctttttctgcaaccttgtgaaacatgtgatggtttgacttggaacaaactttgggtctgatatagtaaaatgcaatgtatgtggagggaagtagtagaacaagacagaacaagtgccaaataaggttatatagtagaatacaatgtgtggagggaaatagtagaacaacacaaaacaagtgccaaataaggttacaaggtttatagtagcgattgcttagctgctacaacgacactcatagattagcctggcatttgcaatgtcgctcttgtatttgccataacctcacttaaggtcacacattgcctctgggaccttgacctccgctactgttgtcgcctggccgcgtcgacttcaccaatgccggggtgtccaacctcatcagcttcaccgtcgtcgactgctcccacacaaccgagctgtgggtcctggtaccggtcacatatggaaagtgaagaacccaaatgatttcttcacaggaagcttggaccaatcttcaactcatggggcgcttcatcctcggcctcctacgcatgcacttctcctgcttctcctgctggtcatcgcccaagatgttgcatggtgtcagtgtgtcagatgtgccgtaacagatgactccaaaatggattgcatgctcttcaaatagctacagataactatcttcacataaaatggagagtacaatgtttataaaagaaggaatatggataaggatccagattctcctatagcatatgaagaggcaaaggaaatggcaagccaaagctgcacaatttctgatgatcactcgttgttactgttatccattatctcctcagaggcattgcttttaaattcaacagcagacatggcaggtacgtgtccactttcttctcaaggaattgcactagaggttggactttgtgggtcaagagaaatttaatgcctattgttaatacaacctttagctatttttccatgatgatggagttggacaagtaccatattgagtataagtgttagcctattatatctttgtacaaccatggcaaacgaataatttcttataacaccatgaagataatgtttaacgaagtgtgtttgcgtgcgtgtgtaatttcttcttttgttttgctgctaagtttgatagttcaaaacatgattcttgtaaagtttggttttagtctaacaaatacactcaagtcctgacatgtaaactgtaaagttggactgttgcttggtggatctgtattgaactttattttttttaaaatgttttatggcttgtatagtttgtattcacttctcacctaagctacaatttgtttttccagcctttcaagatttggcacattgacataatgacatgggttggtcacggattggatgtcaattttgctccctgtaccttgtagattatcggttatgtcaattttcgaaatttctatcgtgatggataacatttgaataaaacatagttaaataaacatgactactgtttcagtctttcgaaattctgatgctatagtgtcagtatactatgtcattttagggaaaatatatgtcatgtttattttgataaaattatatgatttctcactcaattcttgtcggtggcttcaggatttgttattttgtatatcgatctgtgtcatttgacaaagtactttgacttggtataatatgagtgttacttcgaccaaaagagcttggtaaagtgtgagaaactccgcaaacttcttctgcagacgatgactagcaacagttatgacgagggtcaagatagccgccatacatgatacattgagtacaacatcaagataaacactccctccccacacacaacttttgccttccgttcactctgtatgttgtgtttattacggttgcatatgttgtgtttattatggcatcaacacgttccattagaaaatataactattgtttgtcaagtacaaaatcataatcacatcagcttgtaataatattgcatcactgttttgtaccaaattgtaagttgttgtagcaacgcacgggcaccctactagtatatagagtaagttatcattaaattctcaaagcatcacatcaaaatggcacaagacatttaaaacatacttttggatatatatatacacacacacgcccaaacaagctcttagttgggctgtcactttaac

SEQ ID NO: 203856 - DNA, 4670 bp, Zea Mays
tgatgtccaatactgctatagtagcttctccaagttatgacactgttaggaagatggttcaacttctctcgaaatgaagcttctgtcttcctatgtatagacaagttgttcagttaggaggtctagattctcttaaaatggtgctatctacgagttaggaggtctaggagcacactgaatgttttagaggttgatgaaatcgttgttttcctaaaaaagcattttttctgctttgtttgaaattgtttgggttttcctccccaactttcataattacctatttctattgtatgtttgatcatttggacttctactccatccacaattttggtttattcagtgaggaactatgtttttaaccactctatagtttgtatagacatgcaacattcatctcagggtcaagaaagaagctcaacttggcatgcttcctgtttaaagcaaggcaagaaacatccccgccagatctctgtcgccaaagcagggctggtgaagaagttgtgtttccctcccggattgtcactactttcatatttgttcatttatgtttgttccaatttatgttggttttttacagttacagaatatgtttgttccagttgagttccagtttgaaaactggaacaaccactagcagatgcaaagttcacaaagtagcttgtcaaataatgtgcatgaactggaacaagcaacttgtgcacgaatgagcattactggaacaagtagcttgtgcatgaacgagtaatactgtagatgattggacatgtatgtctattttagatttttaatatttaatgttatatattcagctcataccatacatgaatttgcatttctgtactatactcacttaatgtcctacctgttttgttagcttcaactatccgctttaaactgacaaaaccagaccaaacatatgcaaatctcatatacctgtgaaagcaacaactgatttgccagattggttaattaaacgtaacaataaatagccccgattaaatggcttataaatatacttggatctgttcatttttcacatatcagctattaatgaagccttcactgggttcattttgtactactccattacttatttacagttacaagtattctaagaaacttaatatttcatcatcaaagttgtattcagacagtttcatttacattgctctgattttttgtactaggagctactgacaatggaaagcaacgattagagtaacttgatgagtgaggactattcattcagttgcttcgatcaataagtgaactaatggatgcatgtttcttttgataagtgagctaactactttagtcacaaagttcgtgttgatttctaaacatggtatgatggttttgtcatcctattcgattgagtttgggaaaaagcctgcacattctgaaaacaaacagactgcacattgtgtggctgataaggttgagtgggtaaataagatcaaagctattatttagacatactgaaaatatagtgaaggaagcgtaagcaatttttctgctatatttatgcattgtatccttgtaaaattatcaatattgttctgacttgtggggaaaggtatgagagtattcatttttttgcctcttttctgtttgcattccttcttcagtataatgtttgttagaataaccaggtgaatttacaaatttcatatccatatactttcttcgatgacaaatataaatctacctaggtttgtcataactcataggtcaatcattctaacttcaattgacattttttataaaaagtatcataaggaaaataatatattatcataaaagtgacgtccatctatatcaaattttagatattgatggtggtcagagttaaaaaacagtttgccttaagacaaaccaagatgaacttgtatttacaatcgaaggaaatattgcacattgcctagacatttaatttattagataaattcttttgttagttgttcaactttgtacgtcttataagtcacaggaacaatgtttatctagaacttcggtctcaaattatacagtagtgttcagccatacctgccatgtcacaagaaagagagataaaaagtatttaatagtagacctaatgatgctcatttgtaattgtagatattcgtatatcctttttctgcaaccttgtgaaacatgtgatggtttgacttggaacaaactttgggtctgatatagtaaaatgcaatgtatgtggagggaagtagtagaacaagacagaacaagtgccaaataaggttatatagtagaatacaatgtgtggagggaaatagtagaacaacacaaaacaagtgccaaataaggttacaaggtttatagtagcgattgcttagctgctacaacgacactcatagattagcctggcatttgcaatgtcgctcttgtatttgccataacctcacttaaggtcacacattgcctctgggaccttgacctccgctactgttgtcgcctggccgcgtcgacttcaccaatgccggggtgtccaacctcatcagcttcaccgtcgtcgactgctcccacacaaccgagctgtgggtcctggtaccggtcgcgccccgcctctgctccttctgcttcagcgagtggcagactatcgatacactcgatttcaattgttttttacgctatttactgtattgcaatgggacaatggatgattaggatttgttttttaagactggcccatgatttatcgtcgtatactatttctttaatagattgttcgctacatctactgatctacatgttcacatgtttcaacttctgtcagcatccgtagttactatatgaatgctcattctgtgtcaccttttaagtttacaaatgctcttttccaggtcacatatggaaagtgaagaacccaaatgatttcttcacaggaagcttggaccaatcttcaactcatggggcgcttcatcctcggcctcctacgcatgcacttctcctgcttctcctgctggtcatcgcccaagtgtgtcagatgtgccgtaacagatgactccaaaatggattgcatgctcttcaaatagctacagataactatcttcacataaaatggagagtacaatgtttataaaagaaggaatatggataaggatccagattctcctatagcatatgaagaggcaaaggaaatggcaagccaaagctgcacaatttctgatgatcactcgttgttactgttatccattatctcctcagaggcattgcttttaaattcaacagcagacatggcaggtgcaggtcctatcctatccattatctacccctgcatgtgtgccagctattctactctatgtttcaatagtttggaaataattcagagctaaggttttctgatacaggtacgtgtccactttcttctcaaggaattgcactagaggttggactttgtgggtcaagagaaatttaatgcctattgttaatacaacctttagctatttttccatgatgatggagttggacaagtaccatattgagtataagtgttagcctattatatctttgtacaaccatggcaaacgaataatttcttataacaccatgaagataatgtttaacgaagtgtgtttgcgtgcgtgtgtaatttcttcttttgttttgctgctaagtttgatagttcaaaacatgattcttgtaaagtttggttttagtctaacaaatacactcaagtcctgacatgtaaactgtaaagttggactgttgcttggtggatctgtattgaactttattttttttaaaatgttttatggcttgtatagtttgtattcacttctcacctaagctacaatttgtttttccagcctttcaagatttggcacattgacataatgacatgggttggtcacggattggatgtcaattttgctccctgtaccttgtagattatcggttatgtcaattttcgaaatttctatcgtgatggataacatttgaataaaacatagttaaataaacatgactactgtttcagtctttcgaaattctgatgctatagtgtcagtatactatgtcattttagggaaaatatatgtcatgtttattttgataaaattatatgatttctcactcaattcttgtcggtggcttcaggatttgttattttgtatatcgatctgtgtcatttgacaaagtactttgacttggtataatatgagtgttacttcgaccaaaagagcttggtaaagtgtgagaaactccgcaaacttcttctgcagacgatgactagcaacagttatgacgagggtcaagatagccgccatacatgatacattgagtacaacatcaagataaacactccctccccacacacaacttttgccttccgttcactctgtatgttgtgtttattacggttgcatatgttgtgtttattatggcatcaacacgttccattagaaaatataactattgtttgtcaagtacaaaatcataatcacatcagcttgtaataatattgcatcactgttttgtaccaaattgtaagttgttgtagcaacgcacgggcaccctactagtatatagagtaagttatcattaaattctcaaagcatcacatcaaaatggcacaagacatttaaaacatacttttggatatatatatacacacacacgcccaaacaagctcttagttgggctgtcactttaac

SEQ ID NO: 203857 - DNA, 3718 bp, Zea Mays
tgatgtccaatactgctatagtagcttctccaagttatgacactgttaggaagatggttcaacttctctcgaaatgaagcttctgtcttcctatgtatagacaagttgttcagttaggaggtctagattctcttaaaatggtgctatctacgagttaggaggtctaggagcacactgaatgttttagaggttgatgaaatcgttgttttcctaaaaaagcattttttctgctttgtttgaaattgtttgggttttcctccccaactttcataattacctatttctattgtatgtttgatcatttggacttctactccatccacaattttggtttattcagtgaggaactatgtttttaaccactctatagtttgtatagacatgcaacattcatctcagggtcaagaaagaagctcaacttggcatgcttcctgtttaaagcaaggcaagaaacatccccgccagatctctgtcgccaaagcagggctggtgaagaagttgtgtttccctcccggattgtcactactttcatatttgttcatttatgtttgttccaatttatgttggttttttacagttacagaatatgtttgttccagttgagttccagtttgaaaactggaacaaccactagcagatgcaaagttcacaaagtagcttgtcaaataatgtgcatgaactggaacaagcaacttgtgcacgaatgagcattactggaacaagtagcttgtgcatgaacgagtaatactgtagatgattggacatgtatgtctattttagatttttaatatttaatgttatatattcagctcataccatacatgaatttgcatttctgtactatactcacttaatgtcctacctgttttgttagcttcaactatccgctttaaactgacaaaaccagaccaaacatatgcaaatctcatatacctgtgaaagcaacaactgatttgccagattggttaattaaacgtaacaataaatagccccgattaaatggcttataaatatacttggatctgttcatttttcacatatcagctattaatgaagccttcactgggttcattttgtactactccattacttatttacagttacaagtattctaagaaacttaatatttcatcatcaaagttgtattcagacagtttcatttacattgctctgattttttgtactaggagctactgacaatggaaagcaacgattagagtaacttgatgagtgaggactattcattcagttgcttcgatcaataagtgaactaatggatgcatgtttcttttgataagtgagctaactactttagtcacaaagttcgtgttgatttctaaacatggtatgatggttttgtcatcctattcgattgagtttgggaaaaagcctgcacattctgaaaacaaacagactgcacattgtgtggctgataaggttgagtgggtaaataagatcaaagctattatttagacatactgaaaatatagtgaaggaagcgtaagcaatttttctgctatatttatgcattgtatccttgtaaaattatcaatattgttctgacttgtggggaaaggtatgagagtattcatttttttgcctcttttctgtttgcattccttcttcagtataatgtttgttagaataaccaggtgaatttacaaatttcatatccatatactttcttcgatgacaaatataaatctacctaggtttgtcataactcataggtcaatcattctaacttcaattgacattttttataaaaagtatcataaggaaaataatatattatcataaaagtgacgtccatctatatcaaattttagatattgatggtggtcagagttaaaaaacagtttgccttaagacaaaccaagatgaacttgtatttacaatcgaaggaaatattgcacattgcctagacatttaatttattagataaattcttttgttagttgttcaactttgtacgtcttataagtcacaggaacaatgtttatctagaacttcggtctcaaattatacagtagtgttcagccatacctgccatgtcacaagaaagagagataaaaagtatttaatagtagacctaatgatgctcatttgtaattgtagatattcgtatatcctttttctgcaaccttgtgaaacatgtgatggtttgacttggaacaaactttgggtctgatatagtaaaatgcaatgtatgtggagggaagtagtagaacaagacagaacaagtgccaaataaggttatatagtagaatacaatgtgtggagggaaatagtagaacaacacaaaacaagtgccaaataaggttacaaggtttatagtagcgattgcttagctgctacaacgacactcatagattagcctggcatttgcaatgtcgctcttgtatttgccataacctcacttaaggtcacacattgcctctgggaccttgacctccgctactgttgtcgcctggccgcgtcgacttcaccaatgccggggtgtccaacctcatcagcttcaccgtcgtcgactgctcccacacaaccgagctgtgggtcctggtcacatatggaaagtgaagaacccaaatgatttcttcacaggaagcttggaccaatcttcaactcatggggcgcttcatcctcggcctcctacgcatgcacttctcctgcttctcctgctggtcatcgcccaaggatgaattgctgctcttgaccatagggattggagcagcatgtagtttatactttatcctggttttctctctcgagatgttgcatggtgtcagtgtgtcagatgtgccgtaacagatgactccaaaatggattgcatgctcttcaaatagctacagataactatcttcacataaaatggagagtacaatgtttataaaagaaggaatatggataaggatccagattctcctatagcatatgaagaggcaaaggaaatggcaagccaaagctgcacaatttctgatgatcactcgttgttactgttatccattatctcctcagaggcattgcttttaaattcaacagcagacatggcaggtgcaggtcctatcctatccattatctacccctgcatgtgtgccagctattctactctatgtttcaatagtttggaaataattcagagctaaggttttctgatacaggatttgttattttgtatatcgatctgtgtcatttgacaaagtactttgacttggtataatatgagtgttacttcgaccaaaagagcttggtaaagtgtgagaaactccgcaaacttcttctgcagacgatgactagcaacagttatgacgagggtcaagatagccgccatacatgatacattgagtacaacatcaagataaacactccctccccacacacaacttttgccttccgttcactctgtatgttgtgtttattacggttgcatatgttgtgtttattatggcatcaacacgttccattagaaaatataactattgtttgtcaagtacaaaatcataatcacatcagcttgtaataatattgcatcactgttttgtaccaaattgtaagttgttgtagcaacgcacgggcaccctactagtatatagagtaagttatcattaaattctcaaagcatcacatcaaaatggcacaagacatttaaaacatacttttggatatatatatacacacacacgcccaaacaagctcttagttgggctgtcactttaac

SEQ ID NO: 203858 - DNA, 4133 bp, Zea Mays
tgatgtccaatactgctatagtagcttctccaagttatgacactgttaggaagatggttcaacttctctcgaaatgaagcttctgtcttcctatgtatagacaagttgttcagttaggaggtctagattctcttaaaatggtgctatctacgagttaggaggtctaggagcacactgaatgttttagaggttgatgaaatcgttgttttcctaaaaaagcattttttctgctttgtttgaaattgtttgggttttcctccccaactttcataattacctatttctattgtatgtttgatcatttggacttctactccatccacaattttggtttattcagtgaggaactatgtttttaaccactctatagtttgtatagacatgcaacattcatctcagggtcaagaaagaagctcaacttggcatgcttcctgtttaaagcaaggcaagaaacatccccgccagatctctgtcgccaaagcagggctggtgaagaagttgtgtttccctcccggattgtcactactttcatatttgttcatttatgtttgttccaatttatgttggttttttacagttacagaatatgtttgttccagttgagttccagtttgaaaactggaacaaccactagcagatgcaaagttcacaaagtagcttgtcaaataatgtgcatgaactggaacaagcaacttgtgcacgaatgagcattactggaacaagtagcttgtgcatgaacgagtaatactgtagatgattggacatgtatgtctattttagatttttaatatttaatgttatatattcagctcataccatacatgaatttgcatttctgtactatactcacttaatgtcctacctgttttgttagcttcaactatccgctttaaactgacaaaaccagaccaaacatatgcaaatctcatatacctgtgaaagcaacaactgatttgccagattggttaattaaacgtaacaataaatagccccgattaaatggcttataaatatacttggatctgttcatttttcacatatcagctattaatgaagccttcactgggttcattttgtactactccattacttatttacagttacaagtattctaagaaacttaatatttcatcatcaaagttgtattcagacagtttcatttacattgctctgattttttgtactaggagctactgacaatggaaagcaacgattagagtaacttgatgagtgaggactattcattcagttgcttcgatcaataagtgaactaatggatgcatgtttcttttgataagtgagctaactactttagtcacaaagttcgtgttgatttctaaacatggtatgatggttttgtcatcctattcgattgagtttgggaaaaagcctgcacattctgaaaacaaacagactgcacattgtgtggctgataaggttgagtgggtaaataagatcaaagctattatttagacatactgaaaatatagtgaaggaagcgtaagcaatttttctgctatatttatgcattgtatccttgtaaaattatcaatattgttctgacttgtggggaaaggtatgagagtattcatttttttgcctcttttctgtttgcattccttcttcagtataatgtttgttagaataaccaggtgaatttacaaatttcatatccatatactttcttcgatgacaaatataaatctacctaggtttgtcataactcataggtcaatcattctaacttcaattgacattttttataaaaagtatcataaggaaaataatatattatcataaaagtgacgtccatctatatcaaattttagatattgatggtggtcagagttaaaaaacagtttgccttaagacaaaccaagatgaacttgtatttacaatcgaaggaaatattgcacattgcctagacatttaatttattagataaattcttttgttagttgttcaactttgtacgtcttataagtcacaggaacaatgtttatctagaacttcggtctcaaattatacagtagtgttcagccatacctgccatgtcacaagaaagagagataaaaagtatttaatagtagacctaatgatgctcatttgtaattgtagatattcgtatatcctttttctgcaaccttgtgaaacatgtgatggtttgacttggaacaaactttgggtctgatatagtaaaatgcaatgtatgtggagggaagtagtagaacaagacagaacaagtgccaaataaggttatatagtagaatacaatgtgtggagggaaatagtagaacaacacaaaacaagtgccaaataaggttacaaggtttatagtagcgattgcttagctgctacaacgacactcatagattagcctggcatttgcaatgtcgctcttgtatttgccataacctcacttaaggtcacacattgcctctgggaccttgacctccgctactgttgtcgcctggccgcgtcgacttcaccaatgccggggtgtccaacctcatcagcttcaccgtcgtcgactgctcccacacaaccgagctgtgggtcctggtaccggtcgcgccccgcctctgctccttctgcttcagcgagtggcagactatcgatacactcgatttcaattgttttttacgctatttactgtattgcaatgggacaatggatgattaggatttgttttttaagactggcccatgatttatcgtcgtatactatttctttaatagattgttcgctacatctactgatctacatgttcacatgtttcaacttctgtcagcatccgtagttactatatgaatgctcattctgtgtcaccttttaagtttacaaatgctcttttccaggtcacatatggaaagtgaagaacccaaatgatttcttcacaggaagcttggaccaatcttcaactcatggggcgcttcatcctcggcctcctacgcatgcacttctcctgcttctcctgctggtcatcgcccaaggatcgtgagggtgttattgcaataatagctgatggagaaatgagaatgattttcaaatgatgacaggattggcagaatgagagcgacaaaggaatgagctaaatcttttgaaatatgaagcaatatgatttctttccagtgttatatttttttatttcctatgcatttcttaaaagtgctattacatgttcacctactaatacccttgtttttcttgcatctcaaggatgaattgctgctcttgaccatagggattggagcagcatgtagtttatactttatcctggttttctctctcgagatgttgcatggtgtcagtgtgtcagatgtgccgtaacagatgactccaaaatggattgcatgctcttcaaatagctacagataactatcttcacataaaatggagagtacaatgtttataaaagaaggaatatggataaggatccagattctcctatagcatatgaagaggcaaaggaaatggcaagccaaagctgcacaatttctgatgatcactcgttgttactgttatccattatctcctcagaggcattgcttttaaattcaacagcagacatggcaggatttgttattttgtatatcgatctgtgtcatttgacaaagtactttgacttggtataatatgagtgttacttcgaccaaaagagcttggtaaagtgtgagaaactccgcaaacttcttctgcagacgatgactagcaacagttatgacgagggtcaagatagccgccatacatgatacattgagtacaacatcaagataaacactccctccccacacacaacttttgccttccgttcactctgtatgttgtgtttattacggttgcatatgttgtgtttattatggcatcaacacgttccattagaaaatataactattgtttgtcaagtacaaaatcataatcacatcagcttgtaataatattgcatcactgttttgtaccaaattgtaagttgttgtagcaacgcacgggcaccctactagtatatagagtaagttatcattaaattctcaaagcatcacatcaaaatggcacaagacatttaaaacatacttttggatatatatatacacacacacgcccaaacaagctcttagttgggctgtcactttaac

SEQ ID NO: 203859 - DNA, 3000 bp, Zea Mays
tgatgtccaatactgctatagtagcttctccaagttatgacactgttaggaagatggttcaacttctctcgaaatgaagcttctgtcttcctatgtatagacaagttgttcagttaggaggtctagattctcttaaaatggtgctatctacgagttaggaggtctaggagcacactgaatgttttagaggttgatgaaatcgttgttttcctaaaaaagcattttttctgctttgtttgaaattgtttgggttttcctccccaactttcataattacctatttctattgtatgtttgatcatttggacttctactccatccacaattttggtttattcagtgaggaactatgtttttaaccactctatagtttgtatagacatgcaacattcatctcagggtcaagaaagaagctcaacttggcatgcttcctgtttaaagcaaggcaagaaacatccccgccagatctctgtcgccaaagcagggctggtgaagaagttgtgtttccctcccggattgtcactactttcatatttgttcatttatgtttgttccaatttatgttggttttttacagttacagaatatgtttgttccagttgagttccagtttgaaaactggaacaaccactagcagatgcaaagttcacaaagtagcttgtcaaataatgtgcatgaactggaacaagcaacttgtgcacgaatgagcattactggaacaagtagcttgtgcatgaacgagtaatactgtagatgattggacatgtatgtctattttagatttttaatatttaatgttatatattcagctcataccatacatgaatttgcatttctgtactatactcacttaatgtcctacctgttttgttagcttcaactatccgctttaaactgacaaaaccagaccaaacatatgcaaatctcatatacctgtgaaagcaacaactgatttgccagattggttaattaaacgtaacaataaatagccccgattaaatggcttataaatatacttggatctgttcatttttcacatatcagctattaatgaagccttcactgggttcattttgtactactccattacttatttacagttacaagtattctaagaaacttaatatttcatcatcaaagttgtattcagacagtttcatttacattgctctgattttttgtactaggagctactgacaatggaaagcaacgattagagtaacttgatgagtgaggactattcattcagttgcttcgatcaataagtgaactaatggatgcatgtttcttttgataagtcacatatggaaagtgaagaacccaaatgatttcttcacaggaagcttggaccaatcttcaactcatggggcgcttcatcctcggcctcctacgcatgcacttctcctgcttctcctgctggtcatcgcccaaggatgaattgctgctcttgaccatagggattggagcagcatgtagtttatactttatcctggttttctctctcgagatgttgcatggtgtcagtgtgtcagatgtgccgtaacagatgactccaaaatggattgcatgctcttcaaatagctacagataactatcttcacataaaatggagagtacaatgtttataaaagaaggaatatggataaggatccagattctcctatagcatatgaagaggcaaaggaaatggcaagccaaagctgcacaatttctgatgatcactcgttgttactgttatccattatctcctcagaggcattgcttttaaattcaacagcagacatggcaggtacgtgtccactttcttctcaaggaattgcactagaggttggactttgtgggtcaagagaaatttaatgcctattgttaatacaacctttagctatttttccatgatgatggagttggacaagtaccatattgagtataagtgttagcctattatatctttgtacaaccatggcaaacgaataatttcttataacaccatgaagataatgtttaacgaagtgtgtttgcgtgcgtgtgtaatttcttcttttgttttgctgctaagtttgatagttcaaaacatgattcttgtaaagtttggttttagtctaacaaatacactcaagtcctgacatgtaaactgtaaagttggactgttgcttggtggatctgtattgaactttattttttttaaaatgttttatggcttgtatagtttgtattcacttctcacctaagctacaatttgtttttccagcctttcaagatttggcacattgacataatgacatgggttggtcacggattggatgtcaattttgctccctgtaccttgtagattatcggttatgtcaattttcgaaatttctatcgtgatggataacatttgaataaaacatagttaaataaacatgactactgtttcagtctttcgaaattctgatgctatagtgatttgttattttgtatatcgatctgtgtcatttgacaaagtactttgacttggtataatatgagtgttacttcgaccaaaagagcttggtaaagtgtgagaaactccgcaaacttcttctgcagacgatgactagcaacagttatgacgagggtcaagatagccgccatacatgatacattgagtacaacatcaagataaacactccctccccacacacaacttttgccttccgttcactctgtatgttgtgtttattacggttgcatatgttgtgtttattatggcatcaacacgttccattagaaaatataactattgtttgtcaagtacaaaatcataatcacatcagcttgtaataatattgcatcactgttttgtaccaaattgtaagttgttgtagcaacgcacgggcaccctactagtatatagagtaagttatcattaaattctcaaagcatcacatcaaaatggcacaagacatttaaaacatacttttggatatatatatacacacacacgcccaaacaagctcttagttgggctgtcactttaac

SEQ ID NO: 203860 - DNA, 3932 bp, Zea Mays
tgatgtccaatactgctatagtagcttctccaagttatgacactgttaggaagatggttcaacttctctcgaaatgaagcttctgtcttcctatgtatagacaagttgttcagttaggaggtctagattctcttaaaatggtgctatctacgagttaggaggtctaggagcacactgaatgttttagaggttgatgaaatcgttgttttcctaaaaaagcattttttctgctttgtttgaaattgtttgggttttcctccccaactttcataattacctatttctattgtatgtttgatcatttggacttctactccatccacaattttggtttattcagtgaggaactatgtttttaaccactctatagtttgtatagacatgcaacattcatctcagggtcaagaaagaagctcaacttggcatgcttcctgtttaaagcaaggcaagaaacatccccgccagatctctgtcgccaaagcagggctggtgaagaagttgtgtttccctcccggattgtcactactttcatatttgttcatttatgtttgttccaatttatgttggttttttacagttacagaatatgtttgttccagttgagttccagtttgaaaactggaacaaccactagcagatgcaaagttcacaaagtagcttgtcaaataatgtgcatgaactggaacaagcaacttgtgcacgaatgagcattactggaacaagtagcttgtgcatgaacgagtaatactgtagatgattggacatgtatgtctattttagatttttaatatttaatgttatatattcagctcataccatacatgaatttgcatttctgtactatactcacttaatgtcctacctgttttgttagcttcaactatccgctttaaactgacaaaaccagaccaaacatatgcaaatctcatatacctgtgaaagcaacaactgatttgccagattggttaattaaacgtaacaataaatagccccgattaaatggcttataaatatacttggatctgttcatttttcacatatcagctattaatgaagccttcactgggttcattttgtactactccattacttatttacagttacaagtattctaagaaacttaatatttcatcatcaaagttgtattcagacagtttcatttacattgctctgattttttgtactaggagctactgacaatggaaagcaacgattagagtaacttgatgagtgaggactattcattcagttgcttcgatcaataagtgaactaatggatgcatgtttcttttgataagtgagctaactactttagtcacaaagttcgtgttgatttctaaacatggtatgatggttttgtcatcctattcgattgagtttgggaaaaagcctgcacattctgaaaacaaacagactgcacattgtgtggctgataaggttgagtgggtaaataagatcaaagctattatttagacatactgaaaatatagtgaaggaagcgtaagcaatttttctgctatatttatgcattgtatccttgtaaaattatcaatattgttctgacttgtggggaaaggtatgagagtattcatttttttgcctcttttctgtttgcattccttcttcagtataatgtttgttagaataaccaggtgaatttacaaatttcatatccatatactttcttcgatgacaaatataaatctacctaggtttgtcataactcataggtcaatcattctaacttcaattgacattttttataaaaagtatcataaggaaaataatatattatcataaaagtgacgtccatctatatcaaattttagatattgatggtggtcagagttaaaaaacagtttgccttaagacaaaccaagatgaacttgtatttacaatcgaaggaaatattgcacattgcctagacatttaatttattagataaattcttttgttagttgttcaactttgtacgtcttataagtcacaggaacaatgtttatctagaacttcggtctcaaattatacagtagtgttcagccatacctgccatgtcacaagaaagagagataaaaagtatttaatagtagacctaatgatgctcatttgtaattgtagatattcgtatatcctttttctgcaaccttgtgaaacatgtgatggtttgacttggaacaaactttgggtctgatatagtaaaatgcaatgtatgtggagggaagtagtagaacaagacagaacaagtgccaaataaggttatatagtagaatacaatgtgtggagggaaatagtagaacaacacaaaacaagtgccaaataaggttacaaggtttatagtagcgattgcttagctgctacaacgacactcatagattagcctggcatttgcaatgtcgctcttgtatttgccataacctcacttaaggtcacacattgcctctgggaccttgacctccgctactgttgtcgcctggccgcgtcgacttcaccaatgccggggtgtccaacctcatcagcttcaccgtcgtcgactgctcccacacaaccgagctgtgggtcctggtcacatatggaaagtgaagaacccaaatgatttcttcacaggaagcttggaccaatcttcaactcatggggcgcttcatcctcggcctcctacgcatgcacttctcctgcttctcctgctggtcatcgcccaagatgttgcatggtgtcagtgtgtcagatgtgccgtaacagatgactccaaaatggattgcatgctcttcaaatagctacagataactatcttcacataaaatggagagtacaatgtttataaaagaaggaatatggataaggatccagattctcctatagcatatgaagaggcaaaggaaatggcaagccaaagctgcacaatttctgatgatcactcgttgttactgttatccattatctcctcagaggcattgcttttaaattcaacagcagacatggcaggtgcaggtcctatcctatccattatctacccctgcatgtgtgccagctattctactctatgtttcaatagtttggaaataattcagagctaaggttttctgatacagcctttcaagatttggcacattgacataatgacatgggttggtcacggattggatgtcaattttgctccctgtaccttgtagattatcggttatgtcaattttcgaaatttctatcgtgatggataacatttgaataaaacatagttaaataaacatgactactgtttcagtctttcgaaattctgatgctatagtgtcagtatactatgtcattttagggaaaatatatgtcatgtttattttgataaaattatatgatttctcactcaattcttgtcggtggcttcaggatttgttattttgtatatcgatctgtgtcatttgacaaagtactttgacttggtataatatgagtgttacttcgaccaaaagagcttggtaaagtgtgagaaactccgcaaacttcttctgcagacgatgactagcaacagttatgacgagggtcaagatagccgccatacatgatacattgagtacaacatcaagataaacactccctccccacacacaacttttgccttccgttcactctgtatgttgtgtttattacggttgcatatgttgtgtttattatggcatcaacacgttccattagaaaatataactattgtttgtcaagtacaaaatcataatcacatcagcttgtaataatattgcatcactgttttgtaccaaattgtaagttgttgtagcaacgcacgggcaccctactagtatatagagtaagttatcattaaattctcaaagcatcacatcaaaatggcacaagacatttaaaacatacttttggatatatatatacacacacacgcccaaacaagctcttagttgggctgtcactttaac

SEQ ID NO: 203861 - DNA, 3798 bp, Zea Mays
tgatgtccaatactgctatagtagcttctccaagttatgacactgttaggaagatggttcaacttctctcgaaatgaagcttctgtcttcctatgtatagacaagttgttcagttaggaggtctagattctcttaaaatggtgctatctacgagttaggaggtctaggagcacactgaatgttttagaggttgatgaaatcgttgttttcctaaaaaagcattttttctgctttgtttgaaattgtttgggttttcctccccaactttcataattacctatttctattgtatgtttgatcatttggacttctactccatccacaattttggtttattcagtgaggaactatgtttttaaccactctatagtttgtatagacatgcaacattcatctcagggtcaagaaagaagctcaacttggcatgcttcctgtttaaagcaaggcaagaaacatccccgccagatctctgtcgccaaagcagggctggtgaagaattgagttccagtttgaaaactggaacaaccactagcagatgcaaagttcacaaagtagcttgtcaaataatgtgcatgaactggaacaagcaacttgtgcacgaatgagcattactggaacaagtagcttgtgcatgaacgagtaatactgtagatgattggacatgtatgtctattttagatttttaatatttaatgttatatattcagctcataccatacatgaatttgcatttctgtactatactcacttaatgtcctacctgttttgttagcttcaactatccgctttaaactgacaaaaccagaccaaacatatgcaaatctcatatacctgtgaaagcaacaactgatttgccagattggttaattaaacgtaacaataaatagccccgattaaatggcttataaatatacttggatctgttcatttttcacatatcagctattaatgaagccttcactgggttcattttgtactactccattacttatttacagttacaagtattctaagaaacttaatatttcatcatcaaagttgtattcagacagtttcatttacattgctctgattttttgtactaggagctactgacaatggaaagcaacgattagagtaacttgatgagtgaggactattcattcagttgcttcgatcaataagtgaactaatggatgcatgtttcttttgataagtgagctaactactttagtcacaaagttcgtgttgatttctaaacatggtatgatggttttgtcatcctattcgattgagtttgggaaaaagcctgcacattctgaaaacaaacagactgcacattgtgtggctgataaggttgagtgggtaaataagatcaaagctattatttagacatactgaaaatatagtgaaggaagcgtaagcaatttttctgctatatttatgcattgtatccttgtaaaattatcaatattgttctgacttgtggggaaaggtatgagagtattcatttttttgcctcttttctgtttgcattccttcttcagtataatgtttgttagaataaccaggtgaatttacaaatttcatatccatatactttcttcgatgacaaatataaatctacctaggtttgtcataactcataggtcaatcattctaacttcaattgacattttttataaaaagtatcataaggaaaataatatattatcataaaagtgacgtccatctatatcaaattttagatattgatggtggtcagagttaaaaaacagtttgccttaagacaaaccaagatgaacttgtatttacaatcgaaggaaatattgcacattgcctagacatttaatttattagataaattcttttgttagttgttcaactttgtacgtcttataagtcacaggaacaatgtttatctagaacttcggtctcaaattatacagtagtgttcagccatacctgccatgtcacaagaaagagagataaaaagtatttaatagtagacctaatgatgctcatttgtaattgtagatattcgtatatcctttttctgcaaccttgtgaaacatgtgatggtttgacttggaacaaactttgggtctgatatagtaaaatgcaatgtatgtggagggaagtagtagaacaagacagaacaagtgccaaataaggttatatagtagaatacaatgtgtggagggaaatagtagaacaacacaaaacaagtgccaaataaggttacaaggtttatagtagcgattgcttagctgctacaacgacactcatagattagcctggcatttgcaatgtcgctcttgtatttgccataacctcacttaaggtcacacattgcctctgggaccttgacctccgctactgttgtcgcctggccgcgtcgacttcaccaatgccggggtgtccaacctcatcagcttcaccgtcgtcgactgctcccacacaaccgagctgtgggtcctggtcacatatggaaagtgaagaacccaaatgatttcttcacaggaagcttggaccaatcttcaactcatggggcgcttcatcctcggcctcctacgcatgcacttctcctgcttctcctgctggtcatcgcccaaggatgaattgctgctcttgaccatagggattggagcagcatgtagtttatactttatcctggttttctctctcgagatgttgcatggtgtcagtgtgtcagatgtgccgtaacagatgactccaaaatggattgcatgctcttcaaatagctacagataactatcttcacataaaatggagagtacaatgtttataaaagaaggaatatggataaggatccagattctcctatagcatatgaagaggcaaaggaaatggcaagccaaagctgcacaatttctgatgatcactcgttgttactgttatccattatctcctcagaggcattgcttttaaattcaacagcagacatggcagcctttcaagatttggcacattgacataatgacatgggttggtcacggattggatgtcaattttgctccctgtaccttgtagattatcggttatgtcaattttcgaaatttctatcgtgatggataacatttgaataaaacatagttaaataaacatgactactgtttcagtctttcgaaattctgatgctatagtgtcagtatactatgtcattttagggaaaatatatgtcatgtttattttgataaaattatatgatttctcactcaattcttgtcggtggcttcaggatttgttattttgtatatcgatctgtgtcatttgacaaagtactttgacttggtataatatgagtgttacttcgaccaaaagagcttggtaaagtgtgagaaactccgcaaacttcttctgcagacgatgactagcaacagttatgacgagggtcaagatagccgccatacatgatacattgagtacaacatcaagataaacactccctccccacacacaacttttgccttccgttcactctgtatgttgtgtttattacggttgcatatgttgtgtttattatggcatcaacacgttccattagaaaatataactattgtttgtcaagtacaaaatcataatcacatcagcttgtaataatattgcatcactgttttgtaccaaattgtaagttgttgtagcaacgcacgggcaccctactagtatatagagtaagttatcattaaattctcaaagcatcacatcaaaatggcacaagacatttaaaacatacttttggatatatatatacacacacacgcccaaacaagctcttagttgggctgtcactttaac

SEQ ID NO: 203862 - DNA, 4303 bp, Zea Mays
tgatgtccaatactgctatagtagcttctccaagttatgacactgttaggaagatggttcaacttctctcgaaatgaagcttctgtcttcctatgtatagacaagttgttcagttaggaggtctagattctcttaaaatggtgctatctacgagttaggaggtctaggagcacactgaatgttttagaggttgatgaaatcgttgttttcctaaaaaagcattttttctgctttgtttgaaattgtttgggttttcctccccaactttcataattacctatttctattgtatgtttgatcatttggacttctactccatccacaattttggtttattcagtgaggaactatgtttttaaccactctatagtttgtatagacatgcaacattcatctcagggtcaagaaagaagctcaacttggcatgcttcctgtttaaagcaaggcaagaaacatccccgccagatctctgtcgccaaagcagggctggtgaagaagttgtgtttccctcccggattgtcactactttcatatttgttcatttatgtttgttccaatttatgttggttttttacagttacagaatatgtttgttccagttgagttccagtttgaaaactggaacaaccactagcagatgcaaagttcacaaagtagcttgtcaaataatgtgcatgaactggaacaagcaacttgtgcacgaatgagcattactggaacaagtagcttgtgcatgaacgagtaatactgtagatgattggacatgtatgtctattttagatttttaatatttaatgttatatattcagctcataccatacatgaatttgcatttctgtactatactcacttaatgtcctacctgttttgttagcttcaactatccgctttaaactgacaaaaccagaccaaacatatgcaaatctcatatacctgtgaaagcaacaactgatttgccagattggttaattaaacgtaacaataaatagccccgattaaatggcttataaatatacttggatctgttcatttttcacatatcagctattaatgaagccttcactgggttcattttgtactactccattacttatttacagttacaagtattctaagaaacttaatatttcatcatcaaagttgtattcagacagtttcatttacattgctctgattttttgtactaggagctactgacaatggaaagcaacgattagagtaacttgatgagtgaggactattcattcagttgcttcgatcaataagtgaactaatggatgcatgtttcttttgataagtgagctaactactttagtcacaaagttcgtgttgatttctaaacatggtatgatggttttgtcatcctattcgattgagtttgggaaaaagcctgcacattctgaaaacaaacagactgcacattgtgtggctgataaggttgagtgggtaaataagatcaaagctattatttagacatactgaaaatatagtgaaggaagcgtaagcaatttttctgctatatttatgcattgtatccttgtaaaattatcaatattgttctgacttgtggggaaaggtatgagagtattcatttttttgcctcttttctgtttgcattccttcttcagtataatgtttgttagaataaccaggtgaatttacaaatttcatatccatatactttcttcgatgacaaatataaatctacctaggtttgtcataactcataggtcaatcattctaacttcaattgacattttttataaaaagtatcataaggaaaataatatattatcataaaagtgacgtccatctatatcaaattttagatattgatggtggtcagagttaaaaaacagtttgccttaagacaaaccaagatgaacttgtatttacaatcgaaggaaatattgcacattgcctagacatttaatttattagataaattcttttgttagttgttcaactttgtacgtcttataagtcacaggaacaatgtttatctagaacttcggtctcaaattatacagtagtgttcagccatacctgccatgtcacaagaaagagagataaaaagtatttaatagtagacctaatgatgctcatttgtaattgtagatattcgtatatcctttttctgcaaccttgtgaaacatgtgatggtttgacttggaacaaactttgggtctgatatagtaaaatgcaatgtatgtggagggaagtagtagaacaagacagaacaagtgccaaataaggttatatagtagaatacaatgtgtggagggaaatagtagaacaacacaaaacaagtgccaaataaggttacaaggtttatagtagcgattgcttagctgctacaacgacactcatagattagcctggcatttgcaatgtcgctcttgtatttgccataacctcacttaaggtcacacattgcctctgggaccttgacctccgctactgttgtcgcctggccgcgtcgacttcaccaatgccggggtgtccaacctcatcagcttcaccgtcgtcgactgctcccacacaaccgagctgtgggtcctggtaccggtcgcgccccgcctctgctccttctgcttcagcgagtggcagactatcgatacactcgatttcaattgttttttacgctatttactgtattgcaatgggacaatggatgattaggatttgttttttaagactggcccatgatttatcgtcgtatactatttctttaatagattgttcgctacatctactgatctacatgttcacatgtttcaacttctgtcagcatccgtagttactatatgaatgctcattctgtgtcaccttttaagtttacaaatgctcttttccaggtcacatatggaaagtgaagaacccaaatgatttcttcacaggaagcttggaccaatcttcaactcatggggcgcttcatcctcggcctcctacgcatgcacttctcctgcttctcctgctggtcatcgcccaaggatgaattgctgctcttgaccatagggattggagcagcatgtagtttatactttatcctggttttctctctcgagatgttgcatggtgtcagtgtgtcagatgtgccgtaacagatgactccaaaatggattgcatgctcttcaaatagctacagataactatcttcacataaaatggagagtacaatgtttataaaagaaggaatatggataaggatccagattctcctatagcatatgaagaggcaaaggaaatggcaagccaaagctgcacaatttctgatgatcactcgttgttactgttatccattatctcctcagaggcattgcttttaaattcaacagcagacatggcaggtgcaggtcctatcctatccattatctacccctgcatgtgtgccagctattctactctatgtttcaatagtttggaaataattcagagctaaggttttctgatacagcctttcaagatttggcacattgacataatgacatgggttggtcacggattggatgtcaattttgctccctgtaccttgtagattatcggttatgtcaattttcgaaatttctatcgtgatggataacatttgaataaaacatagttaaataaacatgactactgtttcagtctttcgaaattctgatgctatagtgtcagtatactatgtcattttagggaaaatatatgtcatgtttattttgataaaattatatgatttctcactcaattcttgtcggtggcttcaggatttgttattttgtatatcgatctgtgtcatttgacaaagtactttgacttggtataatatgagtgttacttcgaccaaaagagcttggtaaagtgtgagaaactccgcaaacttcttctgcagacgatgactagcaacagttatgacgagggtcaagatagccgccatacatgatacattgagtacaacatcaagataaacactccctccccacacacaacttttgccttccgttcactctgtatgttgtgtttattacggttgcatatgttgtgtttattatggcatcaacacgttccattagaaaatataactattgtttgtcaagtacaaaatcataatcacatcagcttgtaataatattgcatcactgttttgtaccaaattgtaagttgttgtagcaacgcacgggcaccctactagtatatagagtaagttatcattaaattctcaaagcatcacatcaaaatggcacaagacatttaaaacatacttttggatatatatatacacacacacgcccaaacaagctcttagttgggctgtcactttaac

SEQ ID NO: 203863 - DNA, 3883 bp, Zea Mays
tgatgtccaatactgctatagtagcttctccaagttatgacactgttaggaagatggttcaacttctctcgaaatgaagcttctgtcttcctatgtatagacaagttgttcagttaggaggtctagattctcttaaaatggtgctatctacgagttaggaggtctaggagcacactgaatgttttagaggttgatgaaatcgttgttttcctaaaaaagcattttttctgctttgtttgaaattgtttgggttttcctccccaactttcataattacctatttctattgtatgtttgatcatttggacttctactccatccacaattttggtttattcagtgaggaactatgtttttaaccactctatagtttgtatagacatgcaacattcatctcagggtcaagaaagaagctcaacttggcatgcttcctgtttaaagcaaggcaagaaacatccccgccagatctctgtcgccaaagcagggctggtgaagaagttgtgtttccctcccggattgtcactactttcatatttgttcatttatgtttgttccaatttatgttggttttttacagttacagaatatgtttgttccagttgagttccagtttgaaaactggaacaaccactagcagatgcaaagttcacaaagtagcttgtcaaataatgtgcatgaactggaacaagcaacttgtgcacgaatgagcattactggaacaagtagcttgtgcatgaacgagtaatactgtagatgattggacatgtatgtctattttagatttttaatatttaatgttatatattcagctcataccatacatgaatttgcatttctgtactatactcacttaatgtcctacctgttttgttagcttcaactatccgctttaaactgacaaaaccagaccaaacatatgcaaatctcatatacctgtgaaagcaacaactgatttgccagattggttaattaaacgtaacaataaatagccccgattaaatggcttataaatatacttggatctgttcatttttcacatatcagctattaatgaagccttcactgggttcattttgtactactccattacttatttacagttacaagtattctaagaaacttaatatttcatcatcaaagttgtattcagacagtttcatttacattgctctgattttttgtactaggagctactgacaatggaaagcaacgattagagtaacttgatgagtgaggactattcattcagttgcttcgatcaataagtgaactaatggatgcatgtttcttttgataagtgagctaactactttagtcacaaagttcgtgttgatttctaaacatggtatgatggttttgtcatcctattcgattgagtttgggaaaaagcctgcacattctgaaaacaaacagactgcacattgtgtggctgataaggttgagtgggtaaataagatcaaagctattatttagacatactgaaaatatagtgaaggaagcgtaagcaatttttctgctatatttatgcattgtatccttgtaaaattatcaatattgttctgacttgtggggaaaggtatgagagtattcatttttttgcctcttttctgtttgcattccttcttcagtataatgtttgttagaataaccaggtgaatttacaaatttcatatccatatactttcttcgatgacaaatataaatctacctaggtttgtcataactcataggtcaatcattctaacttcaattgacattttttataaaaagtatcataaggaaaataatatattatcataaaagtgacgtccatctatatcaaattttagatattgatggtggtcagagttaaaaaacagtttgccttaagacaaaccaagatgaacttgtatttacaatcgaaggaaatattgcacattgcctagacatttaatttattagataaattcttttgttagttgttcaactttgtacgtcttataagtcacaggaacaatgtttatctagaacttcggtctcaaattatacagtagtgttcagccatacctgccatgtcacaagaaagagagataaaaagtatttaatagtagacctaatgatgctcatttgtaattgtagatattcgtatatcctttttctgcaaccttgtgaaacatgtgatggtttgacttggaacaaactttgggtctgatatagtaaaatgcaatgtatgtggagggaagtagtagaacaagacagaacaagtgccaaataaggttatatagtagaatacaatgtgtggagggaaatagtagaacaacacaaaacaagtgccaaataaggttacaaggtttatagtagcgattgcttagctgctacaacgacactcatagattagcctggcatttgcaatgtcgctcttgtatttgccataacctcacttaaggtcacacattgcctctgggaccttgacctccgctactgttgtcgcctggccgcgtcgacttcaccaatgccggggtgtccaacctcatcagcttcaccgtcgtcgactgctcccacacaaccgagctgtgggtcctggtcacatatggaaagtgaagaacccaaatgatttcttcacaggaagcttggaccaatcttcaactcatggggcgcttcatcctcggcctcctacgcatgcacttctcctgcttctcctgctggtcatcgcccaaggatgaattgctgctcttgaccatagggattggagcagcatgtagtttatactttatcctggttttctctctcgagtgtgtcagatgtgccgtaacagatgactccaaaatggattgcatgctcttcaaatagctacagataactatcttcacataaaatggagagtacaatgtttataaaagaaggaatatggataaggatccagattctcctatagcatatgaagaggcaaaggaaatggcaagccaaagctgcacaatttctgatgatcactcgttgttactgttatccattatctcctcagaggcattgcttttaaattcaacagcagacatggcagcctttcaagatttggcacattgacataatgacatgggttggtcacggattggatgtcaattttgctccctgtaccttgtagattatcggttatgtcaattttcgaaatttctatcgtgatggataacatttgaataaaacatagttaaataaacatgactactgtttcagtctttcgaaattctgatgctatagtgtcagtatactatgtcattttagggaaaatatatgtcatgtttattttgataaaattatatgatttctcactcaattcttgtcggtggcttcaggatttgttattttgtatatcgatctgtgtcatttgacaaagtactttgacttggtataatatgagtgttacttcgaccaaaagagcttggtaaagtgtgagaaactccgcaaacttcttctgcagacgatgactagcaacagttatgacgagggtcaagatagccgccatacatgatacattgagtacaacatcaagataaacactccctccccacacacaacttttgccttccgttcactctgtatgttgtgtttattacggttgcatatgttgtgtttattatggcatcaacacgttccattagaaaatataactattgtttgtcaagtacaaaatcataatcacatcagcttgtaataatattgcatcactgttttgtaccaaattgtaagttgttgtagcaacgcacgggcaccctactagtatatagagtaagttatcattaaattctcaaagcatcacatcaaaatggcacaagacatttaaaacatacttttggatatatatatacacacacacgcccaaacaagctcttagttgggctgtcactttaac

SEQ ID NO: 203864 - DNA, 3643 bp, Zea Mays
tgatgtccaatactgctatagtagcttctccaagttatgacactgttaggaagatggttcaacttctctcgaaatgaagcttctgtcttcctatgtatagacaagttgttcagttaggaggtctagattctcttaaaatggtgctatctacgagttaggaggtctaggagcacactgaatgttttagaggttgatgaaatcgttgttttcctaaaaaagcattttttctgctttgtttgaaattgtttgggttttcctccccaactttcataattacctatttctattgtatgtttgatcatttggacttctactccatccacaattttggtttattcagtgaggaactatgtttttaaccactctatagtttgtatagacatgcaacattcatctcagggtcaagaaagaagctcaacttggcatgcttcctgtttaaagcaaggcaagaaacatccccgccagatctctgtcgccaaagcagggctggtgaagaagttgtgtttccctcccggattgtcactactttcatatttgttcatttatgtttgttccaatttatgttggttttttacagttacagaatatgtttgttccagttgagttccagtttgaaaactggaacaaccactagcagatgcaaagttcacaaagtagcttgtcaaataatgtgcatgaactggaacaagcaacttgtgcacgaatgagcattactggaacaagtagcttgtgcatgaacgagtaatactgtagatgattggacatgtatgtctattttagatttttaatatttaatgttatatattcagctcataccatacatgaatttgcatttctgtactatactcacttaatgtcctacctgttttgttagcttcaactatccgctttaaactgacaaaaccagaccaaacatatgcaaatctcatatacctgtgaaagcaacaactgatttgccagattggttaattaaacgtaacaataaatagccccgattaaatggcttataaatatacttggatctgttcatttttcacatatcagctattaatgaagccttcactgggttcattttgtactactccattacttatttacagttacaagtattctaagaaacttaatatttcatcatcaaagttgtattcagacagtttcatttacattgctctgattttttgtactaggagctactgacaatggaaagcaacgattagagtaacttgatgagtgaggactattcattcagttgcttcgatcaataagtgaactaatggatgcatgtttcttttgataagtgagctaactactttagtcacaaagttcgtgttgatttctaaacatggtatgatggttttgtcatcctattcgattgagtttgggaaaaagcctgcacattctgaaaacaaacagactgcacattgtgtggctgataaggttgagtgggtaaataagatcaaagctattatttagacatactgaaaatatagtgaaggaagcgtaagcaatttttctgctatatttatgcattgtatccttgtaaaattatcaatattgttctgacttgtggggaaaggtatgagagtattcatttttttgcctcttttctgtttgcattccttcttcagtataatgtttgttagaataaccaggtgaatttacaaatttcatatccatatactttcttcgatgacaaatataaatctacctaggtttgtcataactcataggtcaatcattctaacttcaattgacattttttataaaaagtatcataaggaaaataatatattatcataaaagtgacgtccatctatatcaaattttagatattgatggtggtcagagttaaaaaacagtttgccttaagacaaaccaagatgaacttgtatttacaatcgaaggaaatattgcacattgcctagacatttaatttattagataaattcttttgttagttgttcaactttgtacgtcttataagtcacaggaacaatgtttatctagaacttcggtctcaaattatacagtagtgttcagccatacctgccatgtcacaagaaagagagataaaaagtatttaatagtagacctaatgatgctcatttgtaattgtagatattcgtatatcctttttctgcaaccttgtgaaacatgtgatggtttgacttggaacaaactttgggtctgatatagtaaaatgcaatgtatgtggagggaagtagtagaacaagacagaacaagtgccaaataaggttatatagtagaatacaatgtgtggagggaaatagtagaacaacacaaaacaagtgccaaataaggttacaaggtttatagtagcgattgcttagctgctacaacgacactcatagattagcctggcatttgcaatgtcgctcttgtatttgccataacctcacttaaggtcacacattgcctctgggaccttgacctccgctactgttgtcgcctggccgcgtcgacttcaccaatgccggggtgtccaacctcatcagcttcaccgtcgtcgactgctcccacacaaccgagctgtgggtcctggtcacatatggaaagtgaagaacccaaatgatttcttcacaggaagcttggaccaatcttcaactcatggggcgcttcatcctcggcctcctacgcatgcacttctcctgcttctcctgctggtcatcgcccaagatgttgcatggtgtcagtgtgtcagatgtgccgtaacagatgactccaaaatggattgcatgctcttcaaatagctacagataactatcttcacataaaatggagagtacaatgtttataaaagaaggaatatggataaggatccagattctcctatagcatatgaagaggcaaaggaaatggcaagccaaagctgcacaatttctgatgatcactcgttgttactgttatccattatctcctcagaggcattgcttttaaattcaacagcagacatggcaggtgcaggtcctatcctatccattatctacccctgcatgtgtgccagctattctactctatgtttcaatagtttggaaataattcagagctaaggttttctgatacaggatttgttattttgtatatcgatctgtgtcatttgacaaagtactttgacttggtataatatgagtgttacttcgaccaaaagagcttggtaaagtgtgagaaactccgcaaacttcttctgcagacgatgactagcaacagttatgacgagggtcaagatagccgccatacatgatacattgagtacaacatcaagataaacactccctccccacacacaacttttgccttccgttcactctgtatgttgtgtttattacggttgcatatgttgtgtttattatggcatcaacacgttccattagaaaatataactattgtttgtcaagtacaaaatcataatcacatcagcttgtaataatattgcatcactgttttgtaccaaattgtaagttgttgtagcaacgcacgggcaccctactagtatatagagtaagttatcattaaattctcaaagcatcacatcaaaatggcacaagacatttaaaacatacttttggatatatatatacacacacacgcccaaacaagctcttagttgggctgtcactttaac

SEQ ID NO: 203865 - DNA, 785 bp, Zea Mays
gcctaacagaccgagatgtatcgagttttgcgccttcgatacgtcgtttacgtattcagtttttcacacaacggcggcgatgtcgtcggcctcctcctccgccgccgccgccaacgccggtgaaggaagcgggggtgcggaggagggcgtggagatcacttacgtgagctatggcggggagcagcatctgccgctggtgatgtcgctggtggacgaggagctcagcgagccctattccatcttcacctaccgctacttcgtctacctctggccgcagctcaccttcctggtgacacttgaagcagaagttactaataagggtgcccttgctctgtatggtcgccttgggtttatccgagcaaagagattgtacagatactatctaaatggtgtagacgcatttcggctgaaactactgtttccgcgccctgataatgacccacaaatatttggtataattgactagattctccctactcgtgacagcatcctaatcagtaggttgaattgagttggagatctgtaatccgatcatttttcgctctgttcatgcttcctcagctatcatgtggctgtaatattgctgtacttacatataaatgttcgaggtgttttattttcttcctgttctttgataagggtgttgtaagacctttttcttttgtgagaaaaacaaaacgcatgccgcagttgcaagaggactgtgcagttcttttgctcaataaacaaaacgcatgccgcagttgctgtagtgtttagggggtgtttgggaacaaagtttttct

SEQ ID NO: 203866 - DNA, 1625 bp, Zea Mays
aacgtccggatcgaagcctggctccacgcgaccgacgcagcggcggctccacgcgaccggcgcgatggcggctttgacgcgaccggcacggcggcggcgcacagccccgacaacgaccctccccgctgccttctccacgatccctacaacaccaattatagttggggaaggtgaacctcctccctcttgggatccggtaccaactccaaaagctatggttggaaaaggctccccaaggttcaacataggtggttccccaaagttgcgtaggttcattcctacaacaagtgctactaaaaagaagacttctcctaaatgcagtggggcaaaaaagagtggaagttctccaagagtgaaacaaagagcggattggaatccaggccttgagaggtctcttgttgacattctccatgaatttaaagaaagtggatatagaggtgacaatggttggaactcggaagggtggaatagaatggtcaaggagtttcatgtgaggaacaagtatgtctcctttacaaagtctcaaattcaggataaagaaggtcagctgaagagagactacaagatgctcaaagcagcaaagcaacagagtgggtccacctggaatgagaaaaggaatatggttgaaggaccaccagctttgtgggagaatctcattgtgacatttcctaaaatcaagaagtttaacaacaacaaggcaaccttcccgctctttgatgctttgggagagctttatgatggacacttggctgaagggacttggaattgcacttctcttgatgcaccgcgagaggaagaaccgaatgagcaacttcaggatgtagaagatggaccacaaggctttgatctgaatgttgttcatgatgtatatgatgaagttgatgatgcactcactgaaaggaatgaagatatgcttcaaggaagggctaatactctgtcacgagatgaagaaagtgggcagcgaagacctgctgcgtcaagaaacaagcaagaaaaggaactaaagaagcctagaaagactgacaacatagaaaatatgatgaacaaatacctagaaacgaggagcaagcaagtagaagatgaagctgcaagagaaaaggaagcaagagaaaaggagacaagagaaaaggaggcaactcaaagtgaagatttctccatcaaaaggtgcatatcagttctgaacacaatggaagaagtgaccaaactggagaaggcaaaagcatattcagtcttcaccaagagcaaagagaatagagagactttcatatgtgcatgtgaagcggatcaagaatcagctttgatttggctaagaaatgagatggcttagtaggtttgggcgatcaataggtgatgcttagcacatctggaggtttcttattttgaactgacatgcttagttataaagtggtgtttctttttagcacatctgttctatctcttagctgttgaagatgtcagtttatacctgtctatcaatccatgtcacaagttatacttgttttttcacatgcctcttgatcctggaatattatgctcagctctgctgatgaagagaagaacgcagggctgtctgactctggcgttgtagattaatggccagttgatgactgtgctaacgatacagc

SEQ ID NO: 203867 - DNA, 663 bp, Zea Mays
actcccgtcactccttatcccttcccatcgatcccatgccctgttgccgcgcccgcacctccttccccatccgcgcccgccgcggctcctccggcagctccgccacgcgcccaaccgcaacctgcccgcacgggccaccgctgcctggtagtatctatcaaatcagccacctgtcctctttttcttcaaatcaagtccgtttccctttcctttctaccctctccctcgtctccggcgggcggtggcctcacctccctctccccgtcgccctgatggctccctccacagctctcgctccggtggccttccgctccgccttctcgacgccgctcgcgtcgaaacctacccgtaatagaatgaacatagagggcgctttctgtttgccgtgttccacaaggaagagagcaagttatagacctttccgagtgtacagtttatttggagggaagaaggataaagatgagaatggtgatgaggcgccatcgaaagcaggaatttttggaaatatgcaaaatctctatgaaactgttaagaaggcccaaatggttgtccaagttgaggctgtccgggtgcaaaaggagcttgcagcgactgagattgatggttattgtgaaggcgaactaatcaagagctgttcgtttcaaggcaaatagttggtgtatc

SEQ ID NO: 203868 - DNA, 3159 bp, Zea Mays
gtggcggtggcggctgaaagcctgcaaccaaacaggccccctcgattagcgaaaaaaagcccagcgaaaactaaaaccctcgcatctttcctttcctccccaactgcggccgcctccacccgctccaccgccgatggccgagcctgagcctctgccgcaggtgtcgtctgaacctaccactccgccgcaggaaggcagcggaaggactaagacaaagaacaagaagaatcgttccaagaagcaaccgaagcgagccggcgctgacaccgacgggttatcctcaggcgccagcaccatggttgaggaccctttcttcgtcctcgccggcggaaaggaaggagggtttctggatttggaggagatcgatgaggcagacttcggcatcttcggaggcgtcttggatgacgtaggacagagcgtcgaggaagctgggaaggatcatgggaagaagaagaagaaaacaaagaagcggaagcgtgggggtgatggcgagggcttcagtggcgacgctgcgttggtagttgagaatgaccaggtggatgtcgagaaagtggagaaaaaggtcgaggatggggagaaaggggataagaaggggaagagaaagatgaacatgaagaagaggaaggtgaaggataatgagatgaacagggagagtgatgaggatgttgctagtgacaaagcagaagatgacactgagaatatggaacaaaatgaggacgatgagctgattttgggcgaagatgatgtctctgcatggagggagcttaggctgcaccctctgcttctcaaggcgatgcgcagacttggattcaaagagccaacacctatacaaaagtcttgctttcctgctgcagctcatcgaggcaaggatgttatcggtgctgcagagacaggttccggaaagacacttgcttttggcctcccagttttgcaacgtctccttgaagagcgagaaaaggccacaagattgcagcaggaagatgaaaaaatggaggaacgttcttgtggaagccctcttcgtgctcttattctgacacccactagggagctcgccaaacaggtatgcgatcatctaaaagatgtggccaagttcttaggaatccatgttgttccaattgttggtggtctatcaatggaaaaacaagagagacttttgaaaaaaaagcctgaaattgttgttggaactcctggaagattgtgggaacacatgtcgatgaacaatcaacacctagttgagctgcactcattgtcattcttcatcttggatgaggctgatagaatgatcgaacgaggccatttccgtgaattacaatctatcattgagatgcttccactgaccaatggttctgatgaacaagctgcaagaacaatgccaaactgtgagactgtaccaattttgcaaataaagaagcggcaaacctttgtgttctcagccacacttgcactctcatctaattttcggaagaagttgaagcgtggcctatctacttcgaaggcatcgacgcctgatgatgtcagctctattgaagcattgtcaaaacaagctggaatgaaatctaatgctgaaatagttgatttgacaaaggcttcaatcttgcctgagaagcttgaagaatcttttattgagtgcagtgaagaggataaggatgcctatctgtattatatattgagtgttcatggtcaaggtcgcacaataatattttgtacatcaatcgccgcattacgtcacatttcttccatactgcgcattcttggaattaatgtattgacaaaccatgctcaaatgcaacaaagagctcgcatgaaggctgtggatcgcttccgtgaaagtgaaaattccattttggtcgcaactgatggttttgcaaggggtatggattttgatgatgtgcgaacagttatccattatcagttgccacattcaactgatgtctatatccacagaagtggaaggacagcacgcaagtcattggctggctgcagcattgcgttaatctctcctactgacaagtccaggttttattctctttgcaaatctttgtcaaaggagaatctccagcagtttcctgtagatcatacttacatgtctggagtgatgaacagactctcacttgctcggcagattgacaagattgcccgtaaaacttcacaggaaaatgctaacaaatcctggcttcaaaggaatgctgaatctatgggattgattttggatactagtgacagtgaagaagaccatgtgcagggacacaagaaacgaaaggctacttctgcacatctccaaaagcttcaacaggagttgagtgatctcttgcaatgcccattgcagcctaagactttctctcgccgctatttggctggggctggtgtctcacccttacttcagaagcaactagaagagttggccaagagaaatgcaagcaacaatagcagcaagagtaagaataaaggatctgggtttgttgttattggtcaggatcgtgtcgagcccttgcaagcacttcaaaattctgggcaagaggtctgtgtgaacatagacaaagaaagggaaaagcgaagagtcgctgagaactggaggcggaagaagcatgaagaaaagaaacgtacacaagagcagaagcgaaaggataagagaaaagctaaagagatggcttgatgacacatgagatagctaggggccttcaaggggtttacggaagctctttaagctcgcgtcaatcctttcagaaaggaaaggaatgcattcatcaatgttttgctgtaatacaatgcgtgcgctaagttagcgcttgcctttaacagattggaggtggtagtttgattttgttttgcggctgaagaaaataaacttagaatgcacgagcactggctctggatgagaaaagaaattaagcagatagctcacgtataacctcattggatctgtaatatgtacgcctatcagatttaaggtacaaattaattttattagggatgggaatcgactgacctggcctatctttggacttggacctggcccattgccttaaggccaattttaggagtgatggagattatgatcttgctggctatcatgggtttggcctagatatttttctgctataatgcatggacatgaatcctatcaatatttctataaagtattgtgataacagattaaaa

SEQ ID NO: 203869 - DNA, 3196 bp, Zea Mays
ctcagtcttagggtttctcaacatcaaacacctaacaaaaggcagaggcaggcttgcccgggtggcggtggcggctgaaagcctgcaaccaaacaggccccctcgattagcgaaaaaaagcccagcgaaaactaaaaccctcgcatctttcctttcctccccaactgcggccgcctccacccgctccaccgccgatggccgagcctgagcctctgccgcaggtgtcgtctgaacctaccactccgccgcaggaaggcagcggaaggactaagacaaagaacaagaagaatcgttccaagaagcaaccgaagcgagccggcgctgacaccgacgggttatcctcaggcgccagcaccatggttgaggaccctttcttcgtcctcgccggcggaaaggaaggagggtttctggatttggaggagatcgatgaggcagacttcggcatcttcggaggcgtcttggatgacgtaggacagagcgtcgaggaagctgggaaggatcatgggaagaagaagaagaaaacaaagaagcggaagcgtgggggtgatggcgagggcttcagtggcgacgctgcgttggtagttgagaatgaccaggtggatgtcgagaaagtggagaaaaaggtcgaggatggggagaaaggggataagaaggggaagagaaagatgaacatgaagaagaggaaggtgaaggataatgagatgaacagggagagtgatgaggatgttgctagtgacaaagcagaagacatgcaagatgacactgagaatatggaacaaaatgaggacgatgagctgattttgggcgaagatgatgtctctgcatggagggagcttaggctgcaccctctgcttctcaaggcgatgcgcagacttggattcaaagagccaacacctatacaaaagtcttgctttcctgctgcagctcatcgaggcaaggatgttatcggtgctgcagagacaggttccggaaagacacttgcttttggcctcccagttttgcaacgtctccttgaagagcgagaaaaggccacaagattgcagcaggaagatgaaaaaatggaggaacgttcttgtggaagccctcttcgtgctcttattctgacacccactagggagctcgccaaacaggtatgcgatcatctaaaagatgtggccaagttcttaggaatccatgttgttccaattgttggtggtctatcaatggaaaaacaagagagacttttgaaaaaaaagcctgaaattgttgttggaactcctggaagattgtgggaacacatgtcgatgaacaatcaacacctagttgaggctgatagaatgatcgaacgaggccatttccgtgaattacaatctatcattgagatgcttccactgaccaatggttctgatgaacaagctgcaagaacaatgccaaactgtgagactgtaccaattttgcaaataaagaagcggcaaacctttgtgttctcagccacacttgcactctcatctaattttcggaagaagttgaagcgtggcctatctacttcgaaggcatcgacgcctgatgatgtcagctctattgaagcattgtcaaaacaagctggaatgaaatctaatgctgaaatagttgatttgacaaaggcttcaatcttgcctgagaagcttgaagaatcttttattgagtgcagtgaagaggataaggatgcctatctgtattatatattgagtgttcatggtcaaggtcgcacaataatattttgtacatcaatcgccgcattacgtcacatttcttccatactgcgcattcttggaattaatgtattgacaaaccatgctcaaatgcaacaaagagctcgcatgaaggctgtggatcgcttccgtgaaagtgaaaattccattttggtcgcaactgatggttttgcaaggggtatggattttgatgatgtgcgaacagttatccattatcagttgccacattcaactgatgtctatatccacagaagtggaaggacagcacgcaagtcattggctggctgcagcattgcgttaatctctcctactgacaagtccaggttttattctctttgcaaatctttgtcaaaggagaatctccagcagtttcctgtagatcatacttacatgtctggagtgatgaacagactctcacttgctcggcagattgacaagattgcccgtaaaacttcacaggaaaatgctaacaaatcctggcttcaaaggaatgctgaatctatgggattgattttggatactagtgacagtgaagaagaccatgtgcagggacacaagaaacgaaaggctacttctgcacatctccaaaagcttcaacaggagttgagtgatctcttgcaatgcccattgcagcctaagactttctctcgccgctatttggctggggctggtgtctcacccttacttcagaagcaactagaagagttggccaagagaaatgcaagcaacaatagcagcaagagtaagaataaaggatctgggtttgttgttattggtcaggatcgtgtcgagcccttgcaagcacttcaaaattctgggcaagaggtctgtgtgaacatagacaaagaaagggaaaagcgaagagtcgctgagaactggaggcggaagaagcatgaagaaaagaaacgtacacaagagcagaagcgaaaggataagagaaaagctaaagagatggcttgatgacacatgagatagctaggggccttcaaggggtttacggaagctctttaagctcgcgtcaatcctttcagaaaggaaaggaatgcattcatcaatgttttgctgtaatacaatgcgtgcgctaagttagcgcttgcctttaacagattggaggtggtagtttgattttgttttgcggctgaagaaaataaacttagaatgcacgagcactggctctggatgagaaaagaaattaagcagatagctcacgtataacctcattggatctgtaatatgtacgcctatcagatttaaggtacaaattaattttattagggatgggaatcgactgacctggcctatctttggacttggacctggcccattgccttaaggccaattttaggagtgatggagattatgatcttgctggctatcatgggtttggcctagatatttttctgctataatgcatggacatgaatcctatcaatatttctataaagtattgtgataacagattaaaa

SEQ ID NO: 203870 - DNA, 2109 bp, Zea Mays
gaccatcaaagtgacacaggttgcgatgtttccaaataatccaggcccagatgcagttcagtttatagtgaaccacgcaacggtagaagttatattctgtgtgccccaaactctaagcgctattttaagctttattactcaaatgccgtgtgttcgtcttattgtggtggttggtggagatgattcaaatatgccatctgcaccagcaactactgaatgcaaaattatgacgtacaacaggctacacaatgagggaaagatgagtcctcaaacttttcgtccaccaaaacctgaagatatagccactatctgctacaccagtggcactactggcacaccaaagggagctgtactttctcatgagaacttaattgcaaatgtagcagggtcaagtttaggcattaagttttacccctctgatgtctatttgtatcactcctcaggtacatctcgtatctacctttggctcacatctatgagagagctaaccaggttgcattgcttcactatggtgttgccattggattctaccaaggggataacttgaagctgatggatgatttggctgttctgagaccaacaatattcgcaagtgttccccggttatataacaaaatttatgctgcaattacaaatgctgtgaaggagtctggggggttgagagaaaggttgtatcatactgcatacaatgccaagcgacatgcaatgataaatggtagaaacccatcacctatgtgggacaagttggtatttaacaaaattaaagctagacttggtggacgaatgaggcttatgacttcaggtgcttctccattgtcaccagatgtcatggaatttttaagaatatgcttcggtgaagttcttgaagggtatggaatgacagagacatcttgtgtcatcagtacaatgaatattggtgacagatcaattggacatgttggatctccaaatccttcttgtgaggttaaacttgtggacgtcccagaaatgaattatacttcggaggatcaaccgtatcctcgtggagagatttgtgttaggggacctataatattctgtggttactataaagatgaagtccaaacaagagaggtcattgatgaggatggttggttacatactggagacataggtttgtggctgcctggagggcgtctaaaaattatagataggaaaaagaacattttcaagttagctcaaggagaatacatagctccagagaagattgagaatgtctatgctaagtgcaagttcattgctcaatgctttatatatggtgatagtttcaactcttccctagttgccattgtagcagtcgaaccggatgtgttgaaggcttgggctgcatcagaaggaatccagtacgaggacttgagacagctctgtgctgatcctagagcaacagctgctgtcctggctgatatggattccattgcgaaggaagcacagctgagaggtttcgagtttgctaaagcggttactcttgttgctgagccgttcacattggataatggccttctcaccccaacattcaaggtcaagaggccgcaagccaaagcatactttgcaaaagagatctcagacatgtatgcacggttgctagagacagagttagctaggtcgaagttgtaacttgtgcggtatcaggagaagggccatcaatacagccgtacaggagattggattctgcatttttttattccacctcacgaaataagtagtaaaatctttttactgatacgggaaataacggatcatgccatgctccggagtcgatagtttttttcaccagacggggcagtgcttggcgcatgctgaatatatggttctagttataaagaaatgtttttacagagtgtatattgggtctgaacagctgccctggaaggtagttcacagaaaatatattggtattacaaatgcaatactaaaaaaattgtgtcttccgattgtattgtcagtcttttatcaacactagtggaagtgtacgcgctcggtacacgataaaaatattacatacaaaatgtttataaatacctatataatattaaatttattgatatgttggtcttttaaggtaattgcttgacaagttttctgttttcaagt

SEQ ID NO: 203871 - DNA, 2183 bp, Zea Mays
gttagtccaaagcaagttggggtagactagagggtgcacgaattggtctatattttataaacagaccggagtggatcatacttgaccatgcttgtgcggcatactcatatgtatctgtgccgctttatgatactctcggcccagatgcagttcagtttatagtgaaccacgcaacggtagaagttatattctgtgtgccccaaactctaagcgctattttaagctttattactcaaatgccgtgtgttcgtcttattgtggtggttggtggagatgattcaaatatgccatctgcaccagcaactactgaatgcaaaattatgacgtacaacaggctacacaatgagggaaagatgagtcctcaaacttttcgtccaccaaaacctgaagatatagccactatctgctacaccagtggcactactggcacaccaaagggagctgtactttctcatgagaacttaattgcaaatgtagcagggtcaagtttaggcattaagttttacccctctgatgtgtacatctcgtatctacctttggctcacatctatgagagagctaaccaggttgcattgcttcactatggtgttgccattggattctaccaaggggataacttgaagctgatggatgatttggctgttctgagaccaacaatattcgcaagtgttccccggttatataacaaaatttatgctgcaattacaaatgctgtgaaggagtctggggggttgagagaaaggttgtatcatactgcatacaatgccaagcgacatgcaatgataaatggtagaaacccatcacctatgtgggacaagttggtatttaacaaaattaaagctagacttggtggacgaatgaggcttatgacttcaggtgcttctccattgtcaccagatgtcatggaatttttaagaatatgcttcggtgaagttcttgaagggtatggaatgacagagacatcttgtgtcatcagtacaatgaatattggtgacagatcaattggacatgttggatctccaaatccttcttgtgaggttaaacttgtggacgtcccagaaatgaattatacttcggaggatcaaccgtatcctcgtggagagatttgtgttaggggacctataatattctgtggttactataaagatgaagtccaaacaagagaggtcattgatgaggatggttggttacatactggagacataggtttgtggctgcctggagggcgtctaaaaattatagataggaaaaagaacattttcaagttagctcaaggagaatacatagctccagagaagattgagaatgtctatgctaagtgcaagttcattgctcaatgctttatatatggtgatagtttcaactcttccctagttgccattgtagcagtcgaaccggatgtgttgaaggcttgggctgcatcagaaggaatccagtacgaggacttgagacagctctgtgctgatcctagagcaacagctgctgtcctggctgatatggattccattgcgaaggaagcacagctgagaggtttcgagtttgctaaagcggttactcttgttgctgagccgttcacattggataatggccttctcaccccaacattcaaggtcaagaggccgcaagccaaagcatactttgcaaaagagatctcagacatgtatgcacggttgctagagacagagttagctaggtcgaagttgtaacttgtgcggtatcaggagaagggccatcaatacagccgtacaggagattggattctgcatttttttattccacctcacgaaataagtagtaaaatctttttactgatacgggaaataacggatcatgccatgctccggagtcgatagtttttttcaccagacggggcagtgcttggcgcatgctgaatatatggttctagttataaagaaatgtttttacagagtgtatattgggtctgaacagctgccctggaaggtagttcacagaaaatatattggtattacaaatgcaatactaaaaaaattgtgtcttccgattgtattgtcagtcttttatcaacactagtggaagtgtacgcgctcggtacacgataaaaatattacatacaaaatgtttataaatacctatataatattaaatttattgatatgttggtcttttaaggtaattgcttgacaagttttctgttttcaagt

SEQ ID NO: 203872 - DNA, 2705 bp, Zea Mays
cccactttgtttagtgatggagactagagaggacgctggttgtttcatgcaaacgagatcctcttgccgttgcgatgcacatgtatcaacagtatgacatgctgctataaagtataaacaatggaaagcatagagaaactggctacagtgtcgttctgcctgagaagctgcacactggaaagtggaatgtgtacagatctgcacattctcctctaagattaataaataaattccctgataacccggagattggaacgctgcatgataattttgtatatgcagttgaaactttccgagattgtagatatttgggtacaagaatccgcccagacgggacagttggagactacaagtggatgacgtatggagaagctagcacgagcagaactgcaataggttctggtcttatttatcatggaatatctgaaggtgcacgaattggtctatattttataaacagaccggagtggatcatacttgaccatgcttgtgcggcatactcatatgtatctgtgccgctttatgatactctcggcccagatgcagttcagtttatagtgaaccacgcaacggtagaagttatattctgtgtgccccaaactctaagcgctattttaagctttattactcaaatgccgtgtgttcgtcttattgtggtggttggtggagatgattcaaatatgccatctgcaccagcaactactgaatgcaaaattatgacgtacaacaggctacacaatgagggaaagatgagtcctcaaacttttcgtccaccaaaacctgaagatatagccactatctgctacaccagtggcactactggcacaccaaagggagctgtactttctcatgagaacttaattgcaaatgtagcagggtcaagtttaggcattaagttttacccctctgatgtgtacatctcgtatctacctttggctcacatctatgagagagctaaccaggttgcattgcttcactatggtgttgccattggattctaccaaggggataacttgaagctgatggatgatttggctgttctgagaccaacaatattcgcaagtgttccccggttatataacaaaatttatgctgcgtaagataaaatattgtaatccggattttgtttttcatgtttggcgtaactattgttggctatttcttttaagattattgttttcctttgtgcggataatttgctgattgcataatcaccttgtagaattacaaatgctgtgaaggagtctggggggttgagagaaaggttgtatcatactgcatacaatgccaagcgacatgcaatgataaatggtagaaacccatcacctatgtgggacaagttggtatttaacaaaattaaagctagacttggtggacgaatgaggcttatgacttcaggtgcttctccattgtcaccagatgtcatggaatttttaagaatatgcttcggtgaagttcttgaagggtatggaatgacagagacatcttgtgtcatcagtacaatgaatattggtgacagatcaattggacatgttggatctccaaatccttcttgtgaggttaaacttgtggacgtcccagaaatgaattatacttcggaggatcaaccgtatcctcgtggagagatttgtgttaggggacctataatattctgtggttactataaagatgaagtccaaacaagagaggtcattgatgaggatggttggttacatactggagacataggtttgtggctgcctggagggcgtctaaaaattatagataggaaaaagaacattttcaagttagctcaaggagaatacatagctccagagaagattgagaatgtctatgctaagtgcaagttcattgctcaatgctttatatatggtgatagtttcaactcttccctagttgccattgtagcagtcgaaccggatgtgttgaaggcttgggctgcatcagaaggaatccagtacgaggacttgagacagctctgtgctgatcctagagcaacagctgctgtcctggctgatatggattccattgcgaaggaagcacagctgagaggtttcgagtttgctaaagcggttactcttgttgctgagccgttcacattggataatggccttctcaccccaacattcaaggtcaagaggccgcaagccaaagcatactttgcaaaagagatctcagacatgtatgcacggttgctagagacagagttagctaggtcgaagttgtaacttgtgcggtatcaggagaagggccatcaatacagccgtacaggagattggattctgcatttttttattccacctcacgaaataagtagtaaaatctttttactgatacgggaaataacggatcatgccatgctccggagtcgatagtttttttcaccagacggggcagtgcttggcgcatgctgaatatatggttctagttataaagaaatgtttttacagagtgtatattgggtctgaacagctgccctggaaggtagttcacagaaaatatattggtattacaaatgcaatactaaaaaaattgtgtcttccgattgtattgtcagtcttttatcaacactagtggaagtgtacgcgctcggtacacgataaaaatattacatacaaaatgtttataaatacctatataatattaaatttattgatatgttggtcttttaaggtaattgcttgacaagttttctgttttcaagt

SEQ ID NO: 203873 - DNA, 3285 bp, Zea Mays
cgcaccatatcgctatccctaccctctcggttcccacgccaacaacgcatatccgccacctcggggggtccctccctcctcggcctcgcgcgcgccttcccacacatcctcctcccccccacgccacgaaacgccaaagggagggagcccgagcctagcaggagcagcgcaaggaaacaatggcgcgggaggagcaggagcagtccgcattgggcgccgcccacgtccaccaccaccagcctccggccggcggatgcggcctctccgccaaccccaccgccgccgcagccgagtacgcccacgcccccacagttttgatgcaggaaacggtggtgcgagtgaaaaaaagaagaagaggtgctgctctttcagtttggattttggaattcgcttctgctgtgcctgtgtcggctgattacggtgcacccactttgtttagtgatggagactagagaggacgctggttgtttcatgcaaacgagatcctcttgccgttgcgatgcacatgtatcaacagtatgacatgctgctataaagtataaacaatggaaagcatagagaaactgtatccctatattaatcgatgcagtgggcaggcttacgttcgaatctgtacactgttttttttttacaattaatgtggacatcaatggtttgctgctatctgttgcttacctgcccatcgcccaatacccatcggccccatttatatcattcccagtttcaactgttcatgtttcagtgagcgaccatttctcagaggcaacatgcatattttccatctgtatccaaacctaagatttcattagcacttgacttttcatgtctttttattcaacagaacagggctacagtgtcgttctgcctgagaagctgcacactggaaagtggaatgtgtacagatctgcacattctcctctaagattaataaataaattccctgataacccggagattggaacgctgcatgataattttgtatatgcagttgaaactttccgagattgtagatatttgggtacaagaatccgcccagacgggacagttggagactacaagtggatgacgtatggagaagctagcacgagcagaactgcaataggttctggtcttatttatcatggaatatctgaaggtgcacgaattggtctatattttataaacagaccggagtggatcatacttgaccatgcttgtgcggcatactcatatgtatctgtgccgctttatgatactctcggcccagatgcagttcagtttatagtgaaccacgcaacggtagaagttatattctgtgtgccccaaactctaagcgctattttaagctttattactcaaatgccgtgtgttcgtcttattgtggtggttggtggagatgattcaaatatgccatctgcaccagcaactactgaatgcaaaattatgacgtacaacaggctacacaatgagggaaagatgagtcctcaaacttttcgtccaccaaaacctgaagatatagccactatctgctacaccagtggcactactggcacaccaaagggagctgtactttctcatgagaacttaattgcaaatgtagcagggtcaagtttaggcattaagttttacccctctgatgtgtacatctcgtatctacctttggctcacatctatgagagagctaaccaggttgcattgcttcactatggtgttgccattggattctaccaaggggataacttgaagctgatggatgatttggctgttctgagaccaacaatattcgcaagtgttccccggttatataacaaaatttatgctgcaattacaaatgctgtgaaggagtctggggggttgagagaaaggttgtatcatactgcatacaatgccaagcgacatgcaatgataaatggtagaaacccatcacctatgtgggacaagttggtatttaacaaaattaaagctagacttggtggacgaatgaggcttatgacttcaggtgcttctccattgtcaccagatgtcatggaatttttaagaatatgcttcggtgaagttcttgaagggtatggaatgacagagacatcttgtgtcatcagtacaatgaatattggtgacagatcaattggacatgttggatctccaaatccttcttgtgaggttaaacttgtggacgtcccagaaatgaattatacttcggaggatcaaccgtatcctcgtggagagatttgtgttaggggacctataatattctgtggttactataaagatgaagtccaaacaagagaggtcattgatgaggatggttggttacatactggagacataggtttgtggctgcctggagggcgtctaaaaattatagataggaaaaagaacattttcaagttagctcaaggagaatacatagctccagagaagattgagaatgtctatgctaagtgcaagttcattgctcaatgctttatatatggtgatagtttcaactcttccctagttgccattgtagcagtcgaaccggatgtgttgaaggcttgggctgcatcagaaggaatccagtacgaggacttgagacagctctgtgctgatcctagagcaacagctgctgtcctggctgatatggattccattgcgaaggaagcacagctgagaggtttcgagtttgctaaagcggttactcttgttgctgagccgttcacattggataatggccttctcaccccaacattcaaggtcaagaggccgcaagccaaagcatactttgcaaaagagatctcagacatgtatgcacggttgctagagacagagttagctaggtcgaagttgtaacttgtgcggtatcaggagaagggccatcaatacagccgtacaggagattggattctgcatttttttattccacctcacgaaataagtagtaaaatctttttactgatacgggaaataacggatcatgccatgctccggagtcgatagtttttttcaccagacggggcagtgcttggcgcatgctgaatatatggttctagttataaagaaatgtttttacagagtgtatattgggtctgaacagctgccctggaaggtagttcacagaaaatatattggtattacaaatgcaatactaaaaaaattgtgtcttccgattgtattgtcagtcttttatcaacactagtggaagtgtacgcgctcggtacacgataaaaatattacatacaaaatgtttataaatacctatataatattaaatttattgatatgttggtcttttaaggtaattgcttgacaagttttctgttttcaagt

SEQ ID NO: 203874 - DNA, 2788 bp, Zea Mays
ccccgaccgacgcgacggcgacgcaccatatcgctatccctaccctctcggttcccacgccaacaacgcatatccgccacctcggggggtccctccctcctcggcctcgcgcgcgccttcccacacatcctcctcccccccacgccacgaaacgccaaagggagggagcccgagcctagcaggagcagcgcaaggaaacaatggcgcgggaggagcaggagcagtccgcattgggcgccgcccacgtccaccaccaccagcctccggccggcggatgcggcctctccgccaaccccaccgccgccgcagccgagtacgcccacgaacagggctacagtgtcgttctgcctgagaagctgcacactggaaagtggaatgtgtacagatctgcacattctcctctaagattaataaataaattccctgataacccggagattggaacgctgcatgataattttgtatatgcagttgaaactttccgagattgtagatatttgggtacaagaatccgcccagacgggacagttggagactacaagtggatgacgtatggagaagctagcacgagcagaactgcaataggttctggtcttatttatcatggaatatctgaaggtgcacgaattggtctatattttataaacagaccggagtggatcatacttgaccatgcttgtgcggcatactcatatgtatctgtgccgctttatgatactctcggcccagatgcagttcagtttatagtgaaccacgcaacggtagaagttatattctgtgtgccccaaactctaagcgctattttaagctttattactcaaatgccgtgtgttcgtcttattgtggtggttggtggagatgattcaaatatgccatctgcaccagcaactactgaatgcaaaattatgacgtacaacaggctacacaatgagggaaagatgagtcctcaaacttttcgtccaccaaaacctgaagatatagccactatctgctacaccagtggcactactggcacaccaaagggagctgtactttctcatgagaacttaattgcaaatgtagcagggtcaagtttaggcattaagttttacccctctgatgtctatttgtatcactcctcaggtacatctcgtatctacctttggctcacatctatgagagagctaaccaggttgcattgcttcactatggtgttgccattggattctaccaaggggataacttgaagctgatggatgatttggctgttctgagaccaacaatattcgcaagtgttccccggttatataacaaaatttatgctgcaattacaaatgctgtgaaggagtctggggggttgagagaaaggttgtatcatactgcatacaatgccaagcgacatgcaatgataaatggtagaaacccatcacctatgtgggacaagttggtatttaacaaaattaaagctagacttggtggacgaatgaggcttatgacttcaggtgcttctccattgtcaccagatgtcatggaatttttaagaatatgcttcggtgaagttcttgaagggtatggaatgacagagacatcttgtgtcatcagtacaatgaatattggtgacagatcaattggacatgttggatctccaaatccttcttgtgaggttaaacttgtggacgtcccagaaatgaattatacttcggaggatcaaccgtatcctcgtggagagatttgtgttaggggacctataatattctgtggttactataaagatgaagtccaaacaagagaggtcattgatgaggatggttggttacatactggagacataggtttgtggctgcctggagggcgtctaaaaattatagataggaaaaagaacattttcaagttagctcaaggagaatacatagctccagagaagattgagaatgtctatgctaagtgcaagttcattgctcaatgctttatatatggtgatagtttcaactcttccctagttgccattgtagcagtcgaaccggatgtgttgaaggcttgggctgcatcagaaggaatccagtacgaggacttgagacagctctgtgctgatcctagagcaacagctgctgtcctggctgatatggattccattgcgaaggaagcacagctgagaggtttcgagtttgctaaagcggttactcttgttgctgagccgttcacattggataatggccttctcaccccaacattcaaggtcaagaggccgcaagccaaagcatactttgcaaaagagatctcagacatgtatgcacggttgctagagacagagttagctaggtcgaagttgtaacttgtgcggtatcaggagaagggccatcaatacagccgtacaggagattggattctgcatttttttattccacctcacgaaataagtagtaaaatctttttactgatacgggaaataacggatcatgccatgctccggagtcgatagtttttttcaccagacggggcagtgcttggcgcatgctgaatatatggttctagttataaagaaatgtttttacagagtgtatattgggtctgaacagctgccctggaaggtagttcacagaaaatatattggtattacaaatgcaatactaaaaaaattgtgtcttccgattgtattgtcagtcttttatcaacactagtggaagtgtacgcgctcggtacacgataaaaatattacatacaaaatgtttataaatacctatataatattaaatttattgatatgttggtcttttaaggtaattgcttgacaagttttctgttttcaagt

SEQ ID NO: 203875 - DNA, 2700 bp, Zea Mays
ccgtctccgtccgtccccgaccgacgcgacggcgacgcaccatatcgctatccctaccctctcggttcccacgccaacaacgcatatccgccacctcggggggtccctccctcctcggcctcgcgcgcgccttcccacacatcctcctcccccccacgccacgaaacgccaaagggagggagcccgagcctagcaggagcagcgcaaggaaacaatggcgcgggaggagcaggagcagtccgcattgggcgccgcccacgtccaccaccaccagcctccggccggcggatgcggcctctccgccaaccccaccgccgccgcagccgagtacgcccacgggctacagtgtcgttctgcctgagaagctgcacactggaaagtggaatgtgtacagatctgcacattctcctctaagattaataaataaattccctgataacccggagattggaacgctgcatgataattttgtatatgcagttgaaactttccgagattgtagatatttgggtacaagaatccgcccagacgggacagttggagactacaagtggatgacgtatggagaagctagcacgagcagaactgcaataggttctggtcttatttatcatggaatatctgaaggtgcacgaattggtctatattttataaacagaccggagtggatcatacttgaccatgcttgtgcggcatactcatatgtatctgtgccgctttatgatactctcgattttaagctttattactcaaatgccgtgtgttcgtcttattgtggtggttggtggagatgattcaaatatgccatctgcaccagcaactactgaatgcaaaattatgacgtacaacaggctacacaatgagggaaagatgagtcctcaaacttttcgtccaccaaaacctgaagatatagccactatctgctacaccagtggcactactggcacaccaaagggagctgtactttctcatgagaacttaattgcaaatgtagcagggtcaagtttaggcattaagttttacccctctgatgtgtacatctcgtatctacctttggctcacatctatgagagagctaaccaggttgcattgcttcactatggtgttgccattggattctaccaaggggataacttgaagctgatggatgatttggctgttctgagaccaacaatattcgcaagtgttccccggttatataacaaaatttatgctgcaattacaaatgctgtgaaggagtctggggggttgagagaaaggttgtatcatactgcatacaatgccaagcgacatgcaatgataaatggtagaaacccatcacctatgtgggacaagttggtatttaacaaaattaaagctagacttggtggacgaatgaggcttatgacttcaggtgcttctccattgtcaccagatgtcatggaatttttaagaatatgcttcggtgaagttcttgaagggtatggaatgacagagacatcttgtgtcatcagtacaatgaatattggtgacagatcaattggacatgttggatctccaaatccttcttgtgaggttaaacttgtggacgtcccagaaatgaattatacttcggaggatcaaccgtatcctcgtggagagatttgtgttaggggacctataatattctgtggttactataaagatgaagtccaaacaagagaggtcattgatgaggatggttggttacatactggagacataggtttgtggctgcctggagggcgtctaaaaattatagataggaaaaagaacattttcaagttagctcaaggagaatacatagctccagagaagattgagaatgtctatgctaagtgcaagttcattgctcaatgctttatatatggtgatagtttcaactcttccctagttgccattgtagcagtcgaaccggatgtgttgaaggcttgggctgcatcagaaggaatccagtacgaggacttgagacagctctgtgctgatcctagagcaacagctgctgtcctggctgatatggattccattgcgaaggaagcacagctgagaggtttcgagtttgctaaagcggttactcttgttgctgagccgttcacattggataatggccttctcaccccaacattcaaggtcaagaggccgcaagccaaagcatactttgcaaaagagatctcagacatgtatgcacggttgctagagacagagttagctaggtcgaagttgtaacttgtgcggtatcaggagaagggccatcaatacagccgtacaggagattggattctgcatttttttattccacctcacgaaataagtagtaaaatctttttactgatacgggaaataacggatcatgccatgctccggagtcgatagtttttttcaccagacggggcagtgcttggcgcatgctgaatatatggttctagttataaagaaatgtttttacagagtgtatattgggtctgaacagctgccctggaaggtagttcacagaaaatatattggtattacaaatgcaatactaaaaaaattgtgtcttccgattgtattgtcagtcttttatcaacactagtggaagtgtacgcgctcggtacacgataaaaatattacatacaaaatgtttataaatacctatataatattaaatttattgatatgttggtcttttaaggtaattgcttgacaagttttctgttttcaagt

SEQ ID NO: 203876 - DNA, 1084 bp, Zea Mays
ccaccctcgatcatccgccacggctccaccagggactttttagttaggcacaccctgtattctaatcttgggtcttcaccgcatggaaacattgatgtacagcaccacaatagagagtagattaagatgggtctcaatgccgtggtggccgcttgctacgcccttccagtactcatctctgtgctcacagtccgcttcttctacgtgttgtggcacagtggccaatcagcatcgagaccacgcaacaccagattgcgttgtctcatcatccttggctccggagggcataccgcagaaatgatgaatattgtaacaacgcttcagaaggataggttcacaccaagatattatgtggctgcacttactgacaacatgagtcttcaaaaggcagaggtctatgaacaatcgcttattcagagcgatggaatgaagactgccgagagtgctcatttcatgcagatatatcgtagccgtgaagtaggccaatcttacattacatccatcgcaacaacattgctagccacattgcatgctatgtggctagtaataagaatcagaccacaagtgatattttgcaatggtccagggacatgctttcctctatgcatctcggcgttccttctgaaggtgcttggtttgggatggtgctccattttctacattgaaagcattgcaagagtgaagaagctgtcattgagcggtttactgttgtacaagctacggatagctgaccagttctttgtgcagtggccccagctgcagcataagtatcctcgagcatgctacgcaggtcgtttgatgtgaagattccaccataactaaggggttcagaatacaatgacaatatatgtatacttcgacaaatacaaatgtggctgccttaaaaagaaaggctttacaacaaacaacgcatttcatatatgcgggcatggaaatgctagttaccgatggttttggcaatgttactgtatgtgagtgggcttatcaagttactgcagactgtaaagcttattttgtatgttttgagagagattatctgtttataattgttcctggccccatttgatgattctggtcatcaatt

SEQ ID NO: 203877 - DNA, 575 bp, Zea Mays
aataattgctctaattgtttgcattccacctgcattgatctttgaagggccccagctaatgcagcatggatttagtgatgccattgcaaaagtaggtttgacaaagtttgtcagtgacctattcttggttggactgttctaccatctgtataatcagattgctacaaacaccttggagcgagtggctcctctgacacatgctgtcgggaatgtgttgaaacgtgtttttgccatcggtttctcaatcattgtttttggcaacaaaattagcacacaaactggaattggcacgtccattgccatagctggtgttgctatgtactcttacattaaggctaagattgaagaggagaaaaggaaaaagagcgcatgactgctgtgaataatattatcgggaccttcctcggacacaacatcgtcgacaatcacgacctacttctataccttgttttgttttcatcttgagtcagtcggtccattgtttgttcccagtctggtgattaaaagtctgcaaattctgtttgtggaattggcagcgatacaaatttggcttctttaagtaaatccggttgccg

SEQ ID NO: 203878 - DNA, 794 bp, Zea Mays
taatgtgtccttcgctgctgttgcagtctcatttgctcacactatcaaagctctggagcccttcttcagcgcagctgctactcagtttatccttggacagcaagttcccttctctctgtggctttctcttgcccctgtggtccttggtgtttcaatggcatcccttactgagctttcattcaactggactggcttcatcaatgccatgatatcaaacatctcattcacttacatgagcatttattccaagaaagctatgtttgaagggccccagctaatgcagcatggatttagtgatgccattgcaaaagtaggtttgacaaagtttgtcagtgacctattcttggttggactgttctaccatctgtataatcagattgctacaaacaccttggagcgagtggctcctctgacacatgctgtcgggaatgtgttgaaacgtgtttttgccatcggtttctcaatcattgtttttggcaacaaaattagcacacaaactggaattggcacgtccattgccatagctggtgttgctatgtactcttacattaaggctaagattgaagaggagaaaaggaaaaagagcgcatgactgctgtgaataatattatcgggaccttcctcggacacaacatcgtcgacaatcacgacctacttctataccttgttttgttttcatcttgagtcagtcggtccattgtttgttcccagtctggtgattaaaagtctgcaaattctgtttgtggaattggcagcgatacaaatttggcttctttaagtaaatccggttgccg

SEQ ID NO: 203879 - DNA, 3743 bp, Zea Mays
cttctctgcatctcgggacttctttcgctgctctctctctctccgagcacagctgggggtggtgttcacggtaggcagcagcgcactgcgcacgggcgcagtggtgaggcgcctaagggagagtggcagtagtgacgcctggcgccggtgcaggagtgcaagggagacggtggcggcagcggctcgtgtcgacggccggagcccggaggcagcggggcggcggaggcgtcagtgtacgcgggcggggcggaggaggcactgaagcagctcgcggcggcgggcttgagccagcgttgcggcactctcgggccggtggcttcgggagttgggaggcactggcctgtgcaagaagggcttccgagaagaaacggtagaagagaagttggggatacgaatgttttttatcgagtccttgtttatccgaatccacagggattcaaagttcaaacggggtccaaaccttcccgacttccagtacagtcttcctcagacgaggccgcaagacaggaggagacaacgccgaggcagccagctagggcgcggtcaaccgcagtaagccaataagcaatgcagtagtgggcgcagctccggaggagtggaatgacggcgccaccgaatgctagcatgggaccgctcagtttgggtggctgcggggctctcctctccactcctcagcctaattcgtggcattgccgcgggttctcgattcctgagaggagcgtctttatgttgccactgcgccggggtttgtcaaggaagaggggctgggttcttgattcaagaagtaacggtgctgtggctcgtgatgaggtcggtgccgggtcgtcagagcttcggcacatcgagaaggagctgacgttcagcccgactttcactgactatgttaaaatcatggagtcggtgaagttggacaggagcaagaatttacatggcgccgatggccagagtttgaggagaaggttcgcgggtgatggccgacaaaggaataggaggtctggtgatgcaaggaataaatcatttgaaaggaatcaggggcctcagagggacttggcgaaggatgagaatcagaaggatgttacaggctttgtggataaaagagcaactggtcatgtaaaaagtagcaatcgcaggcaaggggaggttgaagactatgcacagagaagaataattcgtggtggtacaagaggaaatggagacaatgggcagttctcatcacctgtgaaggctaaagatactaggggtagtatgtctgttcataggttggtgacgaacaaacagactcagtcagttgcagggaacgatttacaagggcgagcaacttatactccatctcggacttctgcccttccaaatagcagtattccatcaaagaatgctaaggttcaaatgagaaaatacgactatactatgacaagtagcagaatagacttaaaatatcctagagagacatttcccaatactgaggtcaacgctgacagtaatgttcaaagaaatcagcaaagagtggagaccttagggagaaactttgtagtacgtaggtttggggagattggcaccgactctaagaagtctaccgtaagcaaaatttatgggagtacacaggcaatgcctgagcatgatagccattcaagtgataatttggagagtgatgaacgtaggacagttcaattgcatagaggagcaaatgttaaaatggggaaatttgttagtagggatgctgaaactacagattttgatgatagagctgctttcaaaacttttgaggtatttactgatgtcaggaataggccacggatccttcgaatggaaatggaagagagaatccagaagttagctagtcggctcaatgctacagatgtaaatactccagagtggaaattctccaaaatgattcatgatgcaaaaattaaattctctgatcattctatcctaaggattgttcaaatgttgggtcgatatggaaattggaaatgtgttttgcaagtggttgaatggctccagtcacatgaaaggttcaaatcctacaagagcaggtatatttacacaacagttctcgatgttctagggaaggcaaagagaccattcgaggcgttgaatgtattttataccatgcagaaccaattgtcatcttatcctgacatggcagcttatcattgtattgctgttactcttgggcaagctggtcttataaaagaattatttgatgtgattgattgcatgtgttctcctcctaggaagaagttcaaattgagccctcttcagaattgggatcctcgcttggaaccagaccttattgtatacaatgcagttttgaatgcttgtgtgcaacaaaagcaatgggaaggggcattttgggtactgcaacagttgaaagagaagaacatttgtccaacaaattcaacatatggtcttgttatggaggtaatgcttgtctgtggaaagtacaatttggtttatgagttcttcaataaggtggataaatcatcaatacctggtgctctgaactataaagttcttgtaaatgcactttggagagaaggaaagattgatgaagcagtgatggctgtgaaggatatggaaagtcgtggaattgttggttctgctagtctgtattatgacctagctcgatgcctttgcagtggtggacggtgcaaagaagcacttctccaggttgaaaagatatgcaaggttgccaacaaaccgctggttgttacctacacaggactcattcagacttgcatagacaatggtggcatggaagatgctaaatacatattcaaccacatgtgcaactactgttcacctaattctgttacttgcaacatcatgatgaagtcatatattaaacatggaatgcttgaagacgcgaaagacctgctccatgatattctgaattgcaggataaggagtaaagcggattctaatcaagtggcaaccgctgacaagtttactttcaatactttcatggaggcctgtgctgcagcaaaaaggtggaatgacttcgagtatgcgtttcgtgagatgttattgaatgggtaccatttcgatgagcgaagacaccttcggatggtacttgacgcttttaggcatgggaaggaacagctgttggatgatctatggcactacctgtgccgtcacagccgtgtcccgccctcccctgtcataatggaaagattctgcctaaaactgatgcagggagatacactggcggcgatctcctgcgtcagcagcttccatgagggcaagatatgcaacgtctcctccatgtcatggctcaatctgctgagccgcaatgcagataggctgaaggaggagcatgttaccaagttagctcatgaactcaacagcctcattagcttgaggagttcctctgatagcattagtcttagcctgtaccaaaaaattattagtagctgtacggcattcctctctggagccacagttgtagaaaaggcaccttctggccaataggtggtgttacagaaattataataaccacagttagtaaattctagtactccaaatcataattaccacgactgatggagtgtattgcattcaacgtttggttatcggtacaaagttagaaatggaaaattttcacgtaaggaattagttctttttttagtataatacaaaggctgatttgggagcataagcgataaagcttgctttgtttgattaattttatactggttactttcaaattcacaagtcataataccatgagcatcatttattga

SEQ ID NO: 203880 - DNA, 3690 bp, Zea Mays
cttctctgcatctcgggacttctttcgctgctctctctctctccgagcacagctgggggtggtgttcacggtaggcagcagcgcactgcgcacgggcgcagtggtgaggcgcctaagggagagtggcagtagtgacgcctggcgccggtgcaggagtgcaagggagacggtggcggcagcggctcgtgtcgacggccggagcccggaggcagcggggcggcggaggcgtcagtgtacgcgggcggggcggaggaggcactgaagcagctcgcggcggcgggcttgagccagcgttgcggcactctcgggccggtggcttcgggagttgggaggcactggcctgtgcaagaagggcttccgagaagaaacgaatccacagggattcaaagttcaaacggggtccaaaccttcccgacttccagtacagtcttcctcagacgaggccgcaagacaggaggagacaacgccgaggcagccagctagggcgcggtcaaccgcagtaagccaataagcaatgcagtagtgggcgcagctccggaggagtggaatgacggcgccaccgaatgctagcatgggaccgctcagtttgggtggctgcggggctctcctctccactcctcagcctaattcgtggcattgccgcgggttctcgattcctgagaggagcgtctttatgttgccactgcgccggggtttgtcaaggaagaggggctgggttcttgattcaagaagtaacggtgctgtggctcgtgatgaggtcggtgccgggtcgtcagagcttcggcacatcgagaaggagctgacgttcagcccgactttcactgactatgttaaaatcatggagtcggtgaagttggacaggagcaagaatttacatggcgccgatggccagagtttgaggagaaggttcgcgggtgatggccgacaaaggaataggaggtctggtgatgcaaggaataaatcatttgaaaggaatcaggggcctcagagggacttggcgaaggatgagaatcagaaggatgttacaggctttgtggataaaagagcaactggtcatgtaaaaagtagcaatcgcaggcaaggggaggttgaagactatgcacagagaagaataattcgtggtggtacaagaggaaatggagacaatgggcagttctcatcacctgtgaaggctaaagatactaggggtagtatgtctgttcataggttggtgacgaacaaacagactcagtcagttgcagggaacgatttacaagggcgagcaacttatactccatctcggacttctgcccttccaaatagcagtattccatcaaagaatgctaaggttcaaatgagaaaatacgactatactatgacaagtagcagaatagacttaaaatatcctagagagacatttcccaatactgaggtcaacgctgacagtaatgttcaaagaaatcagcaaagagtggagaccttagggagaaactttgtagtacgtaggtttggggagattggcaccgactctaagaagtctaccgtaagcaaaatttatgggagtacacaggcaatgcctgagcatgatagccattcaagtgataatttggagagtgatgaacgtaggacagttcaattgcatagaggagcaaatgttaaaatggggaaatttgttagtagggatgctgaaactacagattttgatgatagagctgctttcaaaacttttgaggtatttactgatgtcaggaataggccacggatccttcgaatggaaatggaagagagaatccagaagttagctagtcggctcaatgctacagatgtaaatactccagagtggaaattctccaaaatgattcatgatgcaaaaattaaattctctgatcattctatcctaaggattgttcaaatgttgggtcgatatggaaattggaaatgtgttttgcaagtggttgaatggctccagtcacatgaaaggttcaaatcctacaagagcaggtatatttacacaacagttctcgatgttctagggaaggcaaagagaccattcgaggcgttgaatgtattttataccatgcagaaccaattgtcatcttatcctgacatggcagcttatcattgtattgctgttactcttgggcaagctggtcttataaaagaattatttgatgtgattgattgcatgtgttctcctcctaggaagaagttcaaattgagccctcttcagaattgggatcctcgcttggaaccagaccttattgtatacaatgcagttttgaatgcttgtgtgcaacaaaagcaatgggaaggggcattttgggtactgcaacagttgaaagagaagaacatttgtccaacaaattcaacatatggtcttgttatggaggtaatgcttgtctgtggaaagtacaatttggtttatgagttcttcaataaggtggataaatcatcaatacctggtgctctgaactataaagttcttgtaaatgcactttggagagaaggaaagattgatgaagcagtgatggctgtgaaggatatggaaagtcgtggaattgttggttctgctagtctgtattatgacctagctcgatgcctttgcagtggtggacggtgcaaagaagcacttctccaggttgaaaagatatgcaaggttgccaacaaaccgctggttgttacctacacaggactcattcagacttgcatagacaatggtggcatggaagatgctaaatacatattcaaccacatgtgcaactactgttcacctaattctgttacttgcaacatcatgatgaagtcatatattaaacatggaatgcttgaagacgcgaaagacctgctccatgatattctgaattgcaggataaggagtaaagcggattctaatcaagtggcaaccgctgacaagtttactttcaatactttcatggaggcctgtgctgcagcaaaaaggtggaatgacttcgagtatgcgtttcgtgagatgttattgaatgggtaccatttcgatgagcgaagacaccttcggatggtacttgacgcttttaggcatgggaaggaacagctgttggatgatctatggcactacctgtgccgtcacagccgtgtcccgccctcccctgtcataatggaaagattctgcctaaaactgatgcagggagatacactggcggcgatctcctgcgtcagcagcttccatgagggcaagatatgcaacgtctcctccatgtcatggctcaatctgctgagccgcaatgcagataggctgaaggaggagcatgttaccaagttagctcatgaactcaacagcctcattagcttgaggagttcctctgatagcattagtcttagcctgtaccaaaaaattattagtagctgtacggcattcctctctggagccacagttgtagaaaaggcaccttctggccaataggtggtgttacagaaattataataaccacagttagtaaattctagtactccaaatcataattaccacgactgatggagtgtattgcattcaacgtttggttatcggtacaaagttagaaatggaaaattttcacgtaaggaattagttctttttttagtataatacaaaggctgatttgggagcataagcgataaagcttgctttgtttgattaattttatactggttactttcaaattcacaagtcataataccatgagcatcatttattga

SEQ ID NO: 203881 - DNA, 3858 bp, Zea Mays
cttctctgcatctcgggacttctttcgctgctctctctctctccgagcacagctgggggtggtgttcacggtaggcagcagcgcactgcgcacgggcgcagtggtgaggcgcctaagggagagtggcagtagtgacgcctggcgccggtgcaggagtgcaagggagacggtggcggcagcggctcgtgtcgacggccggagcccggaggcagcggggcggcggaggcgtcagtgtacgcgggcggggcggaggaggcactgaagcagctcgcggcggcgggcttgagccagcgttgcggcactctcgggccggtggcttcgggagttgggaggcactggcctgtgcaagaagggcttccgagaagaaacggtagaagagaagttggggatacgaatgttttttatcgagtccttgtttatccggtaggagagggattcggagatttcaagaatctggctcttaattttttcttgtaatctctctctttatccctaccgtttggaagacatcgtgattttttaatcgcgattttcagaatccacagggattcaaagttcaaacggggtccaaaccttcccgacttccagtacagtcttcctcagacgaggccgcaagacaggaggagacaacgccgaggcagccagctagggcgcggtcaaccgcaggtacacgcgcttcttccgattggtcgagcctcagaattcccgcctgatcgttctggcctgctaagtttcttggttagaacattttctgtaataagccaataagcaagaaccttttctgcagtaagccaataagcaatgcagtagtgggcgcagctccggaggagtggaatgacggcgccaccgaatgctagcatgggaccgctcagtttgggtggctgcggggctctcctctccactcctcagcctaattcgtggcattgccgcgggttctcgattcctgagaggagcgtctttatgttgccactgcgccggggtttgtcaaggaagaggggctgggttcttgattcaagaagtaacggtgctgtggctcgtgatgaggtcggtgccgggtcgtcagagcttcggcacatcgagaaggagctgacgttcagcccgactttcactgactatgttaaaatcatggagtcggtgaagttggacaggagcaagaatttacatggcgccgatggccagagtttgaggagaaggttcgcgggtgatggccgacaaaggaataggaggtctggtgatgcaaggaataaatcatttgaaaggaatcaggggcctcagagggacttggcgaaggatgagaatcagaaggatgttacaggctttgtggataaaagagcaactggtcatgtaaaaagtagcaatcgcaggcaaggggaggttgaagactatgcacagagaagaataattcgtggtggtacaagaggaaatggagacaatgggcagttctcatcacctgtgaaggctaaagatactaggggtagtatgtctgttcataggttggtgacgaacaaacagactcagtcagttgcagggaacgatttacaagggcgagcaacttatactccatctcggacttctgcccttccaaatagcagtattccatcaaagaatgctaaggttcaaatgagaaaatacgactatactatgacaagtagcagaatagacttaaaatatcctagagagacatttcccaatactgaggtcaacgctgacagtaatgttcaaagaaatcagcaaagagtggagaccttagggagaaactttgtagtacgtaggtttggggagattggcaccgactctaagaagtctaccgtaagcaaaatttatgggagtacacaggcaatgcctgagcatgatagccattcaagtgataatttggagagtgatgaacgtaggacagttcaattgcatagaggagcaaatgttaaaatggggaaatttgttagtagggatgctgaaactacagattttgatgatagagctgctttcaaaacttttgaggtatttactgatgtcaggaataggccacggatccttcgaatggaaatggaagagagaatccagaagttagctagtcggctcaatgctacagatgtaaatactccagagtggaaattctccaaaatgattcatgatgcaaaaattaaattctctgatcattctatcctaaggattgttcaaatgttgggtcgatatggaaattggaaatgtgttttgcaagtggttgaatggctccagtcacatgaaaggttcaaatcctacaagagcaggtatatttacacaacagttctcgatgttctagggaaggcaaagagaccattcgaggcgttgaatgtattttataccatgcaggaagaagttcaaattgagccctcttcagaattgggatcctcgcttggaaccagaccttattgtatacaatgcagttttgaatgcttgtgtgcaacaaaagcaatgggaaggggcattttgggtactgcaacagttgaaagagaagaacatttgtccaacaaattcaacatatggtcttgttatggaggtaatgcttgtctgtggaaagtacaatttggtttatgagttcttcaataaggtggataaatcatcaatacctggtgctctgaactataaagttcttgtaaatgcactttggagagaaggaaagattgatgaagcagtgatggctgtgaaggatatggaaagtcgtggaattgttggttctgctagtctgtattatgacctagctcgatgcctttgcagtggtggacggtgcaaagaagcacttctccaggttgaaaagatatgcaaggttgccaacaaaccgctggttgttacctacacaggactcattcagacttgcatagacaatggtggcatggaagatgctaaatacatattcaaccacatgtgcaactactgttcacctaattctgttacttgcaacatcatgatgaagtcatatattaaacatggaatgcttgaagacgcgaaagacctgctccatgatattctgaattgcaggataaggagtaaagcggattctaatcaagtggcaaccgctgacaagtttactttcaatactttcatggaggcctgtgctgcagcaaaaaggtggaatgacttcgagtatgcgtttcgtgagatgttattgaatgggtaccatttcgatgagcgaagacaccttcggatggtacttgacgcttttaggcatgggaaggaacagctgttggatgatctatggcactacctgtgccgtcacagccgtgtcccgccctcccctgtcataatggaaagattctgcctaaaactgatgcagggagatacactggcggcgatctcctgcgtcagcagcttccatgagggcaagatatgcaacgtctcctccatgtcatggctcaatctgctgagccgcaatgcagataggctgaaggaggagcatgttaccaagttagctcatgaactcaacagcctcattagcttgaggagttcctctgatagcattagtcttagcctgtaccaaaaaattattagtagctgtacggcattcctctctggagccacagttgtagaaaaggcaccttctggccaataggtggtgttacagaaattataataaccacagttagtaaattctagtactccaaatcataattaccacgactgatggagtgtattgcattcaacgtttggttatcggtacaaagttagaaatggaaaattttcacgtaaggaattagttctttttttagtataatacaaaggctgatttgggagcataagcgataaagcttgctttgtttgattaattttatactggttactttcaaattcacaagtcataataccatgagcatcatttattga

SEQ ID NO: 203882 - DNA, 3973 bp, Zea Mays
cttctctgcatctcgggacttctttcgctgctctctctctctccgagcacagctgggggtggtgttcacggtaggcagcagcgcactgcgcacgggcgcagtggtgaggcgcctaagggagagtggcagtagtgacgcctggcgccggtgcaggagtgcaagggagacggtggcggcagcggctcgtgtcgacggccggagcccggaggcagcggggcggcggaggcgtcagtgtacgcgggcggggcggaggaggcactgaagcagctcgcggcggcgggcttgagccagcgttgcggcactctcgggccggtggcttcgggagttgggaggcactggcctgtgcaagaagggcttccgagaagaaacggtagaagagaagttggggatacgaatgttttttatcgagtccttgtttatccggtaggagagggattcggagatttcaagaatctggctcttaattttttcttgtaatctctctctttatccctaccgtttggaagacatcgtgattttttaatcgcgattttcagaatccacagggattcaaagttcaaacggggtccaaaccttcccgacttccagtacagtcttcctcagacgaggccgcaagacaggaggagacaacgccgaggcagccagctagggcgcggtcaaccgcaggtacacgcgcttcttccgattggtcgagcctcagaattcccgcctgatcgttctggcctgctaagtttcttggttagaacattttctgtaataagccaataagcaagaaccttttctgcagtaagccaataagcaatgcagtagtgggcgcagctccggaggagtggaatgacggcgccaccgaatgctagcatgggaccgctcagtttgggtggctgcggggctctcctctccactcctcagcctaattcgtggcattgccgcgggttctcgattcctgagaggagcgtctttatgttgccactgcgccggggtttgtcaaggaagaggggctgggttcttgattcaagaagtaacggtgctgtggctcgtgatgaggtcggtgccgggtcgtcagagcttcggcacatcgagaaggagctgacgttcagcccgactttcactgactatgttaaaatcatggagtcggtgaagttggacaggagcaagaatttacatggcgccgatggccagagtttgaggagaaggttcgcgggtgatggccgacaaaggaataggaggtctggtgatgcaaggaataaatcatttgaaaggaatcaggggcctcagagggacttggcgaaggatgagaatcagaaggatgttacaggctttgtggataaaagagcaactggtcatgtaaaaagtagcaatcgcaggcaaggggaggttgaagactatgcacagagaagaataattcgtggtggtacaagaggaaatggagacaatgggcagttctcatcacctgtgaaggctaaagatactaggggtagtatgtctgttcataggttggtgacgaacaaacagactcagtcagttgcagggaacgatttacaagggcgagcaacttatactccatctcggacttctgcccttccaaatagcagtattccatcaaagaatgctaaggttcaaatgagaaaatacgactatactatgacaagtagcagaatagacttaaaatatcctagagagacatttcccaatactgaggtcaacgctgacagtaatgttcaaagaaatcagcaaagagtggagaccttagggagaaactttgtagtacgtaggtttggggagattggcaccgactctaagaagtctaccgtaagcaaaatttatgggagtacacaggcaatgcctgagcatgatagccattcaagtgataatttggagagtgatgaacgtaggacagttcaattgcatagaggagcaaatgttaaaatggggaaatttgttagtagggatgctgaaactacagattttgatgatagagctgctttcaaaacttttgaggtatttactgatgtcaggaataggccacggatccttcgaatggaaatggaagagagaatccagaagttagctagtcggctcaatgctacagatgtaaatactccagagtggaaattctccaaaatgattcatgatgcaaaaattaaattctctgatcattctatcctaaggattgttcaaatgttgggtcgatatggaaattggaaatgtgttttgcaagtggttgaatggctccagtcacatgaaaggttcaaatcctacaagagcaggtatatttacacaacagttctcgatgttctagggaaggcaaagagaccattcgaggcgttgaatgtattttataccataaccaattgtcatcttatcctgacatggcagcttatcattgtattgctgttactcttgggcaagctggtcttataaaagaattatttgatgtgattgattgcatgtgttctcctcctaggaagaagttcaaattgagccctcttcagaattgggatcctcgcttggaaccagaccttattgtatacaatgcagttttgaatgcttgtgtgcaacaaaagcaatgggaaggggcattttgggtactgcaacagttgaaagagaagaacatttgtccaacaaattcaacatatggtcttgttatggaggtaatgcttgtctgtggaaagtacaatttggtttatgagttcttcaataaggtggataaatcatcaatacctggtgctctgaactataaagttcttgtaaatgcactttggagagaaggaaagattgatgaagcagtgatggctgtgaaggatatggaaagtcgtggaattgttggttctgctagtctgtattatgacctagctcgatgcctttgcagtggtggacggtgcaaagaagcacttctccaggttgaaaagatatgcaaggttgccaacaaaccgctggttgttacctacacaggactcattcagacttgcatagacaatggtggcatggaagatgctaaatacatattcaaccacatgtgcaactactgttcacctaattctgttacttgcaacatcatgatgaagtcatatattaaacatggaatgcttgaagacgcgaaagacctgctccatgatattctgaattgcaggataaggagtaaagcggattctaatcaagtggcaaccgctgacaagtttactttcaatactttcatggaggcctgtgctgcagcaaaaaggtggaatgacttcgagtatgcgtttcgtgagatgttattgaatgggtaccatttcgatgagcgaagacaccttcggatggtacttgacgcttttaggcatgggaaggaacagctgttggatgatctatggcactacctgtgccgtcacagccgtgtcccgccctcccctgtcataatggaaagattctgcctaaaactgatgcagggagatacactggcggcgatctcctgcgtcagcagcttccatgagggcaagatatgcaacgtctcctccatgtcatggctcaatctgctgagccgcaatgcagataggctgaaggaggagcatgttaccaagttagctcatgaactcaacagcctcattagcttgaggagttcctctgatagcattagtcttagcctgtaccaaaaaattattagtagctgtacggcattcctctctggagccacagttgtagaaaaggcaccttctggccaataggtggtgttacagaaattataataaccacagttagtaaattctagtactccaaatcataattaccacgactgatggagtgtattgcattcaacgtttggttatcggtacaaagttagaaatggaaaattttcacgtaaggaattagttctttttttagtataatacaaaggctgatttgggagcataagcgataaagcttgctttgtttgattaattttatactggttactttcaaattcacaagtcataataccatgagcatcatttattga

SEQ ID NO: 203883 - DNA, 1772 bp, Zea Mays
attgccccgaaaccttcgtgcccgtttcgcctcgcgcctgcgttgctctgctatttccatttccattgcacccatttccggggtcgcctgcgttgcttcgcgtgggagcgtgattcgtttaggcctctcgccaatttcggagggcgacggcgacgtgctttcggcgggcgggcagagaaaatctagagtcttgggtttgccagacgcgcctttgtgggagacagacacttgctctcgcctccaatggccgagatctgctgcgaggaagccaagtcgacgccggcaaccgccgtggctgcggcttcagtctccgccacggccgcagcggccgcagccgtggcagtggcctcctcggcgttagagaggaggcgacgcaggctggagatgaggaggttccgcgtcgcgagcgatcccgaggagctggtcgcggaggacgtccgcgctgccaagcggcagaggctggcgcgcacgctgtccggctcctgccccgacgcgggctcggactccgacaggccggccctgcccaggtacggggtcacctccgtctgcggccgacggcgcgagatggaggacacggtctccatcaggccggacttcctgcccggcaccagcaagcacaacttcttcggcgtcttcgacggccacggctgctcccaccgacgatgtgccaggacaacatgcacgaggttgtcgcggacgagcacacgaaggctgcctctggcgaggagacggcgtggaagggcgtgatggagaggagcttctcgcgattggatgagcaggccgccagctgggcgaccagccgcagccgcgacgagcctgcctgcaggtgcgagcagcagatgcccttgcgctgcgatcacgtggggtccaccgccgtggtcgccgtcgttagccccagccacgtagtcgtcgccaacgccggcgactcgcgcgccgtcctctcccgcggcggcgtccccgttccgctctccgtcgaccacaagcctgaccgacctgacgagctggctcgcatcgaggcggcgggtggccgcgtcatttactgggatggtgcccgtgttctcggcgtcctcgccatgtctcgagccataggtgagctcaagtttgtgccaccggtgtcgttttggggggccagtccactcactggattttaactgaccggcttatgcgcgcgcaggggataggtacctaaagccgtttgtgtcgtcggagccggaggtaacggtgacggagcgcaccgacgacgacgagtgtctgatcctggccagcgacggcctgtgggacgtcgtgaccaacgagatggcgtgcgaggtcgtccgggcgtgcttccgtagcaacggtccgccggcgccggccgctcgcccgaacggcgtggccctcccggcagccggcgcgggcgccgaggacggatcggcggttgtcaagggtgtgggcaaggaggactccgacaaggcgtgctccgacgcggccatgctgctggcaaagctggcgctggcccggcggagcgccgacaatgttagcgtggtcgtcgtggatctccgccggggcatatgattctcggagcgaagcagagcagggcaaaatcatatgctccatgcttgaaactagctcttctgaaatccacgctaatttctcccccattttgaccatccttctattttgatgtagtattagtagtagatcctgatcagatgaatataatagacgcttttcttctctcagacgaggaattaaagccagtcaggcagtatcaaggaacaagaacagcgaattgt

SEQ ID NO: 203884 - DNA, 1734 bp, Zea Mays
cttcctcttcttccctctatctgtattgccccgaaaccttcgtgcccgtttcgcctcgcgcctgcgttgctctgctatttccatttccattgcacccatttccggggtcgcctgcgttgcttcgcgtgggagcgtgattcgtttaggcctctcgccaatttcggagggcgacggcgacgtgctttcggcgggcgggcagagaaaatctagagtcttgggtttgccagacgcgcctttgtgggagacagacacttgctctcgcctccaatggccgagatctgctgcgaggaagccaagtcgacgccggcaaccgccgtggctgcggcttcagtctccgccacggccgcagcggccgcagccgtggcagtggcctcctcggcgttagagaggaggcgacgcaggctggagatgaggaggttccgcgtcgcgagcgatcccgaggagctggtcgcggaggacgtccgcgctgccaagcggcagaggctggcgcgcacgctgtccggctcctgccccgacgcgggctcggactccgacaggccggccctgcccaggtacggggtcacctccgtctgcggccgacggcgcgagatggaggacacggtctccatcaggccggacttcctgcccggcaccagcaagcacaacttcttcggcgtcttcgacggccacggctgctcccactttcgcgctactactgtaggtagcgacgatgtgccaggacaacatgcacgaggttgtcgcggacgagcacacgaaggctgcctctggcgaggagacggcgtggaagggcgtgatggagaggagcttctcgcgattggatgagcaggccgccagctgggcgaccagccgcagccgcgacgagcctgcctgcaggtgcgagcagcagatgcccttgcgctgcgatcacgtggggtccaccgccgtggtcgccgtcgttagccccagccacgtagtcgtcgccaacgccggcgactcgcgcgccgtcctctcccgcggcggcgtccccgttccgctctccgtcgaccacaagcctgaccgacctgacgagctggctcgcatcgaggcggcgggtggccgcgtcatttactgggatggtgcccgtgttctcggcgtcctcgccatgtctcgagccataggggataggtacctaaagccgtttgtgtcgtcggagccggaggtaacggtgacggagcgcaccgacgacgacgagtgtctgatcctggccagcgacggcctgtgggacgtcgtgaccaacgagatggcgtgcgaggtcgtccgggcgtgcttccgtagcaacggtccgccggcgccggccgctcgcccgaacggcgtggccctcccggcagccggcgcgggcgccgaggacggatcggcggttgtcaagggtgtgggcaaggaggactccgacaaggcgtgctccgacgcggccatgctgctggcaaagctggcgctggcccggcggagcgccgacaatgttagcgtggtcgtcgtggatctccgccggggcatatgattctcggagcgaagcagagcagggcaaaatcatatgctccatgcttgaaactagctcttctgaaatccacgctaatttctcccccattttgaccatccttctattttgatgtagtattagtagtagatcctgatcagatgaatataatagacgcttttcttctctcagacgaggaattaaagccagtcaggcagtatcaaggaacaagaacagcgaattgt

SEQ ID NO: 203885 - DNA, 1170 bp, Zea Mays
gactgagcaactctaacaaatagtgtaaatcaaccccaaaagcattagcaggagagaaaaaatgtgttttgtcccctccaacaggcccccttcttctcctcaatctcttcgtgtcccgcatccggtggcgttggtcatgcaaatatgcgcgccctgtgatttcccctatcgctgcagtgcccgctcccgtggctgctttcccgcgctttttgcctcgcgcgccgtagtggtggtgtgtggaacttggaaggcgcgagcgcgcaagcctctgtgggctgccgcagaggtttctgcgtccgaggagcaagacgctcgatctgaagtgcacgaggtggcgacagagtcttctgtggtgctggacgaggtggggggacatcgatccgcagtggaggcacgcggttgtaacttctgcgctgttagccggggcagggggctccatccgcgatgaatgtgcgcgcccgtggcttctgcggtggtggccgaggcagggggaagctcgatccgcggtgaaggcgcgcgtccgtggcttctgcgctggtggccaaggcgggggaagatgccgatcgcacgtgctggttcttcaattccgccgtcgccttgcaccggaggtcggattccccaaaggcatatggtcggcgacggatccatcacctgcgatggtggagaagctttgcgaccaagaaaccaaggtggaggaccatcgctccctttgttgccaggcccttccggggttgtccaagatccatttgcatcgtccacgtttggaagcagcgatggcttctctacatcctttgactgagctgctcatgtcaaggattgagttaagacgacagagtggtagtacaatgcaagacatggttgcacaggcatgttcgttgtgcaaaactctggacaggttgcaaaactctggacaggatgcaaaatcactatttgctgtcacggctaccagtttgcatttgtgacttcggttcctgtaatggtgggcgagagaaagtaggtgtcagtaactgtgtggtaattattagtatgaacttatctcagtaatttgtgtggtaattgttagtatgaatgtatatcagtttggttccaattgctacttgtcttagcacatgttctctgtcaaattgttatttgtctcattaattgttctgtcaaattattacttgtcaa

SEQ ID NO: 203886 - DNA, 831 bp, Zea Mays
cctgccacactcggcgccgcgcctataagtagcgcgcatgcgccggcgcagcactgcacccacggctcgagctcgcagcgacaggcacaggcagcaaggctggtttccttcctcgtcgaacgtctgccgctgctcgcgatggccggacgcggaggaggtagcaagagtagcctgtacgcggcgctgggcgtggccagcgactgctccgacgccgagctgcgcagcgcctaccgcaagctcgccatgaaatggcacccggacaagtgcgccggcgcagggagctccggcggcggcgcggacgccgccaaggccaggttccagaagatccagggagcgtacgccggacaacggcaagggggagagcctggaggacctgcagcggcagttcgaggagctgttcctgaggccgtcgccgtcgtccttctcgccgcagaacgacgcagctgggaagtcggcttccaagagtaggcctgctgggaggaaatagacaggacactgcggcgaataggtcggtccagctactcctgttccagataagctacgacctacgaggtaccgatacctggccaggagcccaggacagcgacctgcgacggcgacgaggctgccagtgctgcacgctcaagtacatgctccgagttgtagctactactgtagatcggcacggcagtcgccagaatggtaccataaggcggccgtacgcacacacgcatgaacgctgtttttaccatctcaggttcgctgcaaaatttccagcgtgttctctgtaaaatccctgcatgattgctataaagaaattcttcgtgggtactaataaatggagtgctcagt

SEQ ID NO: 203887 - DNA, 899 bp, Zea Mays
cctgccacactcggcgccgcgcctataagtagcgcgcatgcgccggcgcagcactgcacccacggctcgagctcgcagcgacaggcacaggcagcaaggctggtttccttcctcgtcgaacgtctgccgctgctcgcgatggccggacgcggaggaggtagcaagagtagcctgtacgcggcgctgggcgtggccagcgactgctccgacgccgagctgcgcagcgcctaccgcaagctcgccatgaaatggcacccggacaagtgcgccggcgcagggagctccggcggcggcgcggacgccgccaaggccaggttccagaagatccagggagcgtacgccgtcctgtcggaccccaacaagcggatcctgtatgacgtcggggcctacgacggcgaaggcgacgatgacgacaacggcaagggggagagcctggaggacctgcagcggcagttcgaggagctgttcctgaggccgtcgccgtcgtccttctcgccgcagaacgacgcagctgggaagtcggcttccaagagtaggcctgctgggaggaaatagacaggacactgcggcgaataggtcggtccagctactcctgttccagataagctacgacctacgaggtaccgatacctggccaggagcccaggacagcgacctgcgacggcgacgaggctgccagtgctgcacgctcaagtacatgctccgagttgtagctactactgtagatcggcacggcagtcgccagaatggtaccataaggcggccgtacgcacacacgcatgaacgctgtttttaccatctcaggttcgctgcaaaatttccagcgtgttctctgtaaaatccctgcatgattgctataaagaaattcttcgtgggtactaataaatggagtgctcagt

SEQ ID NO: 203888 - DNA, 960 bp, Zea Mays
cctgccacactcggcgccgcgcctataagtagcgcgcatgcgccggcgcagcactgcacccacggctcgagctcgcagcgacaggcacaggcagcaaggctggtttccttcctcgtcgaacgtctgccgctgctcgcgatggccggacgcggaggaggtagcaagagtagcctgtacgcggcgctgggcgtggccagcgactgctccgacgccgagctgcgcagcgcctaccgcaagctcgccatgaaatggcacccggacaagtgcgccggcgcagggagctccggcggcggcgcggacgccgccaaggccaggttccagaagatccagggagcgtacgccgtcctgtcggaccccaacaagcggatcctgtatgacgtcggggcctacgacggcgaaggcgacgatgacgtacggcgccggggagatcctcggagacattctcgaggccatgagccaggcaggccctgccgccgacaacggcaagggggagagcctggaggacctgcagcggcagttcgaggagctgttcctgaggccgtcgccgtcgtccttctcgccgaacgacgcagctgggaagtcggcttccaagagtaggcctgctgggaggaaatagacaggacactgcggcgaataggtcggtccagctactcctgttccagataagctacgacctacgaggtaccgatacctggccaggagcccaggacagcgacctgcgacggcgacgaggctgccagtgctgcacgctcaagtacatgctccgagttgtagctactactgtagatcggcacggcagtcgccagaatggtaccataaggcggccgtacgcacacacgcatgaacgctgtttttaccatctcaggttcgctgcaaaatttccagcgtgttctctgtaaaatccctgcatgattgctataaagaaattcttcgtgggtactaataaatggagtgctcagt

SEQ ID NO: 203889 - DNA, 1251 bp, Zea Mays
aatcatttggccactcagattacgggtcatcccagaggccaatagacgcaaggatttattgatcttcccgatgcctcgtaacaacaatccctccgacgaagaaaataaagcagcagcaacaacagcttctgtgccgtccaggaaatcatggctcccggcaggcttcggaggaagcggcaagcatggcgcaaccatcgacattcccctcggggatcctaagaagaaggagagagagctgctgtcatgggagcaggaactgaaacggcgggaacaggatattaaacggagggaggatgcaatgaacagagctggtgtcactttggaagtgagaaattggccgcagttctatcccatcatacatcacgatatagccagtgaaataccaatccatgctcaaaagttgcaatacacggcgtttgctagctggctaggactgattgcctgtctcgtttggaatctgtttgctgtgttagtggaatcaattcatactgaagatatcgttattttcctcctcgctgtaatctatgcaatattcgggtgtcctctttcatacatgctttggtacagacctctgtaccgtgcaatgagaactgacagtgtggtaaccttcggccagttcttcatcttctactcggtgcatgttggattttgtgtagttgctgcaattgctcctccaataatatttaaggggaaaactctcacgggtattcttgttgcaatcgaagttttagatggagatatattcgctggtgttctttatcttttgggttttgcgctgtttaccttggaatcttttataagcatctgggtgcttgagagagtgtacatgtatttcagagggcataggtgaatactggctatgagataatgcggtcattcagagaagtagtttatgtgagagcaatatcaggctgacatggtgtaaagcaaaaagttcaagattggaaaacaatgaattctctgtgcctagttattgttgtgttcagatttattgctacgggtagtcaattatatctgcatgatagtgttagtacccctcaaaaatcagttgcagagttttagaaagaaaatgctatgatgttagtcgtttggtcaggctagcatgtgtgttgcaccatatgacatctccaagtcaatagttgtatctgggtttatgtttccaatctattctgatttatcagtaatactatgtatgaatgttattatagtcattgtactaattaagtgttcagtcgggtgctctcatgtagt

SEQ ID NO: 203890 - DNA, 1469 bp, Zea Mays
ccgcgccctcgctccacgacaatcttggcaatgtccctcgctccgcgccaatctcgctcgctccgcggcgcccccatgctcgccctcccccacggcccccacggcaatctgcctcccccataagggcaccatcccgagcccgccccagccgccattctcgcttcggggcgccgcgtccgcgtcgattcagtttccctcgagtttcagaaaccccgcccgccaatagccctcgcgtctgtagatctcgcgtcctcgatggaaagttcgcctccacgccattcatggcgccttcctcggtccccttccccatgaccatatcacgccattgtggaatcatggtatttgtcatcttcgtggaagttgaataaccgcatataatttctaggagcacccgggccactgccagtccgccatgcccaagccaccggccggcttcgtgctgaatgaatggggcaggtgcatcgccgctgcattcaagtgcatcttcatcatcgtgcggagttggcctgccgccggccaccaataccatcgcctcggtccacccaccagttgcaacgctggtcctgtgctctcaccatttgatagggagttcagtacaaagaagatatcaattatgaagaggattgctctaagtgctctcatcaaaatatatggttgctttttgtttcacctggcatcggacttcgataacatgcgtcctcacctgatcattgttggcgcactgaagatgatcaacatcattgcgcctagctggagagtcatccctgcaacaaacatgatcgacaaaatccgcaaagaccctcagctcaagaaaaagaggaaacctcgcactgcaaataggctgcaaactcctttccgtcagcctagacatcaagaagagcctgcacgaggtgagatcttcgccatctgttaggccaccacatgcaacattggtagcatgaacgttcccgttggatcgtcgaccatgggacttctacagtaacatcggcacggacgacgtcgtcactgatcgttccgggagcaagctgctgcacaacctgaagaagatttgtctttttaagatgaaggttctgaagaacgtgatccaggtcgaggagatttctaaggtcttggaaatcagcggcgagcgcagcctcatcgataacttcgtcttctcctaccacgtgtaataatcacggctaatgtgacacttttgcaacaatatcaatgccggacaacatgcatgctccttgggaggaattaaggggaagatgaagaactaaaaaaattaccagaatctaatttacgcacgccaagtcagaccaccgtgaaaaactctatctccacgtgaccaatcttctccatttttcagtttgcaagatactttttatattgattaaagttcaataccaataacactaatgtgagctcactgtggtgttcatctttttgcataaattttatgaaaagaaaacagaactctttctatt

SEQ ID NO: 203891 - DNA, 1516 bp, Zea Mays
cacggcttcaccacgcctccgcctcggcaagcgccccctccctagcggcaatctccctcggcaagcgccctctcccccgcagcaatcttgccgcgccctcgctccacgacaatcttggcaatgtccctcgctccgcgccaatctcgctcgctccgcggcgcccccatgctcgccctcccccacggcccccacggcaatctgcctcccccataagggcaccatcccgagcccgccccagccgccattctcgcttcggggcgccgcgtccgcgtcgattcagtttccctcgagtttcagaaaccccgcccgccaatagccctcgcgtctgtagatctcgcgtcctcgatggaaagttcgcctccacgccattcatggcgccttcctcggtccccttccccatgaccatatcacgccattgtggaatcatggtatttgtcatcttcgtggaagttgaataaccgcatataatttctaggagcacccgggccactgccagtccgccatgcccaagccaccggccggcttcgtgctgaatgaatggggcaggtgcatcgccgctgcattcaagtgcatcttcatcatcgtgcggagttggcctgccgccggccaccaataccatcgcctcggtccacccaccagttgcaacgctggtcctgtgctctcaccatttgatagggagttcagtacaaagaagatatcaattatgaagagacttcttcatgaattcatgaggaaacaagctcttcacctgcaggtgtacaccgaggaaatcagagtgcagagctctggtctttatctgccacggatacgaagccgagtgcagcatatccatcggagatgatcaacatcattgcgcctagctggagagtcatccctgcaacaaacatgatcgacaaaatccgcaaagaccctcagctcaagaaaaagatctgtttcaatccgtacatgtacagaggaaacctcgcactgcaaataggctgcaaactcctttccgtcagcctagacatcaagaagagcctgcacgagtaacatcggcacggacgacgtcgtcactgatcgttccgggagcaagctgctgcacaacctgaagaagatttgtctttttaagatgaaggttctgaagaacgtgatccaggtcgaggagatttctaaggtcttggaaatcagcggcgagcgcagcctcatcgataacttcgtcttctcctaccacgtgtaataatcacggctaatgtgacacttttgcaacaatatcaatgccggacaacatgcatgctccttgggaggaattaaggggaagatgaagaactaaaaaaattaccagaatctaatttacgcacgccaagtcagaccaccgtgaaaaactctatctccacgtgaccaatcttctccatttttcagtttgcaagatactttttatattgattaaagttcaataccaataacactaatgtgagctcactgtggtgttcatctttttgcataaattttatgaaaagaaaacagaactctttctatt

SEQ ID NO: 203892 - DNA, 674 bp, Zea Mays
gtttttttccctgcagtacctataagcttaacatgtagtgggtgcacttttaggttttaggacacgagcaagaagtcgccaatggaactgatcaacgaggtacctccaatcaaggttgatggtcgcattgccgtctgtgaaggggcttctgaaggtgttggacttggccacccaatcgagtacatctgccttgatctggaggcacctaatgtgtgcaagtactgtggtctccgttatgttcaagttcaccatcactaaattgagaagataatgctgtctaccgctgcagaagctgagttgaggagtttatgtgcacacacatttgttccacaatgttctgtagcgtactttgaactatgcttgcgggcaaaatattacctttgatgatcatcctcttctcgggcgatcttttattaatcctgtcttagtatggttcatttttctacagatgaattgtgctcctttttcagaatctatacaagctgtgtgtattgaagttttactctgaataagcatggaactaactctaaggcaatttaatctcagaagttctagttttctggagttccatgatccagacgttttccttgttgagcctatttaactttctggaatccatgtgcttcagttccgtgcttcctttaattcagaattttttcaagtcttccggggag

SEQ ID NO: 203893 - DNA, 683 bp, Zea Mays
ggaaatggagtcaatggtttttttccctgcagtacctataagcttaacatgtagtgggtgcacttttaggacacgagcaagaagtcgccaatggaactgatcaacgaggtacctccaatcaaggttgatggtcgcattgccgtctgtgaaggggcttctgaaggtgttggacttggccacccaatcgagtacatctgccttgatctggaggcacctaatgtgtgcaagtactgtggtctccgttatgttcaagttcaccatcactaaattgagaagataatgctgtctaccgctgcagaagctgagttgaggagtttatgtgcacacacatttgttccacaatgttctgtagcgtactttgaactatgcttgcgggcaaaatattacctttgatgatcatcctcttctcgggcgatcttttattaatcctgtcttagtatggttcatttttctacagatgaattgtgctcctttttcagaatctatacaagctgtgtgtattgaagttttactctgaataagcatggaactaactctaaggcaatttaatctcagaagttctagttttctggagttccatgatccagacgttttccttgttgagcctatttaactttctggaatccatgtgcttcagttccgtgcttcctttaattcagaattttttcaagtcttccggggag

SEQ ID NO: 203894 - DNA, 665 bp, Zea Mays
catgacagcccataccacaagttgggccacaacgggccgggctttaatcccgacacgagcaagaagtcgccaatggaactgatcaacgaggtacctccaatcaaggttgatggtcgcattgccgtctgtgaaggggcttctgaaggtgttggacttggccacccaatcgagtacatctgccttgatctggaggcacctaatgtgtgcaagtactgtggtctccgttatgttcaagttcaccatcactaaattgagaagataatgctgtctaccgctgcagaagctgagttgaggagtttatgtgcacacacatttgttccacaatgttctgtagcgtactttgaactatgcttgcgggcaaaatattacctttgatgatcatcctcttctcgggcgatcttttattaatcctgtcttagtatggttcatttttctacagatgaattgtgctcctttttcagaatctatacaagctgtgtgtattgaagttttactctgaataagcatggaactaactctaaggcaatttaatctcagaagttctagttttctggagttccatgatccagacgttttccttgttgagcctatttaactttctggaatccatgtgcttcagttccgtgcttcctttaattcagaattttttcaagtcttccggggag

SEQ ID NO: 203895 - DNA, 1554 bp, Zea Mays
tctcgaacacgctcacgtgaactccagtcggggtctagcggcaattcttaccctcacatgcacacctcctcttcaatcgaactcctgagaattagcgcagctagatagattactcgcggctatctggattctggactcgtggttacacgatgaaccgagcagcagcataaaggggccatcagaaagacggctttgcttccgttctcttctcttttgtttgccacgatgctgccgtcccgcaggaagagtgccgtcctcggcgtcgtcgcgttgtcctcctccgtcctcatcctgctccacgccttctctctcccggcagcctctgcgctctccgtcggcctggcgcggcgccacaggcacgatgccacgcccgggctggccgccggcggctgcgacgtcttcagcggcagctgggtcctcgacggcggtagctcggcctcggcggcgtacaccgggtacaactgcccgctcatcgacgcggagttcaactgccagctctacggccgcccggactccgactacctccggtacctctggaagccggccggctgcgagctaccgaggttcgatggcgcggacttcctgacgcggatgaaggggaagacggtgatgttcgtgggcgactcgctggggcgcaaccagtgggagtcgctcgtctgcctgctgcacgccgccgcgccgcagtcgccggcgcagctcgtctccgcggaccctggtggacatcgacgtggtccaggggaagcgggtgctgatgctggacgacatctccgagaacgccgagtcgtggcgcgacgccgacgtgctctccttcaactccggccactggtggacgcacaccggctcgatgcaggggtgggactacatgggcgagtctgggcgatactacgaggacatggaccgcacggtggcgttccagcgcggcctcaccacctgggccagctgggtggacctcaacctcgatcaagccaagacccgtgtcttcttccagtccatgtcgcccacgcactacagctcgaaggaatggcccaacccggtgtcgaagaactgctacggcgagacggcaccggcgaccgggctcaactcgaccggccaggcctcgggccaggaccaggtgatccaggccgtgctgcggggcatgaagagccccgtccgtctcctcgacatcacggcgctgtcggcgatgcggaaggacgcgcacccgtcggcatacagcggcgacttctcgccggcgcagcgcgccaaccccggcgccggctccgttgactgcagccactggtgccttcccggcctcccggacacctggaaccagctcttctacacactcctcttctacaaatagcagtgacaccgcgatcgacacagaagaaagtcatccaaatccaactgtacacctagcagctcgccagccattcgttttttttcgttgtgtttgtgtgtaaaactattgtgacgtcgttgcatcacaggagtatacacaattagttggcgggagaaatgcgtcgataacgtttaaataaaagtgaagaacgtacaatctcggcatcaattgaacgt

SEQ ID NO: 203896 - DNA, 1510 bp, Zea Mays
atcttgcgcttaatccagtccgttcaattcttgacatccgaacaccccgccgacgcagccctagattccgcattcctctgtcacctccgcggcgccgccagcccgccatcacataacttcggcttctatcccttcgtaaacccttctctcttcttcccgcggcctgctcgttctatctgtccagcagacttgaggttccgagcggccggaaaccagcggcaaccgtcggcatggcgctcgtattgcattctggggctggaaacaaaaatgccttcaaggcacttattgctgcagaatacagtggggtcaaggttgagttgaccaaggattttgagatgggtgtctccaacaagacccctgagtttctaaagatgaacccccttgggaaggttcctgttctggagactcctgatggccctgtttttgagagtaatgctattgcgcgctatgttgctcgcttgaaggatgacaaccctcttttcgggtcttcccgtattgaacaagcccacgttgagcagtggatggactttgctgcaacagaagttgatcctggtgttggatggtacttgtatccaaggcttgggtacatcccttatgctcacacgactgaggaaacagctattgcttcattgaagagatcccttggtgctctgaacacacatcttgccttgaacacataccttgttggacattctgttactctagctgacattgtattgacatgcaacctctaccatggaattgcacggatcttgaccaaaagcttcacttctgatttccctcatgttgagaggtatttctggaccatggttaaccaacctaatttcaagaaggtcattggtgaggtcaagcaggcagagtctgtacctcctgttcttaaaaagggtgttcctcctaaggagtcaaaggcaaaggatgtgaagaaagaaactccaaaggaggcccccaagccaaaggtggttgaggtaccagcagaagaggaagcaccaaagccaaagccaaagaatcctcttgacttgctgccaccaagcaagatggtccttgatgactggaagaggctatactcaaacacaaagaccaacttccgggaggttgccatcaaaggtttctgggacatgtatgacccagagggctactctctgtggttctgtgactacaagtacaatgacgagaacaccgtctcctttgtgaccctgaacaaggttggtggattcctgcagcggatggacctgtgccgcaagtacgcctttggcaagatgctcgtggtaggttctgagccacccttcaagctgaagggcctttggctcttccgtggccaggaggttcccaagtttgtaatggatgaggtctatgacatggagctctacgagtggaccaaggtggacatctctgatgaggcccagaaggagcgtgtcaatgccatgatcgaggaccaggaacccttcgagggcgaggccttgcttgacgcgaaatgcttcaaggtccggaatgaagctagtgaagacacaat

SEQ ID NO: 203897 - DNA, 1624 bp, Zea Mays
atcttgcgcttaatccagtccgttcaattcttgacatccgaacaccccgccgacgcagccctagattccgcattcctctgtcacctccgcggcgccgccagcccgccatcacataacttcggcttctatcccttcgtaaacccttctctcttcttcccgcggcctgctcgttctatctgtccagcagacttgaggttccgagcggccggaaaccagcggcaaccgtcggcatggcgctcgtattgcattctggggctggaaacaaaaatgccttcaaggcacttattgctgcagaatacagtggggtcaaggttgagttgaccaaggattttgagatgggtgtctccaacaagacccctgagtttctaaagatgaacccccttgggaaggttcctgttctggagactcctgatggccctgtttttgagagtaatgctattgcgcgctatgttgctcgcttgaaggatgacaaccctcttttcgggtcttcccgtattgaacaagcccacgttgagcagtggatggactttgctgcaacagaagttgatcctggtgttggatggtacttgtatccaaggcttgggtacatcccttatgctcacacgactgaggaaacagctattgcttcattgaagagatcccttggtgctctgaacacacatcttgccttgaacacataccttgttggacattctgttactctagctgacattgtattgacatgcaacctctaccatggaattgcacggatcttgaccaaaagcttcacttctgatttccctcatgttgagaggagtcaaaggcaaaggatgtgaagaaagaaactccaaaggaggcccccaagccaaaggtggttgaggtaccagcagaagaggaagcaccaaagccaaagccaaagaatcctcttgacttgctgccaccaagcaagatggtccttgatgactggaagaggctatactcaaacacaaagaccaacttccgggaggttgccatcaaaggtttctgggacatgtatgacccagagggctactctctgtggttctgtgactacaagtacaatgacgagaacaccgtctcctttgtgaccctgaacaaggttggtggattcctgcagcggatggacctgtgccgcaagtacgcctttggcaagatgctcgtggtaggttctgagccacccttcaagctgaagggcctttggctcttccgtggccaggaggttcccaagtttgtaatggatgaggtctatgacatggagctctacgagtggaccaaggtggacatctctgatgaggcccagaaggagcgtgtcaatgccatgatcgaggaccaggaacccttcgagggcgaggccttgcttgacgcgaaatgcttcaagtgagtgtgctgtatccagagctgtttagccctctaattggatgtctatgttgatctggtatatcttgctatgaactggttaaagtttgtgctggtttgagaatttttgtttaccttgtcatcatttaagtgtttcgccgtaacaattttggtcatgtttttgaatgcctgtttgtattcgcgtcgtagttggggctatttatgcagactatccgatttaagtagattcaagtggcattattctctagta

SEQ ID NO: 203898 - DNA, 3490 bp, Zea Mays
aggtcgttaatggcgtcgtaggctcatggcggattggaagagggcaggaggcatcgtcgcactagtgtggaggcactgaggtaggtccgcaggtggcgggtcgtcggatcaaggaggcgcggtcgcgcgttcctgccgtcgggcagccaggggaaggagtgctagaggcagagaccagaggggaagcagccaagtgggtggcagagcgttggaggctgaaggacttgcccgattgatctgaaggaggcagtagccagtgttatatttgcatcaatgcggtgttcagatgtcacagaactagcagatgttcggaagcatttcaaaagcaagtacggaaaagagtttgaagcagcagcccttgaagtgcgacctgacagtggtgtaaatcgtctgataattgagaagctgtcagcaggagcacctgatgtgcagactaaaatcaaaacattgagctcgatagcagaggagcacaacatcaaatgggagccaaaagcgtttgaggagaaactgcaacaaccaactgaaggtcatctgtatggttctgcaacatattctggaggaaatacttcaactatgggatcatctacttctagcatatcaacaccacagcctacatattcaggtgttagtgcggcacctgtggactcagccactatccatgtgccagcaaataaaactgcatatggcagtgccaattctaatactttttcgaaagaaagcattcataatagttccagtgcatcagtacctcctatctcccaacatgggccgtctgcttactcttcagcacaggttcctggttctaacaatatctcacatggaaatccaggaggtccaccttaccctcaatacagcgcaacagtcccagacgcagtatccaggaatgaagatagcaatcagaatagggaaagaaaacctttggtgactggtgccaattggaatgtggaattcaaggatgcaacatctgctgctcaggcagcagcagagtctgcagagatggctagcattgctgctagagctgctgctgaacttgctagtcgtggaaactattctggagataaaggcactggagcctatgattcagccgcatacagtagcaaaaacacagtgaggaagcaacgggcggaacatgtagtgaaggatgagagtttccatgaccagagttcaggtgttaatgatccaagcgagatgccaagtaactcaagaaatttttttggaggaacagaaacatcccatgttgatagtgagaatatatcgacagccccatatcaacagttccatgcctacaatccagacagccatccatatgtttatgaaatgccaactgaaccacctcgtgctcattcacctgacccacgttttgatgatttatatgagagggaaagtgacattggaagatctgaagttgatccgtttgattttcctagagaaaacttccaagatactgcatctgttgggcacaatttcaaggatgtggaaatcaggacacctagctacgatcaagaaagcacagatgactactatggtaattttaattcttcacatgatacattggcccatggcagcagcaccactgcttgggataagcaaaacgacaaagctcaagacaactcttcacctgttgtttttgatcaatatgattctgatgttgaacaagagaatttgttggacacattctcctcaaagcatactgaacaactacctgctcccggagatcatatgagattctcaactgcagattggagtgaacagcataccagtgaatctccatccaagcagagaacgtcagccctattttccagaacagaaacacaactatctgataatttaggaacaaacaaaagtgatattccttcacctcattcttatcataacatgcgtcctgcttttgattcagatggtggtagctctgatgaggaaatagccacaaccacgcatgcagtgcctttaaggtcacattcaggaggatctgcttcgtctgtcctgaacaaaggtggtggacctgatgcttcacccatatttgattattcaggagcacatgcagtgaggaacttgaaccgtgtgcaaagcagagattctgatctttcggaagaagagacagatttagataaatttaaaggttcatccttcgccagagcaaatgagcagcagctgttgccttctgccatacgtacttcagcaacttctgatgataaggaagatgacatcagcctgaactttggtaagttaacgcctggactaagaaacaaacccaggcaacccccaccatacaccaaagtttccagggagagcattctgcctaagcagtccttgcctaaggtttctgctggcactgaagagtcagtcgattctgaagagaatactacattcaaacaggatagaagtagtccccaaagctcattttcagccaggacttcttcaggtaaagactacgacagtggactttatgaaaggaaccgaagtgttggaacacactgggaagcaaaatcaaccatagcaagaaattcctctggtttagatgatgctgagaagttatctgatctacctactaatataagtcttccaacaactaagagttctgaacgctggaattcgagtaaagtgccttatcatgaaaaaccaggtattggaacacgccgagaagtgagatcaacactggctagaaattattttgattcagatgacagtgaagaagaactagagcaacagcagattcctcagtcgaagcaatctggagtgctgatacagtcacgcaggacacgggaggtgacatcagacacaaagagagatggtcgtttccaaaccggagctcagtatggtgatgaaactgagagtgtgacaagtaagacacaagtccatcaaggattcaacagctcaagtactgaacggagtgaaaggagggatccaagtgtgtaccccagggttgcagtacagcgctcttcgtctaaagctgagcagattgaatctccgatggagagagggaagccacaaggagctgaaatgagaagcaccttatttcgaggaaatgaagaggacacagaaacctcatctggaactccaaaagaaagcacccccaaaacaccccctgcacatgttcatcccaagcttccaacagactatgattctttcgccgcacattttaggtctcttcgaacaaaccggccttaggtttacacgacatatagagtttggagtttcagttgaattaagtcatatatacgatactatgatacgttttatggaggttgagttgagatttgtacattatagcaacactgttttctggacactatcgtgctgtgctagtttgggcgtacaattcttttgttctcttgtatcctcatatactcaatagaatcatattgtaaagactttaatttcctgttagtgattattaataagcacggcatgttggcatatgtatagaacatgcggggttctttcattccattgtaacgggatctgctacactcatgctatgagattgttt

SEQ ID NO: 203899 - DNA, 3091 bp, Zea Mays
agtgggtggcagagcgttggaggctgaaggacttgcccgattgatctgaaggaggcagtagccagtgttatatttgcatcaatgcggtgttcagatgtcacagaactagcagatgttcggaagcatttcaaaagcaagtacggaaaagagtttgaagcagcagcccttgaagtgcgacctgacagtggtgtaaatcgtctgataattgagaagctgtcagcaggagcacctgatgtgcagactaaaatcaaaacattgagctcgatagcagaggagcacaacatcaaatgggagccaaaagcgtttgaggagaaactgcaacaaccaactgaaggtcatctgtatggttctgcaacatattctggaggaaatacttcaactatgggatcatctacttctagcatatcaacaccacagcctacatattcaggaggtccaccttaccctcaatacagcgcaacagtcccagacgcagtatccaggaatgaagatagcaatcagaatagggaaagaaaacctttggtgactggtgccaattggaatgtggaattcaaggatgcaacatctgctgctcaggcagcagcagagtctgcagagatggctagcattgctgctagagctgctgctgaacttgctagtcgtggaaactattctggagataaaggcactggagcctatgattcagccgcatacagtagcaaaaacacagtgaggaagcaacgggcggaacatgtagtgaaggatgagagtttccatgaccagagttcaggtgttaatgatccaagcgagatgccaagtaactcaagaaatttttttggaggaacagaaacatcccatgttgatagtgagaatatatcgacagccccatatcaacagttccatgcctacaatccagacagccatccatatgtttatgaaatgccaactgaaccacctcgtgctcattcacctgacccacgttttgatgatttatatgagagggaaagtgacattggaagatctgaagttgatccgtttgattttcctagagaaaacttccaagatactgcatctgttgggcacaatttcaaggatgtggaaatcaggacacctagctacgatcaagaaagcacagatgactactatggtaattttaattcttcacatgatacattggcccatggcagcagcaccactgcttgggataagcaaaacgacaaagctcaagacaactcttcacctgttgtttttgatcaatatgattctgatgttgaacaagagaatttgttggacacattctcctcaaagcatactgaacaactacctgctcccggagatcatatgagattctcaactgcagattggagtgaacagcataccagtgaatctccatccaagcagagaacgtcagccctattttccagaacagaaacacaactatctgataatttaggaacaaacaaaagtgatattccttcacctcattcttatcataacatgcgtcctgcttttgattcagatggtggtagctctgatgaggaaatagccacaaccacgcatgcagtgcctttaaggtcacattcaggaggatctgcttcgtctgtcctgaacaaaggtggtggacctgatgcttcacccatatttgattattcaggagcacatgcagtgaggaacttgaaccgtgtgcaaagcagagattctgatctttcggaagaagagacagatttagataaatttaaaggttcatccttcgccagagcaaatgagcagcagctgttgccttctgccatacgtacttcagcaacttctgatgataaggaagatgacatcagcctgaactttggtaagttaacgcctggactaagaaacaaacccaggcaacccccaccatacaccaaagtttccagggagagcattctgcctaagcagtccttgcctaaggtttctgctggcactgaagagtcagtcgattctgaagagaatactacattcaaacaggatagaagtagtccccaaagctcattttcagccaggacttcttcaggtaaagactacgacagtggactttatgaaaggaaccgaagtgttggaacacactgggaagcaaaatcaaccatagcaagaaattcctctggtttagatgatgctgagaagttatctgatctacctactaatataagtcttccaacaactaagagttctgaacgctggaattcgagtaaagtgccttatcatgaaaaaccaggtattggaacacgccgagaagtgagatcaacactggctagaaattattttgattcagatgacagtgaagaagaactagagcaacagcagattcctcagtcgaagcaatctggagtgctgatacagtcacgcaggacacgggaggtgacatcagacacaaagagagatggtcgtttccaaaccggagctcagtatggtgatgaaactgagagtgtgacaagtaagacacaagtccatcaaggattcaacagctcaagtactgaacggagtgaaaggagggatccaagtgtgtaccccagggttgcagtacagcgctcttcgtctaaagctgagcagattgaatctccgatggagagagggaagccacaaggagctgaaatgagaagcaccttatttcgaggaaatgaagaggacacagaaacctcatctggaactccaaaagaaagcacccccaaaacaccccctgcacatgttcatcccaagcttccaacagactatgattctttcgccgcacattttaggtctcttcgaacaaaccggccttaggtttacacgacatatagagtttggagtttcagttgaattaagtcatatatacgatactatgatacgttttatggaggttgagttgagatttgtacattatagcaacactgttttctggacactatcgtgctgtgctagtttgggcgtacaattcttttgttctcttgtatcctcatatactcaatagaatcatattgtaaagactttaatttcctgttagtgattattaataagcacggcatgttggcatatgtatagaacatgcggggttctttcattccattgtaacgggatctgctacactcatgctatgagattgttt

SEQ ID NO: 203900 - DNA, 3297 bp, Zea Mays
ctgcttcgaagttcgaacccgtgacctggacttgcccgattgatctgaaggaggcagtagccagtgttatatttgcatcaatgcggtgttcagatgtcacagaactagcagatgttcggaagcatttcaaaagcaagtacggaaaagagtttgaagcagcagcccttgaagtgcgacctgacagtggtgtaaatcgtctgataattgagaagctgtcagcaggagcacctgatgtgcagactaaaatcaaaacattgagctcgatagcagaggagcacaacatcaaatgggagccaaaagcgtttgaggagaaactgcaacaaccaactgaaggtcatctgtatggttctgcaacatattctggaggaaatacttcaactatgggatcatctacttctagcatatcaacaccacagcctacatattcaggtgttagtgcggcacctgtggactcagccactatccatgtgccagcaaataaaactgcatatggcagtgccaattctaatactttttcgaaagaaagcattcataatagttccagtgcatcagtacctcctatctcccaacatgggccgtctgcttactcttcagcacaggttcctggttctaacaatatctcacatggaaatccaggaggtccaccttaccctcaatacagcgcaacagtcccagacgcagtatccaggaatgaagatagcaatcagaatagggaaagaaaacctttggtgactggtgccaattggaatgtggaattcaaggatgcaacatctgctgctcaggcagcagcagagtctgcagagatggctagcattgctgctagagctgctgctgaacttgctagtcgtggaaactattctggagataaaggcactggagcctatgattcagccgcatacagtagcaaaaacacagtgaggaagcaacgggcggaacatgtagtgaaggatgagagtttccatgaccagagttcaggtgttaatgatccaagcgagatgccaagtaactcaagaaatttttttggaggaacagaaacatcccatgttgatagtgagaatatatcgacagccccatatcaacagttccatgcctacaatccagacagccatccatatgtttatgaaatgccaactgaaccacctcgtgctcattcacctgacccacgttttgatgatttatatgagagggaaagtgacattggaagatctgaagttgatccgtttgattttcctagagaaaacttccaagatactgcatctgttgggcacaatttcaaggatgtggaaatcaggacacctagctacgatcaagaaagcacagatgactactatggtaattttaattcttcacatgatacattggcccatggcagcagcaccactgcttgggataagcaaaacgacaaagctcaagacaactcttcacctgttgtttttgatcaatatgattctgatgttgaacaagagaatttgttggacacattctcctcaaagcatactgaacaactacctgctcccggagatcatatgagattctcaactgcagattggagtgaacagcataccagtgaatctccatccaagcagagaacgtcagccctattttccagaacagaaacacaactatctgataatttaggaacaaacaaaagtgatattccttcacctcattcttatcataacatgcgtcctgcttttgattcagatggtggtagctctgatgaggaaatagccacaaccacgcatgcagtgcctttaaggtcacattcaggaggatctgcttcgtctgtcctgaacaaaggtggtggacctgatgcttcacccatatttgattattcaggagcacatgcagtgaggaacttgaaccgtgtgcaaagcagagattctgatctttcggaagaagagacagatttagataaatttaaaggttcatccttcgccagagcaaatgagcagcagctgttgccttctgccatacgtacttcagcaacttctgatgataaggaagatgacatcagcctgaactttggtaagttaacgcctggactaagaaacaaacccaggcaacccccaccatacaccaaagtttccagggagagcattctgcctaagcagtccttgcctaaggtttctgctggcactgaagagtcagtcgattctgaagagaatactacattcaaacaggatagaagtagtccccaaagctcattttcagccaggacttcttcaggtaaagactacgacagtggactttatgaaaggaaccgaagtgttggaacacactgggaagcaaaatcaaccatagcaagaaattcctctggtttagatgatgctgagaagttatctgatctacctactaatataagtcttccaacaactaagagttctgaacgctggaattcgagtaaagtgccttatcatgaaaaaccaggtattggaacacgccgagaagtgagatcaacactggctagaaattattttgattcagatgacagtgaagaagaactagagcaacagcagattcctcagtcgaagcaatctggagtgctgatacagtcacgcaggacacgggaggtgacatcagacacaaagagagatggtcgtttccaaaccggagctcagtatggtgatgaaactgagagtgtgacaagtaagacacaagtccatcaaggattcaacagctcaagtactgaacggagtgaaaggagggatccaagtgtgtaccccagggttgcagtacagcgctcttcgtctaaagctgagcagattgaatctccgatggagagagggaagccacaaggagctgaaatgagaagcaccttatttcgaggaaatgaagaggacacagaaacctcatctggaactccaaaagaaagcacccccaaaacaccccctgcacatgttcatcccaagcttccaacagactatgattctttcgccgcacattttaggtctcttcgaacaaaccggccttaggtttacacgacatatagagtttggagtttcagttgaattaagtcatatatacgatactatgatacgttttatggaggttgagttgagatttgtacattatagcaacactgttttctggacactatcgtgctgtgctagtttgggcgtacaattcttttgttctcttgtatcctcatatactcaatagaatcatattgtaaagactttaatttcctgttagtgattattaataagcacggcatgttggcatatgtatagaacatgcggggttctttcattccattgtaacgggatctgctacactcatgctatgagattgttt

SEQ ID NO: 203901 - DNA, 1429 bp, Zea Mays
gcgatcctcaatctggtgtcccacggccgtccgatctcacattcactaccacctgtcccgtcctcccgtcccagtcaacaccaccgtcagttcagctgagcctgagcatggcgtcgccggcggccgtgctcgtcagcaatggcggtatctccccacacgctccaccttccgccgccgccttcctcgtctccactccgggcgcctacaccaccgcccccggaaccctcctctggtggacacgtcacctccgccgcctcgccgaatccgccacgctcctcgcccgttcccgccccaacctgctcggcctccccctcccccgatcgcgcgccctcgacctcgatttactatccatccattctctcgtgaacccctccgtgcgggtcgccatccgcgagatgcgcacaaggctgcccatgaccaaggacgaggatttggcgctcacggccctggtcaggggagccgatcccatttctggcggtggcggggctggcctcgacgtcttcgtccacgtggggacgtattccccgccgatctttggagaatcgggggccaggcttgccgcggccggcaggggaagggacgccgctgccgccaagtacgcgtcctgggccaggatccggaagagtttggaaaagatgaggcctcctggggtcactgagctcttgctgactaatgacggggatcacattcttgaaggcgctgttacaaacttctttgttgtctgccaacagggtgtgccatgatattggaatcccagtacgagaggtctctccatcgtggtccatgaatgaattctggaaggaagcctttgttacaagtagcttaaggtttatccagcatgtagagtcagttcaagtgcctttattttgggaggacatacaatctaaaacctggagtgatgtaccttgggcggtgaagaagtttcagggtgttggatgcattaccacacagattcagagggaattactgaagagagcaagaagtgataagtacggcgttaacggtctcctttgagttatgatcattgttgttgattcatttgaagggacttcttttccaggcacttaattatttcatttctgctgggacgacactgttaagactgggtttcttgtgtgtataattcagacattttttgtctgctcagtgctgtgtcggccttctacaagctgcaggtagatagccactgggcagtagcgaagcaattccatgcttgtttattactgtaattatgaggatggatcagatttagctaactgtcggagtccttttttttacttgtacctgcaattaattgatctgatctgtttgccgggtaggtgttcgtgaatatgaatggctgaatgaatttgggttccttaaattaaattaggtatgtgctcgtgtgttgtcacgatagttaaaatttagtataaaacatagaatagag

SEQ ID NO: 203902 - DNA, 975 bp, Zea Mays
ggaatgtaataatgtaccctacttatggttgcaattatgagaagtttgcgacatccgaacattgttcttcttatgggtgctgtcactcagccacctaacctttcaattgtgactgaatacctatcaagaggtagcttatacagacttttacacaggcatgctgcaagggaaaatctggaggagcgccgccgcttgagtatggctttcgacgtggcaaaagggatgaactatcttcataagcgtaatcctccaatagtccaccgggatcttaagtcaccaaacctgttggttgacaaaaagtacactgtgaaagtctgtgactttggtctctccagattgaaggcaaacacatttctgtcttccaagactgcagcagggactcttcggtgtaatcttatgggagcttatgacattgcagcagccatggagtaatttaaatccagctcaggtcgttgcagcggttggtttcaagggacaaaggcttgagatcccaagcagcgttgatccgaaagtggcggcagtaatcgagtcctgctgggtcagggagccctggagacgaccctcttttgccagtatcatggaatccctgaaacttctcatcaagacattaccacccaatcagctcctcgaagaaaattagttaccacccaagcaacttgcaaattatgtcacctctagagttttctcgatttgtttagatccgatatgcgccaggcctctcaaaccattcgtcttcggcgccacgtattccctgatgagaaatattcaaaactacacctgtcacaaaaggggaaaaactatggttggacaataagattcatgaaaaaaatatgtgatccaaattaagtgtacatctcttttatcaaggaaccaaatgtaagttggtcaaatatatacatataagtactaatatttatggaatatatacttttacaataaaattattaaagatataaatatcgatgctattttcca

SEQ ID NO: 203903 - DNA, 2172 bp, Zea Mays
atcccgacgacctcgagcgcccgtcaatggctgcttgtcctactccgacaaggtctcggatggtttctacttcatccaggggatggatcccttcatatggacgctctgcaacgatttgcacgacggaggccgcgtccccactattgagtccctcaaggctgtcaatcccaccgattctgccatcgaggtggtcatcgtagataaagtggcggactatgacctgaggcagctgataagcatggccattgacgtttctctgaaccgtaccgactccaaggagatcgccactcgactcgctgccgttgtgtccacgaagatggggggatcggtagcagctaccgaggaacacgagttgggtccccggtggagagactctgttgggttcctgaagattagctcagggtctgttgtacttcccatcggaaagttatcagttggcttttgttgccaccgagcattactgttcaagaccctggcggattccatcaatctgccctgtcgcattgtgaagggatgcaagtactgcaaagctggtgctgccacttcttgcttggtgcgctttggtcatgacagggaatgtctaattgatttaattgggaacccgggattcttatctgaacctgactccctcttgaatggactatcatccatctctgtttcttcaccattgcgcccaccaaaacatgactcagctgataattctgataatttcaagttgtttgccaagaaatatttccttgattgtcagtcgttaaatctcatgttcagtgatccagcagctggaacggttatcgacttagatgaggttatgggatcaaatctaggtctaaactcatcacatgcaacaaacagtgattgtcaagctacctttactcatcttaaggctggtactcgacgcagtagtcaagatgggagttttataatgcagaggagttcccaagaggatactcaatctggactaagtgatccctttagcgatatgtcccttgagatagaagacttgattatcccatggagtgagcttgttctgaaagagaaaattggtgcaggttcttttggtactgtgcaccgtgcggattggaatggttcggatgtcgcagtaaaaattctaatggagcaggacttccatccagagcgtctcaaagaatttttgagagaggttgcaattatgagaagtttgcgacatccgaacattgttcttcttatgggtgctgtcactcagccacctaacctttcaattgtgactgaatacctatcaagaggtagcttatacagacttttacacaggcatgctgcaagggaaaatctggaggagcgccgccgcttgagtatggctttcgacgtggcaaaagggatgaactatcttcataagcgtaatcctccaatagtccaccgggatcttaagtcaccaaacctgttggttgacaaaaagtacactgtgaaagtctgtgactttggtctctccagattgaaggcaaacacatttctgtcttccaagactgcagcagggactcctgagtggatggcaccagaagttctacgagacgagccctcaaatgagaagtctgatgtttacagcttcggtgtaatcttatgggagcttatgacattgcagcagccatggagtaatttaaatccagctcaggtcgttgcagcggttggtttcaagggacaaaggcttgagatcccaagcagcgttgatccgaaagtggcggcagtaatcgagtcctgctgggtcagggagccctggagacgaccctcttttgccagtatcatggaatccctgaaacttctcatcaagacattaccacccaatcagctcctcgaagaaaattagttaccacccaagcaacttgcaaattatgtcacctctagagttttctcgatttgtttagatccgatatgcgccaggcctctcaaaccattcgtcttcggcgccacgtattccctgatgagaaatattcaaaactacacctgtcacaaaaggggaaaaactatggttggacaataagattcatgaaaaaaatatgtgatccaaattaagtgtacatctcttttatcaaggaaccaaatgtaagttggtcaaatatatacatataagtactaatatttatggaatatatacttttacaataaaattattaaagatataaatatcgatgctattttcca

SEQ ID NO: 203904 - DNA, 431 bp, Zea Mays
gacgcatcgagcagcctaggaacatatggcaggatgttgtgagaaggatgttcagtaagcgcgagcgtagcaatcttgacatctacaaagatttcaaccaacttaccaagcgcggattcatggcatggccataatcagattaatgttggggcctctgaccaaagtgggaggatcagcaagaagaggaaggaaagtatagcaacggtggggagaatgattttcaagaagatgacgaaccctaggcaactaagaagccaagagttgtttggtcagtcgaactggtcggaaatttgttgcggttgtcaatcagcttggaattgataaagctgtaccaaaaagaatccttgagctgatgaatgtggagaaactcaccaggaaaatgtcacgggccatcttcagacacccatctgatcaaggttttccatgatgcc

SEQ ID NO: 203905 - DNA, 2333 bp, Zea Mays
cgcgggcagccaaagcggcgcgggcccagccgggtcaggccacgtggcggaagcggtgcgggcgatcttcttgtccgcgtccatccacgtcgaccccgtcaaggccggattcttttatcctcctcctccccgcccctgatcgatccctccccgacatcaaccggcgcagcgcgaccatccccagccactattattattaccatcatcatcacctacccgctgcctccatcctcctcctcgcccctgttcctcgcgtcttcccgtcgtctccgactcgcttccagttcccgatttgccgaacgccagcgacgccgtcgcatggagatctccttcgaggcgtgggagggcgtgcagcggcacggccaggacctcgcggaccgcctcgcgcagggcttcacgggcctgctccaggcgccgccgcagttcccgtggccgccggcgccgcacaagcggatgcccttcgacatcgacctccccgtcgtccccttcggcgccggcgtgccgaaaaaggacctccccttcccggccgccgccgccgccgtctcctcggtcatcgacatcggaggcaggctaggccaggccggcgccgagcttggggcgtccgtaggcggggccgtgcagcacgccgtgcgccatctgcccgtgccgttccgcaacgcccagatccggcgccgcacgctaccgccggcgccgcctcaggcgcccctgccgcccgcgacttcggtgggcgagggcgcggcagggcgctccgtcgaaagggctgctgtagataggtgccccctcgaggcggcggccgccgccgccgctgcggccactgggagcgcggctgcgtcgagcgtcagcggccatgttagcggggacgatttggacgaggacgacgaaggcttcggctgcggtattgggactcttggaaactttaagaaggccaacggtactgtaaatatgtcggcaacatacaattccaggagtcaagacatcgagagttctgttgttgcacatggagacctctggaggctagaggcatcgcgtggtggatcaacttctggaaatggcacttcgcctctgtaccttgttcagttggggcctctactttttgttcgagactctacacttctgttgcctgttcatctatcaaagcaacacctgctttggtacggttatgatcgcaagaatggtgtccattcactctgtccagctatatggtcaaaacataggagatggttgatgatgtcaatgatgtgtctcaatccaatagcttgttcgtttatggatttgcaattccctaatgggcaactaacatatgttgctggtgaggggatatcagccagtggttttcttccgttatttggtgggttgcttcaagctcaaggaaaatatcctggagaaacaagagtgagcttttcttgcaaggagttactcaagccttggcatggaaaagatctggtcttatggtgagacccagtatacaagtcagtgtgtgccctacgtttggaggaagtgatcctggggtacgggcagaagttgtccattcattgaaagaggaattgaatctgatgtgtggcctctcttgctcgcggcatccatcagcttatactgctctatctattggacgatcaaagtggaacggtcaagtgggcagttctggagtggtaatcaccttggaaacacctcttaataacattggaaggccgtcgttatctgttcaactgaatggtggttttgagttgtgattcttcagactccagcgctgaagctgtacataccagtgtgtatatattgccatcaccaatgttcgtgctccatagtttgtggaagtgggctgcagcctgccggcttgcaggtcgtttttgttactgtagtctataggtagtctcaactcagcaaatcagctgccatggtacccaacccatgcgggcacagaagtcaactactttgttgttcaatcattatgacaatccttaggtcttatttggatactctcgtattcacattaatctcacatttattgaagtgaaatttaaattaatttacactccaatcaacttcaatacatatggattgaagtcaatacgagagtatcgaaatacggccttaagggattgtgacgcttgcagcaggtgagctcatattagaagttcgtgaaagtggaggaccacgtaatcatgcaagttgttcatccagaatcacattcttttggtgcaggactggcaggttgggatgtaaacggacggatgatcttgttttaacattataactcggacacgcaaaatgataaaaacgaactaatatgaaaaaatacgtgggtaacggtaaaaaggataacaaagctacaa

SEQ ID NO: 203906 - DNA, 1938 bp, Zea Mays
gggaaagcctaggaaagccaccgctcaccttctctttctctgtagcctctgccaccaaacagctttggagtgggatctcctcttccttccccgccctcttccgccgacagcgggagagtacgcggcgcagcggctacaccaccgtctccaggctcccaaacacgtccctgccatccttttttgactccggagtccctcccctccttgcctacctggcgaggatcccatacccaatcccatccaactagcttcctactacttcccccccgtcctctcgatccctctccccgttcccctgaccagccgggcgtcaagtggcagggaggagaggcggcaccgcgtgtgaggctcaatggggaaggggagcgcgcgggcgctggccctggcgctcgccgtgattctcgcctgctccgacgtcgccgtcgtcacggctcaggaaaccgagcggatcgaaggaagcgctggtgatgtgttagaagatgaccctgttgggaggctcaaggtctatgtctatgatctccccagcaaatacaacaagaagctgctcaagaaggatcctaggtgcctgaaccatatgtttgccgctgagatcttcatgcaccggttcctgttgtcaagcgctgtccgaacttttaatcctgaggaagcagattggttctacacacccgtatacacgacgtgtgatctgacccctaagggtcttcccttgcctttcaagtctcctcggatgatgcgtagcgcaatccagctgattgctacgaactggccttactggaatagatcagagggcgcagatcatttctttgtcacaccccatgactttggtgcttgctttcattatcaggaagagaaagccattggacggggaatccttcccttgcttcagcgtgctacgttggttcagacctttggacagaagaaccatgtctgcctgaaggatgggtccatcacgatcccgccatatgcgcctcctcagaaaatgcagactcaccttatccccccggacacccctcgatccatctttgtgtacttccgaggtctgttctatgacaccggcaatgaccccgagggcggatactacgcaagaggtgctcgtgcatcggtctgggagaacttcaagaacaacccgctgtttgacatctcgaccgatcacccaccaacatactacgaagacatgcagcgctcggtgttctgcctctgcccgttgggctgggcaccgtggagtcccaggctggtggaggccgtggtgttcggctgcatccccgtcatcatcgccgacgacatcgtgctgcccttcgcggacgccatcccgtgggaggagatcgccgtgttcgtgcccgaggacgacgtcctgaggctggacaccatcctcacgtccatccccatggacgagatcctccgcaagcagaggctgctggccaacccgtccatgaagcaggcgatgctgttcccgcagcccgcggagccgagggacgccttccaccaggtcctcaacgggctggcgcgcaagctgccccaccccaaggacgtcttcctcaagcccggccagaaggtgctcaactggacagagggcgcccaggatgacctcaagccgtggtaggccgtggctgctgctcttttgtaaacgacacaaccagatcgatgatggtgatgctgatgagtgaaccacacaaccattggttaaatgtaaagctcttaatcctcttgctcctccaacctttcttctttttgattttgaggcaatgtgcatgtcttgcctgtatatatacactagtacatgacaatcagggtggccggccggggcaagacaaattgaggtgccaacacattacacactaatagtattagtattatattctagcatgttttgacggcaattcctttctttagaactcggtatagcagagggacaaacccaacgtttttttttgtttttta

SEQ ID NO: 203907 - DNA, 1746 bp, Zea Mays
caccttctctttctctgtagcctctgccaccaaacagctttggagtgggatctcctcttccttccccgccctcttccgccgacagcgggagagtacgcggcgcagcggctacaccaccgtctccaggctcccaaacacgtccctgccatccttttttgactccggagtccctcccctccttgcctacctgggaggagaggcggcaccgcgtgtgaggctcaatggggaaggggagcgcgcgggcgctggccctggcgctcgccgtgattctcgcctgctccgacgtcgccgtcgtcacggctcaggaaaccgagcggatcgaaggaagcgctggtgatgtgttagaagatgaccctgttgggaggctcaaggtctatgtctatgatctccccagcaaatacaacaagaagctgctcaagaaggatcctaggtgcctgaaccatatgtttgccgctgagatcttcatgcaccggttcctgttgtcaagcgctgtccgaacttttaatcctgaggaagcagattggttctacacacccgtatacacgacgtgtgatctgacccctaagggtcttcccttgcctttcaagtctcctcggatgatgcgtagcgcaatccagctgattgctacgaactggccttactggaatagatcagagggcgcagatcatttctttgtcacaccccatgactttggtgcttgctttcattatcaggaagagaaagccattggacggggaatccttcccttgcttcagcgtgctacgttggttcagacctttggacagaagaaccatgtctgcctgaaggatgggtccatcacgatcccgccatatgcgcctcctcagaaaatgcagactcaccttatccccccggacacccctcgatccatctttgtgtacttccgaggtctgttctatgacaccggcaatgaccccgagggcggatactacgcaagaggtgctcgtgcatcggtctgggagaacttcaagaacaacccgctgtttgacatctcgaccgatcacccaccaacatactacgaagacatgcagcgctcggtgttctgcctctgcccgttgggctgggcaccgtggagtcccaggctagtcgaagccgtggtctttggctgcatcccggtgatcatcgcagacgacatcgtcctccccttcgcggacgccatcccgtgggaggagatcggcgtcttcgttgcagaggatgatgtcccgcagctggacagcatcctgacatccatccccacagacgtcgtgctgaggaagcagcggctccttgcgaacccgtcgatgaagcaggccatgctgttcccccagcctgctcagccaggagatgcgttccaccagatcctgaacggcctagcgcgcaagctcccgcacggcagcaatgtcttcctgaagcctggtgagagggccctgaactggaccgctggaccaccaggcgacctgaaaccttggtagcgtcctgtggatctgagatggatacgacttgttctgaaaggaaatatggagaacatgattatatatatacccgtgcctttgagttaccatgggtgcatagtgctgacaagaagccaaatgtacatcgttctatgttctttttctataactgttatatacatataaatatcttcgtttcttcttcttctttcttccatttcttcactagatgataagagtgccaagccttgtcggtcatatgtggatatatcataaatgaaattcacaagattgtact

SEQ ID NO: 203908 - DNA, 3643 bp, Zea Mays
ctcgtgcgcctgcgccacccgggcgtgctgcacgtcgtgcaggcgctcgacgagaccaaggccgccatggccatggccactgagcccgtcttcgcctccgtagctaacgcgctcgggtgccttgacaatgttggcaaggtgcccaaggaggtcaagggcatggaaatggggctacttgagattaaacatgggctgctacaagttgcagagacgttggattttcttcataacaatgctcatcttgcccatcgagctatatcgcctgagacggtatttataacttctaacgggtcttggaagcttggtgggtttggttttgctctttcggttgatcaagcagcagttggtttgagtttgacttcatcacaactatttcattattcggactatgatgtcgaggatacagctttacctcttcaaccatcgttgaactatactgcaccagaattggtccaaagtagagattctaaagttggctctgcttgtgatatgtttagctttggatgtttggcttacaatctggttgctcgtagaccacttctggactgccataacaatgttaaaatgttttgcaagtagaccatcttgttcaggctttatccacattctacagcacctatctgatgggattctctgccccctctattcttgcagtacatgaatgccttgacatatttaacaagtgaagccttttctaatattccttctgatttggtattggatttgcaaaggatgctatcgatggatgcactatcacgtcctagtgctatggcctttacaggttcttctttcttccgggatgatacgaggttgcgcgctcttcgtttccttgaccatttgcttgagagagataatatgcagaagacagagtttttgaaggcattatcagatatgtggaaggattttgattcccgagttcttcgatcaggtgcttcctcctctttgtgctgagttacgcaacatggttatgcagccaatgattttgcctatggttctaactatagcagaatctcaggataaaggggattttgaactcgcaacactgcctgcgcttgttccagtgtttgcttcagcgtcaggtgaaactctacttttgcttgtgaagcatgcagatctcatcattaacaaggccactcaggaacatttgatatcacatgttcttccaatgctggtccgggcttatgatgacaatgatccccggttacaggaagaagttctgcgtcgaacagtaccactgtctcgtcaacttgacaccaagctagtcaataaagctgtgcttcctcgtgtacatggattagctctaaagacaacagttgctgcggtgcgtgtgaatgcgttgcgctgtttaggagatcttgtgccatccttggacaaagaaggaataatgggtatcttggagactgttcggcgttgcacagctgttgaccatactgcgccaactcttatgtgcacacttggtgttgctaatgcaatctataaacaacacatcaactgaatgtacaacaatttgccaagtatatgctatttgtcaaggacattacaagattgaagagaagcgtggtgtgactgttacagataatgggaacacagaggtaaaatcatcaccttcattggcaaacgggatccattctgaacctatgtcaggacaaataccagttgcaaagagcagccctgcatgggatgaagactggggtcctactaagaaatccggtgttccatctctttcagttgattctagtgcacaaacaaagcaaccctcagtagacccttttgacttcggtactcaaacaaagcaatccacaacactcccctttgatttgagcacccaggcaaagcagccaccatcagtttctcatgttacagcagctacaatcccacctgcgcaaccacaaccatcactacaatctcttgcggctagttcaggacctaaaatttctggctcatgtgtccctgtcgacattgagtggcctcctcgaagaagctcgtcatccaacttcaatgcacccttgtctattagcaaggataatggttctggaaggctgtctagcgatggagttgatgatattgatccttttgctgattggcccccaatacctagcaatgttaatagcatttcagcaaccgagcattggccaagcataaatcaaaatatttcgggatttagctcaggcaacatagtttttggtggcagcgggaattctgtagggcaaacgaaaagcaaccaaatgagctggtcaaacacgtctaatctaatgggcacaaactcaactggcagctatttgaatcagggcagtgcagctctaggtttcggaaatccaaatggaggattgagcacaggtctctccaatccaagtagttccagtacaggcctgagcatgatgctaccaaaatctgattctggatcattgtcgacgtcggtcaacaatgccgcacatgggctactaagacttgcccctcctccatccacatcggttggaagagggcgcggtagaaatcaaggacagtccgcactctcccgagcatcaaggcctcatgccaactcggcatcaggacaacaacctatcctggatttactctagtaagagatggtcgcctctgttcttcgcgttcggattgtcaatgtgtacatcctcaaacctttgtaaggtgagcatcatactgttcttttggacatgcatgtggcgaaagcagttctttttgttcattttgaagctgggtggccttggtttatagtctgaagggattctacttcggggatcttgcagaggtttaccttttctcatgctcccgtgcttagggttttgaattgggcatcgaggccatcttcatactggtgacagaagaaatgttttgtgtatatttctgtccaaactcggctgtagctttcagagtttgtgaatagttgacatgtttatatgggctgtgaagttttgaaatgtttaatgggccttacaggtgtgtaccttttctcatgtactccgcgcaaaattgtacaacaatgtttaatgggccttataggtggacctttctcatgtactccacgctccaccaacaatgtttggccttatatatatttggtgactcggtgttatagacaaaagccagatgttatactcgctatccttggttggattcttgtgtcccaaatctctgacgttgaccttgtacaggactgggggttcaactgcagtggtgctgtgagccgtgcatgcgatggacaactctcctatcgagcattttcatcaattcgctacacggccctacatccctgtgcctgtgtgtgtaccactagcttgcattgcattgcatgcagagtgtactattgatgggtgatgcattggatggggcatgcacagcaggaatatttgcagttgatgagcggcaggaatcagtggctcagggaaaattgaatggcgatctggccttcactccacatgagtacgtacctatacgtacgcatgtatcatcagacggagtcaggaggatgcgggtagtgtccctgtgttgtctaccattttgtctcaccaatgtggtcccaaagtacatgatgtttttttacttttacacactttaaaccgaccgtaatatttaattcttctgtaaatacttattttattttatcattaaatatattttttaatta

SEQ ID NO: 203909 - DNA, 3999 bp, Zea Mays
ctcgtgcgcctgcgccacccgggcgtgctgcacgtcgtgcaggcgctcgacgagaccaaggccgccatggccatggccactgagcccgtcttcgcctccgtagctaacgcgctcgggtgccttgacaatgttggcaaggtgcccaaggaggtcaagggcatggaaatggggctacttgagattaaacatgggctgctacaagttgcagagacgttggattttcttcataacaatgctcatcttgcccatcgagctatatcgcctgagacggtatttataacttctaacgggtcttggaagcttggtgggtttggttttgctctttcggttgatcaagcagcagttggtttgagtttgacttcatcacaactatttcattattcggactatgatgtcgaggatacagctttacctcttcaaccatcgttgaactatactgcaccagaattggtccaaagtagagattctaaagttggctctgcttgtgatatgtttagctttggatgtttggcttacaatctggttgctcgtagaccacttctggactgccataacaatgttaaaatgtacatgaatgccttgacatatttaacaagtgaagccttttctaatattccttctgatttggtattggatttgcaaaggatgctatcgatggatgcactatcacgtcctagtgctatggcctttacaggttcttctttcttccgggatgatacgaggttgcgcgctcttcgtttccttgaccatttgcttgtatgtatttattattcccctggataagttaaaaggagagagataatatgcagaagacagagtttttgaaggcattatcagatatgtggaaggattttgattcccgagttcttcgatataaagtatgttcaatactgtgatccattatatcttcttctgatcaaggcaccattcttttatttatttgagcatcattttgttttactacatatcatatcattgaagctattggaacctgcatatgttcaattaaaccgacacatctacccagatcccataatgtttggttgctatcagcatgtggcacttcctgtatggaaagttggaaataaataaaagaatatctaaaccttgatttctagatttgaacttgtcacagtacgaatcaattctctggttgacccattcttacgatgtgattccgttttttctgtctgtgcctttcaaactgttttgtccaggaaaaataacagacgtatatttatttgatccattggttattccaaagctgactctctttgcaaccaggtgcttcctcctctttgtgctgagttacgcaacatggttatgcagccaatgattttgcctatggttctaactatagcagaatctcaggataaaggggattttgaactcgcaacactgcctgcgcttgttccagtgtttgcttcagcgtcaggtgaaactctacttttgcttgtgaagcatgcagatctcatcattaacaaggccactcaggaacatttgatatcacatgttcttccaatgctggtccgggcttatgatgacaatgatccccggttacaggaagaagttctgcgtcgaacagtaccactgtctcgtcaacttgacaccaagctagtcaataaagctgtgcttcctcgtgtacatggattagctctaaagacaacagttgctgcggtgcgtgtgaatgcgttgcgctgtttaggagatcttgtgccatccttggacaaagaaggaataatgggtatcttggagactgttcggcgttgcacagctgttgaccatactgcgccaactcttatgtgcacacttggtgttgctaatgcaatctataaacaacacatcaactgaatgtacaacaatttgccaagtatatgctatttgtcaaggacattacaagattgaagagaagcgtggtgtgactgttacagataatgggaacacagaggtaaaatcatcaccttcattggcaaacgggatccattctgaacctatgtcaggacaaataccagttgcaaagagcagccctgcatgggatgaagactggggtcctactaagaaatccggtgttccatctctttcagttgattctagtgcacaaacaaagcaaccctcagtagacccttttgacttcggtactcaaacaaagcaatccacaacactcccctttgatttgagcacccaggcaaagcagccaccatcagtttctcatgttacagcagctacaatcccacctgcgcaaccacaaccatcactacaatctcttgcggctagttcaggacctaaaatttctggctcatgtgtccctgtcgacattgagtggcctcctcgaagaagctcgtcatccaacttcaatgcacccttgtctattagcaaggataatggttctggaaggctgtctagcgatggagttgatgatattgatccttttgctgattggcccccaatacctagcaatgttaatagcatttcagcaaccgagcattggccaagcataaatcaaaatatttcgggatttagctcaggcaacatagtttttggtggcagcgggaattctgtagggcaaacgaaaagcaaccaaatgagctggtcaaacacgtctaatctaatgggcacaaactcaactggcagctatttgaatcagggcagtgcagctctaggtttcggaaatccaaatggaggattgagcacaggtctctccaatccaagtagttccagtacaggcctgagcatgatgctaccaaaatctgattctggatcattgtcgacgtcggtcaacaatgccgcacatgggctactaagacttgcccctcctccatccacatcggttggaagagggcgcggtagaaatcaaggacagtccgcactctcccgagcatcaaggcctcatgccaactcggcatcaggacaacaacctatcctggatttactctagtaagagatggtcgcctctgttcttcgcgttcggattgtcaatgtgtacatcctcaaacctttgtaaggtgagcatcatactgttcttttggacatgcatgtggcgaaagcagttctttttgttcattttgaagctgggtggccttggtttatagtctgaagggattctacttcggggatcttgcagaggtttaccttttctcatgctcccgtgcttagggttttgaattgggcatcgaggccatcttcatactggtgacagaagaaatgttttgtgtatatttctgtccaaactcggctgtagctttcagagtttgtgaatagttgacatgtttatatgggctgtgaagttttgaaatgtttaatgggccttacaggtgtgtaccttttctcatgtactccgcgcaaaattgtacaacaatgtttaatgggccttataggtggacctttctcatgtactccacgctccaccaacaatgtttggccttatatatatttggtgactcggtgttatagacaaaagccagatgttatactcgctatccttggttggattcttgtgtcccaaatctctgacgttgaccttgtacaggactgggggttcaactgcagtggtgctgtgagccgtgcatgcgatggacaactctcctatcgagcattttcatcaattcgctacacggccctacatccctgtgcctgtgtgtgtaccactagcttgcattgcattgcatgcagagtgtactattgatgggtgatgcattggatggggcatgcacagcaggaatatttgcagttgatgagcggcaggaatcagtggctcagggaaaattgaatggcgatctggccttcactccacatgagtacgtacctatacgtacgcatgtatcatcagacggagtcaggaggatgcgggtagtgtccctgtgttgtctaccattttgtctcaccaatgtggtcccaaagtacatgatgtttttttacttttacacactttaaaccgaccgtaatatttaattcttctgtaaatacttattttattttatcattaaatatattttttaatta

SEQ ID NO: 203910 - DNA, 3596 bp, Zea Mays
ggctcgtgcgcctgcgccacccgggcgtgctgcacgtcgtgcaggcgctcgacgagaccaaggccgccatggccatggccactgagcccgtcttcgcctccgtagctaacgcgctcgggtgccttgacaatgttggcaaggtgcccaaggaggtcaagggcatggaaatggggctacttgagattaaacatgggctgctacaagttgcagagacgttggattttcttcataacaatgctcatcttgcccatcgagctatatcgcctgagacggtatttataacttctaacgggtcttggaagcttggtgggtttggttttgctctttcggttgatcaagcagcagttggtttgagtttgacttcatcacaactatttcattattcggactatgatgtcgaggatacagctttacctcttcaaccatcgttgaactatactgcaccagaattggtccaaagtagagattctaaagttggctctgcttgtgatatgtttagctttggatgtttggcttacaatctggttgctcgtagaccacttctggactgccataacaatgttaaaatgtacatgaatgccttgacatatttaacaagtgaagccttttctaatattccttctgatttggtattggatttgcaaaggatgctatcgatggatgcactatcacgtcctagtgctatggcctttacaggttcttctttcttccgggatgatacgaggttgcgcgctcttcgtttccttgaccatttgcttgtatgtatttattattcccctggataagttaaaaggttgcaatctcttgtttttgtatcagtctttcttctttgctgtctgagaatcacctttgactagaattgttttcagttgtacctgtcaactcagcagcaagagtcttgcctgtttgactagacaatgaaacgacacaatttagtacctgacaatggccctaaattttaaggcaccattcctttcaggagagagataatatgcagaagacagagtttttgaaggcattatcagatatgtggaaggattttgattcccgagttcttcgatataaagaaaaataacagacgtatatttatttgatccattggttattccaaagctgactctctttgcaaccaggtgcttcctcctctttgtgctgagttacgcaacatggttatgcagccaatgattttgcctatggttctaactatagcagaatctcaggataaaggggattttgaactcgcaacactgcctgcgcttgttccagtgtttgcttcagcgtcaggtgaaactctacttttgcttgtgaagcatgcagatctcatcattaacaaggccactcaggaacatttgatatcacatgttcttccaatgctggtccgggcttatgatgacaatgatccccggttacaggaagaagttctgcgtcgaacagtaccactgtctcgtcaacttgacaccaagctagtcaataaagctgtgcttcctcgtgtacatggattagctctaaagacaacagttgctgcggtgcgtgtgaatgcgttgcgctgtttaggagatcttgtgccatccttggacaaagaaggaataatgggtatcttggagactgttcggcgttgcacagctgttgaccatactgcgccaactcttatgtgcacacttggtgttgctaatgcaatctataaacaacacatcaactgaatgtacaacaatttgccaagtatatgctatttgtcaaggacattacaagcaagattgaagagaagcgtggtgtgactgttacagataatgggaacacagaggtaaaatcatcaccttcattggcaaacgggatccattctgaacctatgtcaggacaaataccagttgcaaagagcagccctgcatgggatgaagactggggtcctactaagaaatccggtgttccatctctttcagttgattctagtgcacaaacaaagcaaccctcagtagacccttttgacttcggtactcaaacaaagcaatccacaacactcccctttgatttgagcacccaggcaaagcagccaccatcagtttctcatgttacagcagctacaatcccacctgcgcaaccacaaccatcactacaatctcttgcggctagttcaggacctaaaatttctggctcatgtgtccctgtcgacattgagtggcctcctcgaagaagctcgtcatccaacttcaatgcacccttgtctattagcaaggataatggttctggaaggctgtctagcgatggagttgatgatattgatccttttgctgattggcccccaatacctagcaatgttaatagcatttcagcaaccgagcattggccaagcataaatcaaaatatttcgggatttagctcaggcaacatagtttttggtggcagcgggaattctgtagggcaaacgaaaagcaaccaaatgagctggtcaaacacgtctaatctaatgggcacaaactcaactggcagctatttgaatcagggcagtgcagctctaggtttcggaaatccaaatggaggattgagcacaggtctctccaatccaagtagttccagtacaggcctgagcatgatgctaccaaaatctgattctggatcattgtcgacgtcggtcaacaatgccgcacatgggctactaagacttgcccctcctccatccacatcggttggaagagggcgcggtagaaatcaaggacagtccgcactctcccgagcatcaaggcctcatgccaactcggcatcaggacaacaacctatcctggatttactctagtaagagatggtcgcctctgttcttcgcgttcggattgtcaatgtgtacatcctcaaacctttgtaagaggtttaccttttctcatgctcccgtgcttagggttttgaattgggcatcgaggccatcttcatactggtgacagaagaaatgttttgtgtatatttctgtccaaactcggctgtagctttcagagtttgtgaatagttgacatgtttatatgggctgtgaagttttgaaatgtttaatgggccttacaggtgtgtaccttttctcatgtactccgcgcaaaattgtacaacaatgtttaatgggccttataggtggacctttctcatgactgggggttcaactgcagtggtgctgtgagccgtgcatgcgatggacaactctcctatcgagcattttcatcaattcgctacacggccctacatccctgtgcctgtgtgtgtaccactagcttgcattgcattgcatgcagagtgtactattgatgggtgatgcattggatggggcatgcacagcaggaatatttgcagttgatgagcggcaggaatcagtggctcagggaaaattgaatggcgatctggccttcactccacatgagtacgtacctatacgtacgcatgtatcatcagacggagtcaggaggatgcgggtagtgtccctgtgttgtctaccattttgtctcaccaatgtggtcccaaagtacatgatgtttttttacttttacacactttaaaccgaccgtaatatttaattcttctgtaaatacttattttattttatcattaaatatattttttaatta

SEQ ID NO: 203911 - DNA, 3448 bp, Zea Mays
ctcgtgcgcctgcgccacccgggcgtgctgcacgtcgtgcaggcgctcgacgagaccaaggccgccatggccatggccactgagcccgtcttcgcctccgtagctaacgcgctcgggtgccttgacaatgttggcaaggtgcccaaggaggtcaagggcatggaaatggggctacttgagattaaacatgggctgctacaagttgcagagacgttggattttcttcataacaatgctcatcttgcccatcgagctatatcgcctgagacggtatttataacttctaacgggtcttggaagcttggtgggtttggttttgctctttcggttgatcaagcagcagttggtttgagtttgacttcatcacaactatttcattattcggactatgatgtcgaggatacagctttacctcttcaaccatcgttgaactatactgcaccagaattggtccaaagtagagattctaaagttggctctgcttgtgatatgtttagctttggatgtttggcttacaatctggttgctcgtagaccacttctggactgccataacaatgttaaaatgtacatgaatgccttgacatatttaacaagtgaagccttttctaatattccttctgatttggtattggatttgcaaaggatgctatcgatggatgcactatcacgtcctagtgctatggcctttacaggttcttctttcttccgggatgatacgaggttgcgcgctcttcgtttccttgaccatttgcttgtatgtatttattattcccctggataagttaaaaggttgcaatctcttgtttttgtatcagtctttcttctttgctgtctgagaatcacctttgactagaattgttttcagttgtacctgtcaactcagcagcaagagtcttgcctgtttgactagacaatgaaacgacacaatttagtacctgacaatggccctaaattttaaggcaccattcctttcaggagagagataatatgcagaagacagagtttttgaaggcattatcagatatgtggaaggattttgattcccgagttcttcgatataaagtgcttcctcctctttgtgctgagttacgcaacatggttatgcagccaatgattttgcctatggttctaactatagcagaatctcaggataaaggggattttgaactcgcaacactgcctgcgcttgttccagtgtttgcttcagcgtcaggtgaaactctacttttgcttgtgaagcatgcagatctcatcattaacaaggccactcaggaacatttgatatcacatgttcttccaatgctggtccgggcttatgatgacaatgatccccggttacaggaagaagttctgcgtcgaacagtaccactgtctcgtcaacttgacaccaagctagtcaataaagctgtgcttcctcgtgtacatggattagctctaaagacaacagttgctgcggtgcgtgtgaatgcgttgcgctgtttaggagatcttgtgccatccttggacaaagaaggaataatgggtatcttggagactgttcggcgttgcacagctgttgaccatactgcgccaactcttatgtgcacacttggtgttgctaatgcaatctataaacaacacatcaactgaatgtacaacaatttgccaagtatatgctatttgtcaaggacattacaagcaagattgaagagaagcgtggtgtgactgttacagataatgggaacacagaggtaaaatcatcaccttcattggcaaacgggatccattctgaacctatgtcaggacaaataccagttgcaaagagcagccctgcatgggatgaagactggggtcctactaagaaatccggtgttccatctctttcagttgattctagtgcacaaacaaagcaaccctcagtagacccttttgacttcggtactcaaacaaagcaatccacaacactcccctttgatttgagcacccaggcaaagcagccaccatcagtttctcatgttacagcagctacaatcccacctgcgcaaccacaaccatcactacaatctcttgcggctagttcaggacctaaaatttctggctcatgtgtccctgtcgacattgagtggcctcctcgaagaagctcgtcatccaacttcaatgcacccttgtctattagcaaggataatggttctggaaggctgtctagcgatggagttgatgatattgatccttttgctgattggcccccaatacctagcaatgttaatagcatttcagcaaccgagcattggccaagcataaatcaaaatatttcgggatttagctcaggcaacatagtttttggtggcagcgggaattctgtagggcaaacgaaaagcaaccaaatgagctggtcaaacacgtctaatctaatgggcacaaactcaactggcagctatttgaatcagggcagtgcagctctaggtttcggaaatccaaatggaggattgagcacaggtctctccaatccaagtagttccagtacaggcctgagcatgatgctaccaaaatctgattctggatcattgtcgacgtcggtcaacaatgccgcacatgggctactaagacttgcccctcctccatccacatcggttggaagagggcgcggtagaaatcaaggacagtccgcactctcccgagcatcaaggcctcatgccaactcggcatcaggacaacaacctatcctggatttactctagtaagagatggtcgcctctgttcttcgcgttcggattgtcaatgtgtacatcctcaaacctttgtaagggtttaccttttctcatgctcccgtgcttagggttttgaattgggcatcgaggccatcttcatactggtgacagaagaaatgttttgtgtatatttctgtccaaactcggctgtagctttcagagtttgtgaatagttgacatgtttatatgggctgtgaagttttgaaatgtttaatgggccttacaggactgggggttcaactgcagtggtgctgtgagccgtgcatgcgatggacaactctcctatcgagcattttcatcaattcgctacacggccctacatccctgtgcctgtgtgtgtaccactagcttgcattgcattgcatgcagagtgtactattgatgggtgatgcattggatggggcatgcacagcaggaatatttgcagttgatgagcggcaggaatcagtggctcagggaaaattgaatggcgatctggccttcactccacatgagtacgtacctatacgtacgcatgtatcatcagacggagtcaggaggatgcgggtagtgtccctgtgttgtctaccattttgtctcaccaatgtggtcccaaagtacatgatgtttttttacttttacacactttaaaccgaccgtaatatttaattcttctgtaaatacttattttattttatcattaaatatattttttaatta

SEQ ID NO: 203912 - DNA, 3263 bp, Zea Mays
ctcgtgcgcctgcgccacccgggcgtgctgcacgtcgtgcaggcgctcgacgagaccaaggccgccatggccatggccactgagcccgtcttcgcctccgtagctaacgcgctcgggtgccttgacaatgttggcaaggtgcccaaggaggtcaagggcatggaaatggggctacttgagattaaacatgggctgctacaagttgcagagacgttggattttcttcataacaatgctcatcttgcccatcgagctatatcgcctgagacggtatttataacttctaacgggtcttggaagcttggtgggtttggttttgctctttcggttgatcaagcagcagttggtttgagtttgacttcatcacaactatttcattattcggactatgatgtcgaggatacagctttacctcttcaaccatcgttgaactatactgcaccagaattggtccaaagtagagattctaaagttggctctgcttgtgatatgtttagctttggatgtttggcttacaatctggttgctcgtagaccacttctggactgccataacaatgttaaaatgtacatgaatgccttgacatatttaacaagtgaagccttttctaatattccttctgatttggtattggatttgcaaaggatgctatcgatggatgcactatcacgtcctagtgctatggcctttacaggttcttctttcttccgggatgatacgaggttgcgcgctcttcgtttccttgaccatttgcttgtatgtatttattattcccctggataagttaaaaggagagagataatatgcagaagacagagtttttgaaggcattatcagatatgtggaaggattttgattcccgagttcttcgatataaagtgcttcctcctctttgtgctgagttacgcaacatggttatgcagccaatgattttgcctatggttctaactatagcagaatctcaggataaaggggattttgaactcgcaacactgcctgcgcttgttccagtgtttgcttcagcgtcaggtgaaactctacttttgcttgtgaagcatgcagatctcatcattaacaaggccactcaggaacatttgatatcacatgttcttccaatgctggtccgggcttatgatgacaatgatccccggttacaggaagaagttctgcgtcgaacagtaccactgtctcgtcaacttgacaccaagctagtcaataaagctgtgcttcctcgtgtacatggattagctctaaagacaacagttgctgcggtgcgtgtgaatgcgttgcgctgtttaggagatcttgtgccatccttggacaaagaaggaataatgggtatcttggagactgttcggcgttgcacagctgttgaccatactgcgccaactcttatgtgcacacttggtgttgctaatgcaatctataaacaacacatcaactgaatgtacaacaatttgccaagtatatgctatttgtcaaggacattacaagcaagattgaagagaagcgtggtgtgactgttacagataatgggaacacagaggtaaaatcatcaccttcattggcaaacgggatccattctgaacctatgtcaggacaaataccagttgcaaagagcagccctgcatgggatgaagactggggtcctactaagaaatccggtgttccatctctttcagttgattctagtgcacaaacaaagcaaccctcagtagacccttttgacttcggtactcaaacaaagcaatccacaacactcccctttgatttgagcacccaggcaaagcagccaccatcagtttctcatgttacagcagctacaatcccacctgcgcaaccacaaccatcactacaatctcttgcggctagttcaggacctaaaatttctggctcatgtgtccctgtcgacattgagtggcctcctcgaagaagctcgtcatccaacttcaatgcacccttgtctattagcaaggataatggttctggaaggctgtctagcgatggagttgatgatattgatccttttgctgattggcccccaatacctagcaatgttaatagcatttcagcaaccgagcattggccaagcataaatcaaaatatttcgggatttagctcaggcaacatagtttttggtggcagcgggaattctgtagggcaaacgaaaagcaaccaaatgagctggtcaaacacgtctaatctaatgggcacaaactcaactggcagctatttgaatcagggcagtgcagctctaggtttcggaaatccaaatggaggattgagcacaggtctctccaatccaagtagttccagtacaggcctgagcatgatgctaccaaaatctgattctggatcattgtcgacgtcggtcaacaatgccgcacatgggctactaagacttgcccctcctccatccacatcggttggaagagggcgcggtagaaatcaaggacagtccgcactctcccgagcatcaaggcctcatgccaactcggcatcaggacaacaacctatcctggatttactctagtaagagatggtcgcctctgttcttcgcgttcggattgtcaatgtgtacatcctcaaacctttgtaagaggtttaccttttctcatgctcccgtgcttagggttttgaattgggcatcgaggccatcttcatactggtgacagaagaaatgttttgtgtatatttctgtccaaactcggctgtagctttcagagtttgtgaatagttgacatgtttatatgggctgtgaagttttgaaatgtttaatgggccttacaggactgggggttcaactgcagtggtgctgtgagccgtgcatgcgatggacaactctcctatcgagcattttcatcaattcgctacacggccctacatccctgtgcctgtgtgtgtaccactagcttgcattgcattgcatgcagagtgtactattgatgggtgatgcattggatggggcatgcacagcaggaatatttgcagttgatgagcggcaggaatcagtggctcagggaaaattgaatggcgatctggccttcactccacatgagtacgtacctatacgtacgcatgtatcatcagacggagtcaggaggatgcgggtagtgtccctgtgttgtctaccattttgtctcaccaatgtggtcccaaagtacatgatgtttttttacttttacacactttaaaccgaccgtaatatttaattcttctgtaaatacttattttattttatcattaaatatattttttaatta

SEQ ID NO: 203913 - DNA, 3373 bp, Zea Mays
ctcgtgcgcctgcgccacccgggcgtgctgcacgtcgtgcaggcgctcgacgagaccaaggccgccatggccatggccactgagcccgtcttcgcctccgtagctaacgcgctcgggtgccttgacaatgttggcaaggtgcccaaggaggtcaagggcatggaaatggggctacttgagattaaacatgggctgctacaagttgcagagacgttggattttcttcataacaatgctcatcttgcccatcgagctatatcgcctgagacggtatttataacttctaacgggtcttggaagcttggtgggtttggttttgctctttcggttgatcaagcagcagttggtttgagtttgacttcatcacaactatttcattattcggactatgatgtcgaggatacagctttacctcttcaaccatcgttgaactatactgcaccagaattggtccaaagtagagattctaaagttggctctgcttgtgatatgtttagctttggatgtttggcttacaatctggttgctcgtagaccacttctggactgccataacaatgttaaaatgtacatgaatgccttgacatatttaacaagtgaagccttttctaatattccttctgatttggtattggatttgcaaaggatgctatcgatggatgcactatcacgtcctagtgctatggcctttacaggttcttctttcttccgggatgatacgaggttgcgcgctcttcgtttccttgaccatttgcttgtatgtatttattattcccctggataagttaaaagttgtacctgtcaactcagcagcaagagtcttgcctgtttgactagacaatgaaacgacacaatttagtacctgacaatggccctaaattttaaggcaccattcctttcaggagagagataatatgcagaagacagagtttttgaaggcattatcagatatgtggaaggattttgattcccgagttcttcgatataaagtgcttcctcctctttgtgctgagttacgcaacatggttatgcagccaatgattttgcctatggttctaactatagcagaatctcaggataaaggggattttgaactcgcaacactgcctgcgcttgttccagtgtttgcttcagcgtcaggtgaaactctacttttgcttgtgaagcatgcagatctcatcattaacaaggccactcaggaacatttgatatcacatgttcttccaatgctggtccgggcttatgatgacaatgatccccggttacaggaagaagttctgcgtcgaacagtaccactgtctcgtcaacttgacaccaagctagtcaataaagctgtgcttcctcgtgtacatggattagctctaaagacaacagttgctgcggtgcgtgtgaatgcgttgcgctgtttaggagatcttgtgccatccttggacaaagaaggaataatgggtatcttggagactgttcggcgttgcacagctgttgaccatactgcgccaactcttatgtgcacacttggtgttgctaatgcaatctataaacaacacatcaactgaatgtacaacaatttgccaagtatatgctatttgtcaaggacattacaagcaagattgaagagaagcgtggtgtgactgttacagataatgggaacacagaggtaaaatcatcaccttcattggcaaacgggatccattctgaacctatgtcaggacaaataccagttgcaaagagcagccctgcatgggatgaagactggggtcctactaagaaatccggtgttccatctctttcagttgattctagtgcacaaacaaagcaaccctcagtagacccttttgacttcggtactcaaacaaagcaatccacaacactcccctttgatttgagcacccaggcaaagcagccaccatcagtttctcatgttacagcagctacaatcccacctgcgcaaccacaaccatcactacaatctcttgcggctagttcaggacctaaaatttctggctcatgtgtccctgtcgacattgagtggcctcctcgaagaagctcgtcatccaacttcaatgcacccttgtctattagcaaggataatggttctggaaggctgtctagcgatggagttgatgatattgatccttttgctgattggcccccaatacctagcaatgttaatagcatttcagcaaccgagcattggccaagcataaatcaaaatatttcgggatttagctcaggcaacatagtttttggtggcagcgggaattctgtagggcaaacgaaaagcaaccaaatgagctggtcaaacacgtctaatctaatgggcacaaactcaactggcagctatttgaatcagggcagtgcagctctaggtttcggaaatccaaatggaggattgagcacaggtctctccaatccaagtagttccagtacaggcctgagcatgatgctaccaaaatctgattctggatcattgtcgacgtcggtcaacaatgccgcacatgggctactaagacttgcccctcctccatccacatcggttggaagagggcgcggtagaaatcaaggacagtccgcactctcccgagcatcaaggcctcatgccaactcggcatcaggacaacaacctatcctggatttactctagtaagagatggtcgcctctgttcttcgcgttcggattgtcaatgtgtacatcctcaaacctttgtaagaggtttaccttttctcatgctcccgtgcttagggttttgaattgggcatcgaggccatcttcatactggtgacagaagaaatgttttgtgtatatttctgtccaaactcggctgtagctttcagagtttgtgaatagttgacatgtttatatgggctgtgaagttttgaaatgtttaatgggccttacaggactgggggttcaactgcagtggtgctgtgagccgtgcatgcgatggacaactctcctatcgagcattttcatcaattcgctacacggccctacatccctgtgcctgtgtgtgtaccactagcttgcattgcattgcatgcagagtgtactattgatgggtgatgcattggatggggcatgcacagcaggaatatttgcagttgatgagcggcaggaatcagtggctcagggaaaattgaatggcgatctggccttcactccacatgagtacgtacctatacgtacgcatgtatcatcagacggagtcaggaggatgcgggtagtgtccctgtgttgtctaccattttgtctcaccaatgtggtcccaaagtacatgatgtttttttacttttacacactttaaaccgaccgtaatatttaattcttctgtaaatacttattttattttatcattaaatatattttttaatta

SEQ ID NO: 203914 - DNA, 1694 bp, Zea Mays
gtgttgagtttgctgcggaatatgtgattcctctcatcttcccattgctcacagcacatcaactgaatgtacaacaatttgccaagtatatgctatttgtcaaggacattacaagcaagattgaagagaagcgtggtgtgactgttacagataatgggaacacagaggtaaaatcatcaccttcattggcaaacgggatccattctgaacctatgtcaggacaaataccagttgcaaagagcagccctgcatgggatgaagactggggtcctactaagaaatccggtgttccatctctttcagttgattctagtgcacaaacaaagcaaccctcagtagacccttttgacttcggtactcaaacaaagcaatccacaacactcccctttgatttgagcacccaggcaaagcagccaccatcagtttctcatgttacagcagctacaatcccacctgcgcaaccacaaccatcactacaatctcttgcggctagttcaggacctaaaatttctggctcatgtgtccctgtcgacattgagtggcctcctcgaagaagctcgtcatccaacttcaatgcacccttgtctattagcaaggataatggttctggaaggctgtctagcgatggagttgatgatattgatccttttgctgattggcccccaatacctagcaatgttaatagcatttcagcaaccgagcattggccaagcataaatcaaaatatttcgggatttagctcaggcaacatagtttttggtggcagcgggaattctgtagggcaaacgaaaagcaaccaaatgagctggtcaaacacgtctaatctaatgggcacaaactcaactggcagctatttgaatcagggcagtgcagctctaggtttcggaaatccaaatggaggattgagcacaggtctctccaatccaagtagttccagtacaggcctgagcatgatgctaccaaaatctgattctggatcattgtcgacgtcggtcaacaatgccgcacatgggctactaagacttgcccctcctccatccacatcggttggaagagggcgcggtagaaatcaaggacagtccgcactctcccgagcatcaaggcctcatgccaactcggcatcaggacaacaacctatcctggatttactctagtaagagatggtcgcctctgttcttcgcgttcggattgtcaatgtgtacatcctcaaacctttgtaaggactgggggttcaactgcagtggtgctgtgagccgtgcatgcgatggacaactctcctatcgagcattttcatcaattcgctacacggccctacatccctgtgcctgtgtgtgtaccactagcttgcattgcattgcatgcagagtgtactattgatgggtgatgcattggatggggcatgcacagcaggaatatttgcagttgatgagcggcaggaatcagtggctcagggaaaattgaatggcgatctggccttcactccacatgagtacgtacctatacgtacgcatgtatcatcagacggagtcaggaggatgcgggtagtgtccctgtgttgtctaccattttgtctcaccaatgtggtcccaaagtacatgatgtttttttacttttacacactttaaaccgaccgtaatatttaattcttctgtaaatacttattttattttatcattaaatatattttttaatta

SEQ ID NO: 203915 - DNA, 1605 bp, Zea Mays
cacatcaactgaatgtacaacaatttgccaagtatatgctatttgtcaaggacattacaagataatgggaacacagaggtaaaatcatcaccttcattggcaaacgggatccattctgaacctatgtcaggacaaataccagttgcaaagagcagccctgcatgggatgaagactggggtcctactaagaaatccggtgttccatctctttcagttgattctagtgcacaaacaaagcaaccctcagtagacccttttgacttcggtactcaaacaaagcaatccacaacactcccctttgatttgagcacccaggcaaagcagccaccatcagtttctcatgttacagcagctacaatcccacctgcgcaaccacaaccatcactacaatctcttgcggctagttcaggacctaaaatttctggctcatgtgtccctgtcgacattgagtggcctcctcgaagaagctcgtcatccaacttcaatgcacccttgtctattagcaaggataatggttctggaaggctgtctagcgatggagttgatgatattgatccttttgctgattggcccccaatacctagcaatgttaatagcatttcagcaaccgagcattggccaagcataaatcaaaatatttcgggatttagctcaggcaacatagtttttggtggcagcgggaattctgtagggcaaacgaaaagcaaccaaatgagctggtcaaacacgtctaatctaatgggcacaaactcaactggcagctatttgaatcagggcagtgcagctctaggtttcggaaatccaaatggaggattgagcacaggtctctccaatccaagtagttccagtacaggcctgagcatgatgctaccaaaatctgattctggatcattgtcgacgtcggtcaacaatgccgcacatgggctactaagacttgcccctcctccatccacatcggttggaagagggcgcggtagaaatcaaggacagtccgcactctcccgagcatcaaggcctcatgccaactcggcatcaggacaacaacctatcctggatttactctagtaagagatggtcgcctctgttcttcgcgttcggattgtcaatgtgtacatcctcaaacctttgtaaggactgggggttcaactgcagtggtgctgtgagccgtgcatgcgatggacaactctcctatcgagcattttcatcaattcgctacacggccctacatccctgtgcctgtgtgtgtaccactagcttgcattgcattgcatgcagagtgtactattgatgggtgatgcattggatggggcatgcacagcaggaatatttgcagttgatgagcggcaggaatcagtggctcagggaaaattgaatggcgatctggccttcactccacatgagtacgtacctatacgtacgcatgtatcatcagacggagtcaggaggatgcgggtagtgtccctgtgttgtctaccattttgtctcaccaatgtggtcccaaagtacatgatgtttttttacttttacacactttaaaccgaccgtaatatttaattcttctgtaaatacttattttattttatcattaaatatattttttaatta

SEQ ID NO: 203916 - DNA, 1492 bp, Zea Mays
atcggtgatcggtctcctatgttcacacctgtttgctctcttttcttcccccgttcacctcgcgtgcgccacccacctagggtgaccgccgccgcccttcgcccagccgcccgggttgcgctttgccggcgacgagcgcccaccgcacccccaccatattggtcactggaggattgctgccgttggtaaggatgagcaaaggcccagttccgtttgccaacatcgggaagagagcaaaagatcttctgtacaaggactacaactttgaccaaaagttttctttgtcgacgtctagcggctctggtttgaatctcacagccactggtgtaaagatcaacgaagacttcattggtgatatacggacacaacataaaagcagtagaactactattgatgtcaccgttgatagtgattctaaagctaaggtttgcggacctaaagaacacgtggattttggaatgtgtcaaccacagtcactgttgatgaagcactaactggtttgaagacttcattcgccttcaaggttcccgatcacaagtctgggaagcttgatctgcaatatgcgcacaatcgtttttcattgaactcgaccattggtttgacatcagcacctttggttgaactggctgcaactgtcggcacaagtgaacttagcattggtgctgaggttgggtttgacagtacttcagctgctgttactaagtacaactcaggaattggatacaacaagtccgatttctcagcttccttactactggctgataaaggggagactttgaaggcatcttacgttcatttgttcaatccgaccaatggagctacagttgcagccgaggtaacacacaagctgaagaccagagagaactatttcacagttgggagctcccatgcccttgatccttcaacattgctaaagatgagattcagcaactccgggaaggtcggtcttctctgtcagcatgagtggaggccgaaatctcttgttactctttcagctgagtatgatctgaaggtggtaagtgcgccttcaagaatcggcatggccatatccctcaagccttgagctgggttaagtcaccttctataaaacagtacaagcataccgtctcccaagaacacaagctttggagcgatacctagaacaaccctccattttagccttttttattttgtaagagtcttttgcaaaggagtattgtcacttgtcagggagttagacttgttttgtggaacgtttccattagagccaactccacacgaaggattgaaaatacagaggtttgcattagaacagaagctccactgcgatattttcccatgttttgctagtcgacgcaaaaaatgattttttggaggtgatttgaacacctaacatcttgagtcgatggtggttttaacagctctggaaatcaacaagggccatttgtacccagcaacagcagaattagttctggaaattggttattttgatgagttttgtttgtgagttggg

SEQ ID NO: 203917 - DNA, 1554 bp, Zea Mays
gccgcccccaccgcggccgcccaagctcgcacccgctgcggctacccctagccccggccccgcccgccgcggccgcccccgcccctggccccgccaggggatccacgccgaggacgactacccgtacctcatggaagaaggctgttgcaaagagaaacaagttcgcacacaaaaatcttcacatgtgaactggatgatactaggatgcagggttctaatcctttgctctggcgtgcgtgtttagccccaagttgatgtcgtcactataactgggtacgaggatgtcctagagaacagcgagatcagcctgctgaaagcgttggcccatcagcctgtcagcatcggcataactgcagggagtagggacttccagttctacagagggggggtgtttgacggggcctgcagcgtcgagctccaccatgagctgacggccgtcgggtacggctcgtcgtatggccagaactacatcaccatgaagaactcgtggggcaagaactggggggagcaaggctacgtcaggataaagatgggcaccgggaagccagagggtgtctgcggaatctataccatggcctcctatcccttgaaaaatgcaacacgctggggtgttaatcaagtattgctaacgaaggattcactatgtttggtagtgaagggcgatgtccggagagtaagaacgaggcgacacagtatggactcgatatgaccgagcaacaatatcttgagcattcgattccatggatagctgccaatgatgctgcttggcgtgcgttttgtcgttactgggcttcggctgaattcaaggcaaagtctgtgcgacacagttctaatcatggaaccgagtcatatcacaagtatggaggtgatgatcactttcgtttggcaaaacgaatggaagctagcactggtgcagtgcctagtgatgttcaaatataccttagggggcacagaggaccagatcctgcaaatctagatgtgttgtacagccaaaagcaacagattgtgtggtacacaatgtttgctaacgtcatcgactcgagccaggtgagggttcagcgtggaggttcgtcgtggtctgctgctcgtagctcccgtctctccactcaagatccagcagaagtggaacaactgcgagaagaacttaggcgacatcaggatttcttgaagcaacaagctgcgcaacatgaatattatgctacacagattcaacaacagcaaaacactcatacaacaactagcacaggctcaagggatacacgtcctggtgcccccccaccaccacctcatgttcattatccttggtcttcacctccacctacacctacatctccatctaccgaacatcaggtgctcgttagatttggcggccgtggccctgaccacgaccaggctaaggcggcggcgaggagcggctgtcgccgtgatggggacgctcatcaacgggttcgtgctgaggaatgccattcttcttggcttgatggatgtctatggattgtggttcttgtgctgctggcttgctgccttcggatggaggggaaactgttggtataa

SEQ ID NO: 203918 - DNA, 1728 bp, Zea Mays
ccgcggccgcccaagctcgcacccgctgcggctacccctagccccggccccgcccgccgcggccgcccccgcccctggccccgccaggggatccacgccgaggacgactacccgtacctcatggaagaaggctgttgcaaagagaaacaagttcgcacacaaaaatcttcacatgtgaactggatgatactaggatgcagggttctaatcctttgctctggcgtgcgtgtttagccccaagttgatgtcgtcactataactgggtacgaggatgtcctagagaacagcgagatcagcctgctgaaagcgttggcccatcagcctgtcagcatcggcataactgcagggagtagggacttccagttctacagagggggggtgtttgacggggcctgcagcgtcgagctccaccatgagctgacggccgtcgggtacggctcgtcgtatggccagaactacatcaccatgaagaactcgtggggcaagaactggggggagcaaggctacgtcaggataaagatgggcaccgggaagccagagggtgtctgcggaatctataccatggcctcctatcccttgaaaaatgcaacacgctggggtacctaatttttttgtaatgagtttgttcgaaagtattatttttaatataatccacatggcaagatgcctttttaccattgctgtcaagatcccatacttgatttcccaaaatccatgttacactcaccactccagcacgataggaacaactatatattgtgatctatctacacgactgtcttggaaggcggtatataattgcgcggccaagtggtaaccaaagtatgtgaagggcgatgtccggagagtaagaacgaggcgacacagtatggactcgatatgaccgagcaacaatatcttgagcattcgattccatggatagctgccaatgatgctgcttggcgtgcgttttgtcgttactgggcttcggctgaattcaaggcaaagtctgtgcgacacagttctaatcatggaaccgagtcatatcacaagtatggaggtgatgatcactttcgtttggcaaaacgaatggaagctagcactggtgcagtgcctagtgatgttcaaatataccttagggggcacagaggaccagatcctgcaaatctagatgtgttgtacagccaaaagcaacagattgtgtggtacacaatgtttgctaacgtcatcgactcgagccaggtgagggttcagcgtggaggttcgtcgtggtctgctgctcgtagctcccgtctctccactcaagatccagcagaagtggaacaactgcgagaagaacttaggcgacatcaggatttcttgaagcaacaagctgcgcaacatgaatattatgctacacagattcaacaacagcaaaacactcatacaacaactagcacaggctcaagggatacacgtcctggtgcccccccaccaccacctcatgttcattatccttggtcttcacctccacctacacctacatctccatctaccgaacatcaggtgctcgttagatttggcggccgtggccctgaccacgaccaggctaaggcggcggcgaggagcggctgtcgccgtgatggggacgctcatcaacgggttcgtgctgaggaatgccattcttcttggcttgatggatgtctatggattgtggttcttgtgctgctggcttgctgccttcggatggaggggaaactgttggtataa

SEQ ID NO: 203919 - DNA, 1998 bp, Zea Mays
ccgcggccgcccaagctcgcacccgctgcggctacccctagccccggccccgcccgccgcggccgcccccgcccctggccccgccaggggatccacgccgaggacgactacccgtacctcatggaagaaggctgttgcaaagagaaacaagttcgcacacaaaaatcttcacatgtgaactggatgatactaggatgcagggttctaatcctttgctctggcgtgcgtgtttagccccaagttgatgtcgtcactataactgggtacgaggatgtcctagagaacagcgagatcagcctgctgaaagcgttggcccatcagcctgtcagcatcggcataactgcagggagtagggacttccagttctacagagggggggtgtttgacggggcctgcagcgtcgagctccaccatgagctgacggccgtcgggtacggctcgtcgtatggccagaactacatcaccatgaagaactcgtggggcaagaactggggggagcaaggctacgtcaggataaagatgggcaccgggaagccagagggtgtctgcggaatctataccatggcctcctatcccttgaaaaatgcaacacgctggggtacctaatttttttgtaatgagtttgttcgaaagtattatttttaatataatccacatggcaagatgcctttttaccattgctgtcaagatcccatacttgatttcccaaaatccatgttacactcaccactccagcacgataggaacaactatatattgtgatctatctacacgactgtcttggaaggcggtatataattgcgcggccaagtggtaaccaaatgaagggcgatgtccggagagtaagaacgaggcgacacagtatggactcgatatgaccgagcaacaatatcttgagcattcgattccatggatagctgccaatgatgctgcttggcgtgcgttttgtcgttactgggcttcggctgaattcaaggcaaagtctgtgcgacacagttctaatcatggaaccgagtcatatcacaagtatggaggtgatgatcactttcgtttggcaaaacgaatggaagctagcactggtgcagtgcctagtgatgttcaaatataccttagggggcacagaggaccagatcctgcaaatctagatgtgttgtacagccaaaagcaacagattgtgtggtgagtgttttgaaatgtttggtaggttctgtttatatagatttttgtatgtaagattgcattgttcttttgtatgaggctgcatatggtgaggcgatgtctagtcagcatggaccaaactatgattggaggacctcacatattgatcctcaggttgtgtatgcaagtggtggaaaagctcatggaaggtgcagactctacatatcttatattgtttcattggttgagtgcaatacatatattcttaatctgtcgtgatgttacttgttttgtaggtacacaatgtttgctaacgtcatcgactcgagccaggtgagggttcagcgtggaggttcgtcgtggtctgctgctcgtagctcccgtctctccactcaagatccagcagaagtggaacaactgcgagaagaacttaggcgacatcaggatttcttgaagcaacaagctgcgcaacatgaatattatgctacacagattcaacaacagcaaaacactcatacaacaactagcacaggctcaagggatacacgtcctggtgcccccccaccaccacctcatgttcattatccttggtcttcacctccacctacacctacatctccatctaccgaacatcaggtgctcgttagatttggcggccgtggccctgaccacgaccaggctaaggcggcggcgaggagcggctgtcgccgtgatggggacgctcatcaacgggttcgtgctgaggaatgccattcttcttggcttgatggatgtctatggattgtggttcttgtgctgctggcttgctgccttcggatggaggggaaactgttggtataa

SEQ ID NO: 203920 - DNA, 964 bp, Zea Mays
ggggcctgcagcgtcgagctccaccatgagctgacggccgtcgggtacggctcgtcgtatggccagaactacatcaccatgaagaactcgtggggcaagaactggggggagcaaggctacgtcaggataaagatgggcaccgggaagccagagggtgtctgcggaatctataccatggcctcctatcccttgaaaaatgcaacacgctgggggcgatgtccggagagtaagaacgaggcgacacagtatggactcgatatgaccgagcaacaatatcttgagcattcgattccatggatagctgccaatgatgctgcttggcgtgcgttttgtcgttactgggcttcggctgaattcaaggcaaagtctgtgcgacacagttctaatcatggaaccgagtcatatcacaagtatggaggtgatgatcactttcgtttggcaaaacgaatggaagctagcactggtgcagtgcctagtgatgttcaaatataccttagggggcacagaggaccagatcctgcaaatctagatgtgttgtacagccaaaagcaacagattgtgtggtacacaatgtttgctaacgtcatcgactcgagccaggtgagggttcagcgtggaggttcgtcgtggtctgctgctcgtagctcccgtctctccactcaagatccagcagaagtggaacaactgcgagaagaacttaggcgacatcaggatttcttgaagcaacaagctgcgcaacatgaatattatgctacacagattcaacaacagcaaaacactcatacaacaactagcacaggctcaagggatacacgtcctggtgcccccccaccaccacctcatgttcattatccttggtcttcacctccacctacacctacatctccatctaccgaacatcagacccctccagccatcttgccgacgcatgaacgagaagacgggttagactttgttaaaaccc

SEQ ID NO: 203921 - DNA, 817 bp, Zea Mays
ctttaactaaaaagtgtctctcacaattcagagccaagactctaggtcatgtgaaccattcaatcttctggaagaacctcaagcccattagcgaaggtggcggggagccgcctcatgggaaacttggctgggccatcgatgaggattttggttcgtttgaggcacttgtaaagaagatgaatgcagaaggcgctgctttacaagggtctggatgggtgtggttagctttggataaagaggcaaaaaagctttcagttgaaacaacagctaatcaggatcctctggtgactaaaggtgcaagcttggttccgctgttggggattgatgtctgggaacatgcatactacctgcagtacaagaatgttaggccggattacctgaacaacatctggaaggtgatgaactggaaatatgctggagaggtgtacgaaaatgttcttgcttgaattgtcttaacggacaatacacatctgcgcgcgcgggtttcggctgtttgatcatgtgaaataaagatggacctgtctagcggctggaccttgtgtacatttcactgagatagactaatgcacggcctgccgattttgttcgtcctgcttgcgtgctactctgtctctgctcctagtttttggcatcatgtttatgttgagcaaggtgatgcccaagggaagccattcccactcttgtctccattaataaaatcagctgagcttccgatgtttgcttgaatttgttgccatgcgtttccagtttttggccattccacttgttggagcaaaatcttgcaaatcatcttcagaggcatcatgtttttgctgag

SEQ ID NO: 203922 - DNA, 564 bp, Zea Mays
cttgcccctaggtgccccataggatcctctggtgactaaaggtgcaagcttggttccgctgttggggattgatgtctgggaacatgcatactacctgcagtacaagaatgttaggccggattacctgaacaacatctggaaggtgatgaactggaaatatgctggagaggtgtacgaaaatgttcttgcttgaattgtcttaacggacaatacacatctgcgcgcgcgggtttcggctgtttgatcatgtgaaataaagatggacctgtctagcggctggaccttgtgtacatttcactgagatagactaatgcacggcctgccgattttgttcgtcctgcttgcgtgctactctgtctctgctcctagtttttggcatcatgtttatgttgagcaaggtgatgcccaagggaagccattcccactcttgtctccattaataaaatcagctgagcttccgatgtttgcttgaatttgttgccatgcgtttccagtttttggccattccacttgttggagcaaaatcttgcaaatcatcttcagaggcatcatgtttttgctgag

SEQ ID NO: 203923 - DNA, 1289 bp, Zea Mays
agcacgggtcacctcgccgggatcccacctcgccagtgccgcctcgccgctctcccacatcgtgtcctccgccccttcgcacggacgcacacgcacctcacctctcacaattccacacctcacctctccgcttcgcttcttgtcgctgcggcgcgcggccatggtctccctccgcttccctaccgctgccatcccccgcctcccgccatcccaggcccccaacggcgtcgccatcgctgccacggtcgccgctgcagccgcggccgcagctgcagtagcggccagcttgaccctcacgggcaagtccactggccggccagtcccgcaccctgcccctctctgggcctccctctccctggccgacgcggcggcccccagctccgtcgaaccccggaccggcgcgacattccccaccgaggccgccgttgggcgccgcctactcggcataggcctccggaagaccagcgtcctcgggctcaagtccatcgacgtctacgcattcggcgtgtatgcggatgacaacgatttgaaacagcagctgaaggagaagtactcgaagttctcggtctcggaactgaagggaaacgcgcatttgagaagagtgtgggaagtaggcttcagaagttcggtggacaagacaccaaagagttgcttcagagctttgttgcggttttcaaggatgaatacaaattaccaaaggggtctgtgattgagctttcgagagaatctaaccatgtccttaaaatttgcattgaaggcgaggaagtggggagcattcagagcaagctcttgtgcaagtctctcttagatctctatatcggagatgacccctttgacgaaaatgcgaaagacgacatccatgaaaatatagctagcattcttaaaagttaaatgggatgcttaaggaaggttacatggaactgggagatttttcagggaagatatttttaattccagcaatacctcgactgtgcctagtaagtagcgcacaagtttttttcagtagcgcgtgaggaaaaggatagatccttccaagtacagccttttccaagtcgtgtgtgatgttgttccacgtcctccgtgaaagcggcaaactcctggccctcatatctcgttggttctgtcagcgtaagaaagaccagcaagctgttgcaatcgtccttcaggaactgtttctcatacggcaaactcaagacctgtcggtctcattgcagcccggagttggcaggcatgcacacaatggatgagagcgtgcatcactgtctccctctctttcccacaaatctcac

SEQ ID NO: 203924 - DNA, 1496 bp, Zea Mays
acggctcaccgctcagcgctcacacagtcacactcacacggccacgtccggactccagaggcctcgtcttcagtcttcaccctcttttcaacggttccggtgagccccgaaaacctaggtcgacacggccagcgctggtgtgacgaagcgggcgaggccgtctggctgactattggcggaaccgcggaagaagcgcgcgtgaatctcctggatttacagactcgagggggagctgagaaaagatggagtgtttgttggaggatggccttcttcggttgaacacctgccaccagggctcctcaaccatcacaaattgagtctgccgtgcgatgggctgtgagacagcggtcacagaacaaacctgtctatgtccactgtgcctatggtaattttgctcttctgcctatgtttggataaggaactgtgttgtctttcatatatgtctttcttgcaaatagatatatttatgttcttaaatgtatttctgtggattagccatatttagataactgttgagatcatgatgatccacaatggaatttcatgtattggcgaaccatatattgtgtagcaactggagtcaggagacaacagtaagctgatatgttatttttttcatttctggtgtcatcttatttcatgcgactatttgccatgtcttatttagttgttcttatctgcaacaagatcataagaagtaaaaatgccatgtataagctgaacagcatttgcattacattcagacagtataagggtcatcatatatgttgtgtagatagtcttataatagtatcagactttaaagagattttttagccaaatttaagcttaaacattgaaagaaaattaagctctggatatgtgctttggctggacttttaggtttggctcttagcttaaacttccctgttactaattttaaaataaaacctctttattaagtcttgttcttaccacttcctcacttacctaatatgccatcaaattgaacttaagtccaataatattgatcgcttggatttctttatgtgatggcgtgttatatctctaacaggtcatggcagaagtgtctgtgtgatgtgtgcgcttcttgtcgcattaggattggctgaagattggaaagctgctgagcaaatgatccatgagaagcgaccttctattagcatgaacactcttcaccgcaaaagcttggaggaatggtcaaaacatttgctcccctctaaaagaagtggggaagcagatgtgagttctgttatccattcggattataaccggaaataaaattagaccagcaagagacaggcgtgttcagatatttaagatgcattgtacatttggttgtattgtttgctcctgtcctagtgaatgcctatggttcaagttaccattttgtggtaattgtgttgtaaaaactatatgtatcgaattatattagtactgtagctttacacagttagttctttacggaagatttatgaggtgtttggtttgatgaa

SEQ ID NO: 203925 - DNA, 3268 bp, Zea Mays
aggaaccatacttgatttatgattgcgttgtggctatgcagaccggattcgtgagttattggatgtttcacgtgagctgtctggggttcgtgatagatcactggatcacagttctcctggaaattatgtcagtgaagcaaaccatatagaattttcagatgttaaggtagtcacacctgcaggtaatgttttggttgacgatttgactcttcgggtagaaactggttctaatcttttgatcactggtcccaatggtagcggaaaaagctccctttttcgggtccttgggggtctatggccactggtatctggccacattgttaaacctggtgttggttcagatctaaataaggagatcttctatgtcccgcaaagaccatacacagctgttggaacactacgtgaacagctaatctatcctcttacggcagatcaggggattgaaccacttacatatgatggaatggtggaccttctaaagaatgttgacctggaatatttgcttgaacgctatcctcttgataaggaagttaactggggtgatgagctgtccctcggtgaacagcaaagattgggaatggccaggttattctaccataagccaaagtttgccatccttgatgagtgcactagtgctgtgacaaccgacatggaagaacgtttttgcaaaaaagttcgagctatgggtacatcctgcataacaatatctcatcgaccagctttagttgcatttcatgatattgttttatccttggacggtgaaggaggttggaatgttcagcatagaagggatgattcgtccttttccaccgaagaatctgatttttcatcatcagaaactgatcgtaaatctgacgcactgactgttcaaagggcttttatgagcagggcaaagagcaatgcttcattggggtccaaggatcatccatattgtacagaggttatagcaacttcccctgaggtggaaatagaacatccagcacggacacctcgaattccacatttacgatgtcacccaagacctttgcctctcagagtagctgcaatgctaaaaatactggttcctagactatttgataaacaaggcgggcagttgcttgctgtcgctgtacttgttttctctcggacatggatctctgatcgtattgcttcgttgaatgggacaactgtgaagtttgtcttggaacaggacaaagatgcctttattcgcttgattggtgtcagtattctacaaagtggtgcaaattcttttgtggcaccatctctcaggacccttactgcgaaacttgcccttggatggcgaattcgcatgaccaatcatatgcttcgatattatttgaaaaggaatgcattctacaaggtattcaacatgtcaggtaaaagcattgatgcagaccaaagattaacacttgatgtagacaagttgaccactgaccttgctggcctagttactggaatggtaaaaccgctagttgacattctttggtttacatggagaatgaagcttttatctggacgaagaggagttgctatactgtatgcttacatgctactgggtttgggctttcttagagctatatcccctgacttcggtcatctctcaggccaagaacaagaacttgaaggaacattcaggttcatgcactcgagactgcggacacatgctgaatcaattgctttctttggtggtggttcaagagaaaaagcgatggttgaggctaaattcgtcaagttaattaaccactcaaagattcttttgaggaaacagtggctttatggtattgttgatgattttgtaacaaagcaacttccacacaatgtaacgtggggtctgagtctgttgtatgctttggagcacaagggagatagagctttaacctcaactcaaggagagttggcacatgctctgcggttcttggcttcagtggtgtcacagagcttcatagccttcggcgacattcttgagttacataagaagttccttgaactttctggtggcattaaccggatctttgagcttgaggagtttacacgcttcgctcaaagaaatactgtggtgtctcccaatgccatcagtgcagcctcaaaagaaacgatttcgtttcatgaagtggacattgtaacaccatcacagaagctattggctagaaaactctcgtgcgatgtggtacaagggaaaagccttcttctgaccggtcccaatggtagtggaaagagttctatttttagagtgctcagggatctctggcccaccttctctgggagagttaccaagccctcagaagggatgtttcacgttcctcagcgcccatataccagcctaggtactctgcgggatcagatcatataccctctctcaagggaggaagcgaagataaaagttctttcgctacatagatctggtaacaattctagtgcctccatgctgctggatgatcacctgaagacaattctagagaatgttcggctggtgtatcttctagaaagggaagggtgggattctacaccaaactgggaagatgttctgtcgttaggggaacaacagaggcttggaatggctcgtttgtttttccatcatcctaagtttggtatcctggacgagtgcaccaatgctacgagtgttgatgtcgaagagcatctgtacagacttgcaactagcatgggcataactgtgatcacttcctctcaaaggcctgctttgatacccttccatgccttggagctgaagctcattgacggcgaagggaactgggagctatgtgcgatccagcagtgagtgatggtgcccattaggagttgatgccattaaatgcaccatcagctgcatgtacaaaagcaagcagctagcacattgccattgtttgtgtatggacaacgtagacagtggcagcgttgctatgttggaagatgctatattcttgtcatagtctgcctcaggttgagcagcaaagcattgtgatgatgtatgattgtgagccatgcatggtagctgaatcctgatattagcttttagatagtggacatgattgtgagccatgcatggtagctgaatagcagagcagaagggttgtgtgttagaagctgtacctattgattcattacattatattgattctgcgtagcagatgtatattacaggcaagcaaaatataaataaatacgatgtggaattgtggatgctgctgccatgcagacatcagaaaattgaatcaggtgtggatgggaaattgtgcaagggtaagctgcattcagcgtagaggctctgccg

SEQ ID NO: 203926 - DNA, 1843 bp, Zea Mays
cagcagcggtattcaacatgtcaggtaaaagcattgatgcagaccaaagattaacacttgatgtagacaagttgaccactgaccttgctggcctagttactggaatggtaaaaccgctagttgacattctttggtttacatggagaatgaagcttttatctggacgaagaggagttgctatactgtatgcttacatgctactgggtttgggctttcttagagctatatcccctgacttcggtcatctctcaggccaagaacaagaacttgaaggaacattcagatggttgaggctaaattcgtcaagttaattaaccactcaaagattcttttgaggaaacagtggctttatggtattgttgatgattttgtaacaaagcaacttccacacaatgtaacgtggggtctgagtctgttgtatgctttggagcacaagggagatagagctttaacctcaactcaaggagagttggcacatgctctgcggttcttggcttcagtggtgtcacagagcttcatagccttcggcgacattcttgagttacataagaagttccttgaactttctggtggcattaaccggatctttgagcttgaggagtttacacgcttcgctcaaagaaatactgtggtgtctcccaatgccatcagtgcagcctcaaaagaaacgatttcgtttcatgaagtggacattgtaacaccatcacagaagctattggctagaaaactctcgtgcgatgtggtacaagggaaaagccttcttctgaccggtcccaatggtagtggaaagagttctatttttagagtgctcagggatctctggcccaccttctctgggagagttaccaagccctcagaagggatgtttcacgttcctcagcgcccatataccagcctaggtactctgcgggatcagatcatataccctctctcaagggaggaagcgaagataaaagttctttcgctacatagatctggtaacaattctagtgcctccatgctgctggatgatcacctgaagacaattctagagaatgttcggctggtgtatcttctagaaagggaagggtgggattctacaccaaactgggaagatgttctgtcgttaggggaacaacagaggcttggaatggctcgtttgtttttccatcatcctaagtttggtatcctggacgagtgcaccaatgctacgagtgttgatgtcgaagagcatctgtacagacttgcaactagcatgggcataactgtgatcacttcctctcaaaggcctgctttgatacccttccatgccttggagctgaagctcattgacggcgaagggaactgggagctatgtgcgatccagcagtgagtgatggtgcccattaggagttgatgccattaaatgcaccatcagctgcatgtacaaaagcaagcagctagcacattgccattgtttgtgtatggacaacgtagacagtggcagcgttgctatgttggaagatgctatattcttgtcatagtctgcctcaggttgagcagcaaagcattgtgatgatgtatgattgtgagccatgcatggtagctgaatcctgatattagcttttagatagtggacatgattgtgagccatgcatggtagctgaatagcagagcagaagggttgtgtgttagaagctgtacctattgattcattacattatattgattctgcgtagcagatgtatattacaggcaagcaaaatataaataaatacgatgtggaattgtggatgctgctgccatgcagacatcagaaaattgaatcaggtgtggatgggaaattgtgcaagggtaagctgcattcagcgtagaggctctgccg

SEQ ID NO: 203927 - DNA, 3724 bp, Zea Mays
gtaaaattctcgttacaaaatttcagcagcggcatatgttctagttgctggtggggtaataaagaacttttctcctgcttttgggaagctgaaatctacagaacagcaactagaaggagactatcgtcaacttcactcgcggttaagaacacatgctgagagtgtggcattttatggcggtgagaacagagaagcatctcatattatgcagcggtttgaggctcttgttgagcacctgaatcttgtgcgtcatgaaaactggtggttcggcatgattcaagatttctttctgaagtattttggtgctactgtggcagttgtccttattatagaacctttcttctctggcaaccttagacctgattcatctacacttggaagggctgaaatgttgagcaatcttcgatatcacacaagcgtgatcatatcactgtttcagtctcttggaatcctttctatcagcacaagacgtttaaatattctaagtggctatgcagaccggattcgtgagttattggatgtttcacgtgagctgtctggggttcgtgatagatcactggatcacagttctcctggaaattatgtcagtgaagcaaaccatatagaattttcagatgttaaggtagtcacacctgcaggtaatgttttggttgacgatttgactcttcgggtagaaactggttctaatcttttgatcactggtcccaatggtagcggaaaaagctccctttttcgggtccttgggggtctatggccactggtatctggccacattgttaaacctggtgttggttcagatctaaataaggagatcttctatgtcccgcaaagaccatacacagctgttggaacactacgtgaacagctaatctatcctcttacggcagatcaggggattgaaccacttacatatgatggaatggtggaccttctaaagaatgttgacctggaatatttgcttgaacgctatcctcttgataaggaagttaactggggtgatgagctgtccctcggtgaacagcaaagattgggaatggccaggttattctaccataagccaaagtttgccatccttgatgagtgcactagtgctgtgacaaccgacatggaagaacgtttttgcaaaaaagttcgagctatgggtacatcctgcataacaatatctcatcgaccagctttagttgcatttcatgatattgttttatccttggacggtgaaggaggttggaatgttcagcatagaagggatgattcgtccttttccaccgaagaatctgatttttcatcatcagaaactgatcgtaaatctgacgcactgactgttcaaagggcttttatgagcagggcaaagagcaatgcttcattggggtccaaggatcatccatattgtacagaggttatagcaacttcccctgaggtggaaatagaacatccagcacggacacctcgaattccacatttacgatgtcacccaagacctttgcctctcagagtagctgcaatgctaaaaatactggttcctagactatttgataaacaaggcgggcagttgcttgctgtcgctgtacttgttttctctcggacatggatctctgatcgtattgcttcgttgaatgggacaactgtgaagtttgtcttggaacaggacaaagatgcctttattcgcttgattggtgtcagtattctacaaagtggtgcaaattcttttgtggcaccatctctcaggacccttactgcgaaacttgcccttggatggcgaattcgcatgaccaatcatatgcttcgatattatttgaaaaggaatgcattctacaaggtattcaacatgtcaggtaaaagcattgatgcagaccaaagattaacacttgatgtagacaagttgaccactgaccttgctggcctagttactggaatggtaaaaccgctagttgacattctttggtttacatggagaatgaagcttttatctggacgaagaggagttgctatactgtatgcttacatgctactgggtttgggctttcttagagctatatcccctgacttcggtcatctctcaggccaagaacaagaacttgaaggaacattcaggttcatgcactcgagactgcggacacatgctgaatcaattgctttctttggtggtggttcaagagaaaaagcgatggttgaggctaaattcgtcaagttaattaaccactcaaagattcttttgaggaaacagtggctttatggtattgttgatgattttgtaacaaagcaacttccacacaatgtaacgtggggtctgagtctgttgtatgctttggagcacaagggagatagagctttaacctcaactcaaggagagttggcacatgctctgcggttcttggcttcagtggtgtcacagagcttcatagccttcggcgacattcttgagttacataagaagttccttgaactttctggtggcattaaccggatctttgagcttgaggagtttacacgcttcgctcaaagaaatactgtggtgtctcccaatgccatcagtgcagcctcaaaagaaacgatttcgtttcatgaagtggacattgtaacaccatcacagaagctattggctagaaaactctcgtgcgatgtggtacaagggaaaagccttcttctgaccggtcccaatggtagtggaaagagttctatttttagagtgctcagggatctctggcccaccttctctgggagagttaccaagccctcagaagggatgtttcacgttcctcagcgcccatataccagcctaggtactctgcgggatcagatcatataccctctctcaagggaggaagcgaagataaaagttctttcgctacatagatctggtaacaattctagtgcctccatgctgctggatgatcacctgaagacaattctagagaatgttcggctggtgtatcttctagaaagggaagggtgggattctacaccaaactgggaagatgttctgtcgttaggggaacaacagaggcttggaatggctcgtttgtttttccatcatcctaagtttggtatcctggacgagtgcaccaatgctacgagtgttgatgtcgaagagcatctgtacagacttgcaactagcatgggcataactgtgatcacttcctctcaaaggcctgctttgatacccttccatgccttggagctgaagctcattgacggcgaagggaactgggagctatgtgcgatccagcagtgagtgatggtgcccattaggagttgatgccattaaatgcaccatcagctgcatgtacaaaagcaagcagctagcacattgccattgtttgtgtatggacaacgtagacagtggcagcgttgctatgttggaagatgctatattcttgtcatagtctgcctcaggttgagcagcaaagcattgtgatgatgtatgattgtgagccatgcatggtagctgaatcctgatattagcttttagatagtggacatgattgtgagccatgcatggtagctgaatagcagagcagaagggttgtgtgttagaagctgtacctattgattcattacattatattgattctgcgtagcagatgtatattacaggcaagcaaaatataaataaatacgatgtggaattgtggatgctgctgccatgcagacatcagaaaattgaatcaggtgtggatgggaaattgtgcaagggtaagctgcattcagcgtagaggctctgccg

SEQ ID NO: 203928 - DNA, 5538 bp, Zea Mays
gttggtttttacgcaaaacttgtgtagattcaggattctctcagtataccaccagtctctctcagtgctgcgctgtatctgtctgtgactgagcccccccttcttctctctctcttgcttaaatctcatcatcacatcaaccgttcctcccctgtactctcatcacccattgcttcgcgttcgcggcatctactgctgctcctctgctcggccccgcgtcgccgtcgggagatctctccggccgccgagatcgattccacgcgccgctctcgcctgcctccgctcactgtccccgctgccgcaggattcgcccgccctgccggtgcgccggtggttctctacggcgtcttccggttcgggtgccgccatgctccgtggcgacgggggagggacgccgtgattccttgcctggccgccggtcgccgcacgtgaggctgagatctcggggagctcgccgtctcgcggcgccgccaccaccatgccgtctctgcagctgctgcagctgacggaccgcggccgggggcttctcgcttccaggaggaggacgctcgcctttgtctccggcgcggtgcttgccggtggagctctggcgtacgcccgctcgagccagagccgccggcggaggaggcgcccggaggcgagtcgcagcggcggagccggtgcattggccgccaatggggatggtttcagccagaacggtgccggcggtggattggctgcagcggaccagaggaggagtggcctcaaatctctgcatttcctcgcttctatcctactcaagaagatggggcccagtggcacgcgctaccttctatgcttggtattaacatcggtgctgcgtacagccgtagggcatagattagcaagagttcaagggtttttgtttaaagcagcatttcttcggcgcatcccaacatttacacgcttgatcatagaaaatcttacgctatgtttcctccaatcaacattatatcagacctcaaaatacttaacaggctctttaagtttgcgtttcaagaaaattctaacagatatcgcccatgctgattactttgagaatatggtttactacaagatctcacatgtggatcatcggatatcaaatccggagcaaaggattgctagtgatatcccaaagttctcttctgaactaggtgaacttgtacaagatgatctggctgcagttgcagaagggttaatatacacgtggcgtctctgttcttatgccagtccaaaatacgtgttctggattatggcatatgttctagttgctggtggggtaataaagaacttttctcctgcttttgggaagctgaaatctacagaacagcaactagaaggagactatcgtcaacttcactcgcggttaagaacacatgctgagagtgtggcattttatggcggtgagaacagagaagcatctcatattatgcagcggtttgaggctcttgttgagcacctgaatcttgtgcgtcatgaaaactggtggttcggcatgattcaagatttctttctgaagtattttggtgctactgtggcagttgtccttattatagaacctttcttctctggcaaccttagacctgattcatctacacttggaagggctgaaatgttgagcaatcttcgatatcacacaagcgtgatcatatcactgtttcagtctcttggaatcctttctatcagcacaagacgtttaaatattctaaggtgcagttctccacctattttagaaattgctacctggtagatctgaatcgtggaaggtggcaccttgcttcaaaaagttgctggattatggtgcacgtcatccaattaagtctggtttcattttttcttgcaattggcaatgtgacattttttgttccattatttctcacaaatgctgactgagaataattttatttcatggaaccgtttttacgatctgttttttatgaaggaagaatctcacttctattttttgtttgattgatggtttaatatggttccaagaagaagtcaagaagacacattatgccactttgtttagtgctttgacggagactggaaatcattaacatcctctcccaatatgcccttttagttttcaaattctgccaattatgacattattttctatatgatttgacctgttgcatgctgtgtaggtggcttttctacattccagtatacgagaatttcagtgtcattaaagttttgcactgatgtccgccacagatttatgactgttttggcaggaaccatacttgatttatgattgcgttggtaggaacaatacttgatctatgatcgttttgtggctatgcagaccggattcgtgagttattggatgtttcacgtgagctgtctggggttcgtgatagatcactggatcacagttctcctggaaattatgtcagtgaagcaaaccatatagaattttcagatgttaaggtagtcacacctgcaggtaatgttttggttgacgatttgactcttcgggtagaaactggttctaatcttttgatcactggtcccaatggtagcggaaaaagctccctttttcgggtccttgggggtctatggccactggtatctggccacattgttaaacctggtgttggttcagatctaaataaggagatcttctatgtcccgcaaagaccatacacagctgttggaacactacgtgaacagctaatctatcctcttacggcagatcaggggattgaaccacttacatatgatggaatggtggaccttctaaagaatgttgacctggaatatttgcttgaacgctatcctcttgataaggaagttaactggggtgatgagctgtccctcggtgaacagcaaagattgggaatggccaggttattctaccataagccaaagtttgccatccttgatgagtgcactagtgctgtgacaaccgacatggaagaacgtttttgcaaaaaagttcgagctatgggtacatcctgcataacaatatctcatcgaccagctttagttgcatttcatgatattgttttatccttggacggtgaaggaggttggaatgttcagcatagaagggatgattcgtccttttccaccgaagaatctgatttttcatcatcagaaactgatcgtaaatctgacgcactgactgttcaaagggcttttatgagcagggcaaagagcaatgcttcattggggtccaaggatcatccatattgtacagaggttatagcaacttcccctgaggtggaaatagaacatccagcacggacacctcgaattccacatttacgatgtcacccaagacctttgcctctcagagtagctgcaatgctaaaaatactggttcctagactatttgataaacaaggcgggcagttgcttgctgtcgctgtacttgttttctctcggacatggatctctgatcgtattgcttcgttgaatgggacaactgtgaagtttgtcttggaacaggacaaagatgcctttattcgcttgattggtgtcagtattctacaaagtggtgcaaattcttttgtggcaccatctctcaggacccttactgcgaaacttgcccttggatggcgaattcgcatgaccaatcatatgcttcgatattatttgaaaaggaatgcattctacaaggtattcaacatgtcaggtaaaagcattgatgcagaccaaagattaacacttgatgtagacaagttgaccactgaccttgctggcctagttactggaatggtaaaaccgctagttgacattctttggtttacatggagaatgaagcttttatctggacgaagaggagttgctatactgtatgcttacatgctactgggtttgggctttcttagagctatatcccctgacttcggtcatctctcaggccaagaacaagaacttgaaggaacattcaggttcatgcactcgagactgcggacacatgctgaatcaattgctttctttggtggtggttcaagagaaaaagcgatggttgaggctaaattcgtcaagttaattaaccactcaaagattcttttgaggaaacagtggctttatggtattgttgatgattttgtaacaaagcaacttccacacaatgtaacgtggggtctgagtctgttgtatgctttggagcacaagggagatagagctttaacctcaactcaaggagagttggcacatgctctgcggttcttggcttcagtggtgtcacagagcttcatagccttcggcgacattcttgagttacataagaagttccttgaactttctggtggcattaaccggatctttgagcttgaggagtttacacgcttcgctcaaagaaatactgtggtgtctcccaatgccatcagtgcagcctcaaaagaaacgatttcgtttcatgaagtggacattgtaacaccatcacagaagctattggctagaaaactctcgtgcgatgtggtacaagggaaaagccttcttctgaccggtcccaatggtagtggaaagagttctatttttagagtgctcagggatctctggcccaccttctctgggagagttaccaagccctcagaagggatgtttcacgttcctcagcgcccatataccagcctaggtactctgcgggatcagatcatataccctctctcaagggaggaagcgaagataaaagttctttcgctacatagatctggtaacaattctagtgcctccatgctgctggatgatcacctgaagacaattctagagaatgttcggctggtgtatcttctagaaagggaagggtgggattctacaccaaactgggaagatgttctgtcgttaggggaacaacagaggcttggaatggctcgtttgtttttccatcatcctaagtttggtatcctggacgagtgcaccaatgctacgagtgttgatgtcgaagagcatctgtacagacttgcaactagcatgggcataactgtgatcacttcctctcaaaggcctgctttgatacccttccatgccttggagctgaagctcattgacggcgaagggaactgggagctatgtgcgatccagcagtgagtgatggtgcccattaggagttgatgccattaaatgcaccatcagctgcatgtacaaaagcaagcagctagcacattgccattgtttgtgtatggacaacgtagacagtggcagcgttgctatgttggaagatgctatattcttgtcatagtctgcctcaggttgagcagcaaagcattgtgatgatgtatgattgtgagccatgcatggtagctgaatcctgatattagcttttagatagtggacatgattgtgagccatgcatggtagctgaatagcagagcagaagggttgtgtgttagaagctgtacctattgattcattacattatattgattctgcgtagcagatgtatattacaggcaagcaaaatataaataaatacgatgtggaattgtggatgctgctgccatgcagacatcagaaaattgaatcaggtgtggatgggaaattgtgcaagggtaagctgcattcagcgtagaggctctgccg

SEQ ID NO: 203929 - DNA, 4174 bp, Zea Mays
aaagaaagctacccaaatccatgcatcccttaagaaattcgacaccacaacgaacatggtgctgcgtacagccgtagggcatagattagcaagagttcaagggtttttgtttaaagcagcatttcttcggcgcatcccaacatttacacgcttgatcatagaaaatcttacgctatgtttcctccaatcaacattatatcagacctcaaaatacttaacaggctctttaagtttgcgtttcaagaaaattctaacagatatcgcccatgctgattactttgagaatatggtttactacaagatctcacatgtggatcatcggatatcaaatccggagcaaaggattgctagtgatatcccaaagttctcttctgaactaggtgaacttgtacaagatgatctggctgcagttgcagaagggttaatatacacgtggcgtctctgttcttatgccagtccaaaatacgtgttctggattatggcatatgttctagttgctggtggggtaataaagaacttttctcctgcttttgggaagctgaaatctacagaacagcaactagaaggagactatcgtcaacttcactcgcggttaagaacacatgctgagagtgtggcattttatggcggtgagaacagagaagcatctcatattatgcagcggtttgaggctcttgttgagcacctgaatcttgtgcgtcatgaaaactggtggttcggcatgattcaagatttctttctgaagtattttggtgctactgtggcagttgtccttattatagaacctttcttctctggcaaccttagacctgattcatctacacttggaagggctgaaatgttgagcaatcttcgatatcacacaagcgtgatcatatcactgtttcagtctcttggaatcctttctatcagcacaagacgtttaaatattctaagtggctatgcagaccggattcgtgagttattggatgtttcacgtgagctgtctggggttcgtgatagatcactggatcacagttctcctggaaattatgtcagtgaagcaaaccatatagaattttcagatgttaaggtagtcacacctgcaggtaatgttttggttgacgatttgactcttcgggtagaaactggttctaatcttttgatcactggtcccaatggtagcggaaaaagctccctttttcgggtccttgggggtctatggccactggtatctggccacattgttaaacctggtgttggttcagatctaaataaggagatcttctatgtcccgcaaagaccatacacagctgttggaacactacgtgaacagctaatctatcctcttacggcagatcaggggattgaaccacttacatatgatggaatggtggaccttctaaagaatgttgacctggaatatttgcttgaacgctatcctcttgataaggaagttaactggggtgatgagctgtccctcggtgaacagcaaagattgggaatggccaggttattctaccataagccaaagtttgccatccttgatgagtgcactagtgctgtgacaaccgacatggaagaacgtttttgcaaaaaagttcgagctatgggtacatcctgcataacaatatctcatcgaccagctttagttgcatttcatgatattgttttatccttggacggtgaaggaggttggaatgttcagcatagaagggatgattcgtccttttccaccgaagaatctgatttttcatcatcagaaactgatcgtaaatctgacgcactgactgttcaaagggcttttatgagcagggcaaagagcaatgcttcattggggtccaaggatcatccatattgtacagaggttatagcaacttcccctgaggtggaaatagaacatccagcacggacacctcgaattccacatttacgatgtcacccaagacctttgcctctcagagtagctgcaatgctaaaaatactggttcctagactatttgataaacaaggcgggcagttgcttgctgtcgctgtacttgttttctctcggacatggatctctgatcgtattgcttcgttgaatgggacaactgtgaagtttgtcttggaacaggacaaagatgcctttattcgcttgattggtgtcagtattctacaaagtggtgcaaattcttttgtggcaccatctctcaggacccttactgcgaaacttgcccttggatggcgaattcgcatgaccaatcatatgcttcgatattatttgaaaaggaatgcattctacaaggtattcaacatgtcaggtaaaagcattgatgcagaccaaagattaacacttgatgtagacaagttgaccactgaccttgctggcctagttactggaatggtaaaaccgctagttgacattctttggtttacatggagaatgaagcttttatctggacgaagaggagttgctatactgtatgcttacatgctactgggtttgggctttcttagagctatatcccctgacttcggtcatctctcaggccaagaacaagaacttgaaggaacattcaggttcatgcactcgagactgcggacacatgctgaatcaattgctttctttggtggtggttcaagagaaaaagcgatggttgaggctaaattcgtcaagttaattaaccactcaaagattcttttgaggaaacagtggctttatggtattgttgatgattttgtaacaaagcaacttccacacaatgtaacgtggggtctgagtctgttgtatgctttggagcacaagggagatagagctttaacctcaactcaaggagagttggcacatgctctgcggttcttggcttcagtggtgtcacagagcttcatagccttcggcgacattcttgagttacataagaagttccttgaactttctggtggcattaaccggatctttgagcttgaggagtttacacgcttcgctcaaagaaatactgtggtgtctcccaatgccatcagtgcagcctcaaaagaaacgatttcgtttcatgaagtggacattgtaacaccatcacagaagctattggctagaaaactctcgtgcgatgtggtacaagggaaaagccttcttctgaccggtcccaatggtagtggaaagagttctatttttagagtgctcagggatctctggcccaccttctctgggagagttaccaagccctcagaagggatgtttcacgttcctcagcgcccatataccagcctaggtactctgcgggatcagatcatataccctctctcaagggaggaagcgaagataaaagttctttcgctacatagatctggtaacaattctagtgcctccatgctgctggatgatcacctgaagacaattctagagaatgttcggctggtgtatcttctagaaagggaagggtgggattctacaccaaactgggaagatgttctgtcgttaggggaacaacagaggcttggaatggctcgtttgtttttccatcatcctaagtttggtatcctggacgagtgcaccaatgctacgagtgttgatgtcgaagagcatctgtacagacttgcaactagcatgggcataactgtgatcacttcctctcaaaggcctgctttgatacccttccatgccttggagctgaagctcattgacggcgaagggaactgggagctatgtgcgatccagcagtgagtgatggtgcccattaggagttgatgccattaaatgcaccatcagctgcatgtacaaaagcaagcagctagcacattgccattgtttgtgtatggacaacgtagacagtggcagcgttgctatgttggaagatgctatattcttgtcatagtctgcctcaggttgagcagcaaagcattgtgatgatgtatgattgtgagccatgcatggtagctgaatcctgatattagcttttagatagtggacatgattgtgagccatgcatggtagctgaatagcagagcagaagggttgtgtgttagaagctgtacctattgattcattacattatattgattctgcgtagcagatgtatattacaggcaagcaaaatataaataaatacgatgtggaattgtggatgctgctgccatgcagacatcagaaaattgaatcaggtgtggatgggaaattgtgcaagggtaagctgcattcagcgtagaggctctgccg

SEQ ID NO: 203930 - DNA, 2588 bp, Zea Mays
cagcaatagccggggcgcggaagcggttccccgtgttgcggtggtacaaagcgacaggcgcctcacgctcgcgtccctcctccccttccccacctcttcccattgccaagcaagagagaaacgcacgcgagccgcgagcagaacagagcagcgcggcgccatcccgatctcgctatttcccttctcccccgatgcgatctcgccgaaccctaatccccacgcccgacgcccggccgtcgccggagccctagccccgaatgcggcggtgacgcgcggcgtgccaccaccaccacctcagcgcccgcgcccgcgcccgcgcccgccaccgaccgtcctgcccggccgacaccagctgccatgggcgccgccgacaagtggctgctcccgctcgtctccgtctccttcgtctcgctcctgctcttcctctccgcgctctcgggcttctccgcctcctccgcactcttcgcgcgcctcccgccaccctcctacgtgcgccgaggcgccgccgcaccgccctccttcgcctacctgctcgcgggcggccggggggacggcaggaagctcctgcggctgctcctcgccgtctaccaccccaggaaccgctacctgctccacctctccgccgacgcgccggcctccgagcgcgccgagctcgccgcggccgtcgcgcgcgccgctcccgccgtgcgcgccttctcgaacgtcgatgtcgtgggcaggcccaccgcgggcaccccaatgggatcctccggcctcgccgccacgctccgtgcggccgccgcgatgctccggctggatgcggagtgggactggttcatcacgctcaacgccgccgactacccccttctcacccaggacgacttgatccatgttttctcctctgttccaaggcacctcaactttattgatcacaccagtgacattggatggaaagagtctcagagagtgcagccgattatagtagatgctggagtgtatttggcagggaggaatcagttcttccaagccacagagaaacgggacactcctgatagtttcaaatttttcacaggttctccatgggtcattttaaacagacgctttgttgagtattgtatttttggctgggagaatctccctagaacactcctcatgtacttgacaaacgtgatgctacctctcgaggggtatttccattcggttgcatgcaactcggacttccgcaatttcacagtgaacaacgacttgcggtatatgatttgggacaatccacctcagatggagccccatttcctaaatgttacacattacgatgagctagtagggactggggttccttttgcccggaagtttaaggagaatgaacccttgttggacaagattgatgatcaagtgcttcgacgatggcatcagagacctgttcctggtgcgtggtgcacaggcaggaggaggtggttcagtgatccttgctcccagtggagcaacgtcaacattgtaagacctggtcctcaagctgagaagttccgaacatatataaaccagattatggaagaatcaaagtcaggcaacaactcttgcaagcaatagcggttgaagcattgagattgtctcattttgcacagaggagaggagcgaactccccatgtctcgagaacttcctggcatctggttcgggagcaagcatttttgcacctgttatatgaacacacggccaaggtgagagatgggtctattctttccggaatttttttggtgtcatggcttcaagggcttagtgcacactagcattactggaagccaagagagcttactgtgggaatacggaagctaataggcattgtaattagtagcggtgagttgaatgaccggtgcctttgtttatagaactggtggaattgttggcgcttccatacagaattgagaaaatgaagaactggggatgttattgattggttggtcatggctgtggctgttgtggacacgtgtggttaatacaatgctttactgattttcccaccttgacatgaagtttattctcatagtctcatgtctcctattctgcattttcatctcgtctgtgcatgtgcatgtacactacactaacaactctggtctcttgcagtgacgcagtgccccttaactgcaggagtttagtgagctaatgagctgtggatgtgaacaatggcaaattggcagtacagcatccctacacttcgtaggatctgtttgcatgaattgtgtggccttcaatggtatccctgctccagtgtagtccagtgtggaaggctactgtatccatgtcgaaacatgctaggttacaatggattaaaatgtgcagtaccagtagcgtttgatgcagcaatctatatatgaattgcaatggattctgcaaaagctcgatcgttggttatacttatgtggcgtgcttaataggatagtagacggacctgacaggattctggtgctggcggccgctggtggtggaagccggggccgggtgaggccgccgccgccgccgccgggttgttctgtgatatgagacaggtggcagccggatggatgaagctgaagcaggaagccctgcccaacccgtgcgagtgcgaacatgg

SEQ ID NO: 203931 - DNA, 2013 bp, Zea Mays
ttgtggcgtcctttttcctcatttcctgatactacctatataacattgcctttttatgtgatacacggtaattattgtaacttcatctgtgttatgtgctgcttccactatgtcgcacttagttcacaccctttcttatgaagtctaattttgttttttaatagatactagcatgttctagttttgcttttggcttgtgtattccgactgacacctcttaggggttcttgagtttcgtgttcatgattctctgttttctttttgtcttttgtcccttgctgcagacttgatccatgttttctcctctgttccaaggcacctcaactttattgatcacaccagtgacattggatggaaagagtctcagagagtgcagccgattatagtagatgctggagtgtatttggcagggaggaatcagttcttccaagccacagagaaacgggacactcctgatagtttcaaatttttcacaggttctccatgggtcattttaaacagacgctttgttgagtattgtatttttggctgggagaatctccctagaacactcctcatgtacttgacaaacgtgatgctacctctcgaggggtatttccattcggttgcatgcaactcggacttccgcaatttcacagtgaacaacgacttgcggtatatgatttgggacaatccacctcagatggagccccatttcctaaatgttacacattacgatgagctagtagggactggggttccttttgcccggaagtttaaggagaatgaacccttgttggacaagattgatgatcaagtgcttcgacgatggcatcagagacctgttcctggtgcgtggtgcacaggcaggaggaggtggttcagtgatccttgctcccagtggagcaacgtcaacattgtaagacctggtcctcaagctgagaagttccgaacatatataaaccagattatggaagaatcaaagtcaggcaacaactcttgcaagcaatagcggttgaagcattgagattgtctcattttgcacagaggagaggagcgaactccccatgtctcgagaacttcctggcatctggttcgggagcaagcatttttgcacctgttatatgaacacacggccaaggtgagagatgggtctattctttccggaatttttttggtgtcatggcttcaagggcttagtgcacactagcattactggaagccaagagagcttactgtgggaatacggaagctaataggcattgtaattagtagcggtgagttgaatgaccggtgcctttgtttatagaactggtggaattgttggcgcttccatacagaattgagaaaatgaagaactggggatgttattgattggttggtcatggctgtggctgttgtggacacgtgtggttaatacaatgctttactgattttcccaccttgacatgaagtttattctcatagtctcatgtctcctattctgcattttcatctcgtctgtgcatgtgcatgtacactacactaacaactctggtctcttgcagtgacgcagtgccccttaactgcaggagtttagtgagctaatgagctgtggatgtgaacaatggcaaattggcagtacagcatccctacacttcgtaggatctgtttgcatgaattgtgtggccttcaatggtatccctgctccagtgtagtccagtgtggaaggctactgtatccatgtcgaaacatgctaggttacaatggattaaaatgtgcagtaccagtagcgtttgatgcagcaatctatatatgaattgcaatggattctgcaaaagctcgatcgttggttatacttatgtggcgtgcttaataggatagtagacggacctgacaggattctggtgctggcggccgctggtggtggaagccggggccgggtgaggccgccgccgccgccgccgggttgttctgtgatatgagacaggtggcagccggatggatgaagctgaagcaggaagccctgcccaacccgtgcgagtgcgaacatgg

SEQ ID NO: 203932 - DNA, 2564 bp, Zea Mays
gtcgagtattcagccgatagcgcggccgtcagtgtagatcatactgatcaaggatctcaaggggaacacagcctaccagagagctatcccatctgctctgaccacgaggagtgcattgcccgtcctgagaggatcaagatccagaaaggtttcgtggccaaggaatccgtgaaggggcacatggcgagttccaactttacaccactcggcaatctttctgtacagaaggactaggagatgctgttaatgtcgtgaaaggcttgaagatatatgaagatgcgtttacgacatcagagatcatgaaagttgcagatttcatcaacgaaattcgtcaggctggcagaaatggagaactttcaggtcgtgccaagccatggtaacgtccgtccaaagtcgtgcacaacaaaatgttgatccaataagctacctgaacttggaaaccacgacttcttttcttagctctggtgagactttcatattcttcaacaagcagatcaaaggaaacaagagggagatcatacagcttggtgtaccgttatttcaacctaccacagaggatgctaattgtcacacagaaccaatcccccttgtcctgcaggctgtcattgaccaccttgttctttggcgtttaataccagaaagcaggaaaccaaatagtgtcgtcatcaacttcttcgatgaggatgaacattcgcagccctacttcaagcctccccatcttgacaaccccatttgcactcttctgctgtctgaaaccacgatggcatttggcaggtcacttgtcactgacagcaacgtgccgacatggcgcgacatgtggtgtgcccgtcgtccaaccggcgcgtgagcatcacgttcgcaagggtgaggccatcgacgccggtggacatgagcccactcccgtcccccaccaaggccatgacaccctggcagccgcagccggtcacggcctcccaggtgccgtcgcccgtgagcatgacgcagaagcccccggtcagcggtgccataatcggttatgccccgaccccgcaggccgtgctggcgcccgcagcctggggcatggccatgcgcgcgcccgtcatgatggtggctgcagcgcctgcgaggcccatggtgatggcctcatcgggcaccggcggcggcaacatcagcaagcggatgggccgcagcggcaccggcgtgttcctgccttggacggtcggcccgaagcggtacaacaagcaccttccaccgcgcatccagaagcgccggttctcggcgatgatgtcgcccatcgaggcgcagggctgaggacccgcccgacgtcatgtcgccgtcaaaccgaacggccaagatcaagtaggacccggtgcaacgagccaccgtttaattcctagggttcttggagtgttttttttttctctctcgtcgtcgagtcaaaaaaagaaaaaagaaaagaaatggtcaaaacgcgcggacagtgagtttggacgtctgtgtatttcggtgacctgtgtttttttttttctctggagggcttttggtccgcatgtaatttagccgggtttgtgacttgtgactttgtgagtgagtagcggagtttagaagcggtagaagaatatgggtctagggataggtgaagtcagaatcaggacaaggtttttcgtttgttttcatccttcttttttcagttttttaagatgatgcttttagttttgctatatcctcgtcttttccttttttttttcgtaccctatttttccgtaccgagaagaatgttgacatgcatatatgcatttcatgctgagtttgaagttctataagcaaaagatgcatcttgtgttgcccacttactggacgtcaatctttttgcttatatctttaatcttgaggtcttgtttggttatttcgaattgaaagaaaaatgatctcaatattttttaaatcgattttggtgtttgacgtccattataaatcacatggactaactaatttggctaattgctatttttctcatgtgcataaagttcaacataaacataaataaaaagagttgaatgaattctataaagtttggagcataaaagaatgggtgcagccagtgtcgcaccggacaaatgtgcactggacactattcggtgccccaggctgtagccctcgctaggttttctcatagcctctccactaaaactcatcggactgtctggtgagccaacggagcaatggtcaactttgccaacgatcgactgcgctgatgaaggaacagtgcagaagtcagaaatcagaactgccaagtcagaacgcaccgaactgtccggtgccgcaagaggacaaaggacttcaacagtcaacagctccaaactccaacgattgggtgacgtggcacacaccggacagtaaatagtgccatgtccggtgtaccaccggacagtccggtgtgcccatcaacagcaaagtcagccaacggctacgaagtggttggaggctataaatacttccaaccacctccattcaagtcatccaagccccatacacttctcattcaatacaagagcaaaagcgtacactccaatacacaatcaaaa

SEQ ID NO: 203933 - DNA, 2560 bp, Zea Mays
gaattccaaagccaaagattgcatcagttctgctgctatttcctcctatcattctttctgatgttgaaaatgatattaagcctaggattcgtgaatgggagaaggctggcattgaacaagactatgttagtaggatgttgttgaagtatccatggattctttcaacgagtgtgatagagaactacagtcaaatgctgttgtttttcaaccaaaaaaggatttccagtacagtcctcgctattgctgtgaaaagttggcctcatattcttggctcctcttcaaaaagaatgaattcagttttggagctgtttcatgttctgggcatcagtaaaaaaatggtggttccagtcattacatcaagtccacagttattactgagaaaacctgatcagtttatgcagaatgttttgtttttcagagaaatgggtgttgataagaaaacaacaggaaaaattctgtgtcgttcgcctgaaatatttgcttcaaacgtggataacaccctcaagaagaaaatcgattttcttaccaactttggtgtttctaaacatcatcttcctcgcatcattcggaagtatccagaacttttattgttggacataaattgtacattgctccctaggatgaactacttattggagatgggtttgtctaagaaagatctgtgctcaatgatctttagattttccccacttctaggttacagtattgaacttgttatgaaaccaaagcttgagtttctgctaagaaccatgaagaagccacttaaagcagttgtagaatacccaaggtacttcagttattcactcgaggggaagatcaaaccgcggttctgggtattgcagagtagaaacatagactgcactctgacagagatgttagcaaagaacgatgaactctttgctgaagagtacttgggacttggaggattgctcgagaaacctctacaatcaagcataggcagttaatttctggacttataagattgaaccatgcagtgcactatgccgaagctgtacagctttatgcttggattggtgaggctgtttttcagatgggaggtcacttttttttgaaaacggaggagatgtgtcgctggctgttcttgctatggtacccgcaaaaataattaaaacaaggactgtggctgacgcactctcaaacaacagttgggtttcagatattaaaggaggactgtccatgattggtctgttcgaaattttcagctatgggacaccacacatggagtttctttaaccactgacaatgatcgccatatctggagattctctggttggggtgaattctcgtcgaaatcggcctacagagtcttcttccatggtttggtctcctttgatccttggaagcgtatttggaaaacttggactccacctaattgcaagattttcttttggatacctgtccgaaatcgctgttggactgcggaccgattggctcggagaggactggcacacctagtccattgaattctttgcgaccaggaagaggagaatattaatcacaatttgttttcctatgttttcttgagggaattctggtttagagttttctcctggctggtgtatgttgaccgtgtgccggggtcccaggagcaatcgcttgcagattggtggtgaaaggcttgcaaacatctcccaaaagaaaaaaagggaagggcatgaattcgatgattatgttgggagcttggatcctatggaagcatcgcaatgcctgcgtcttcgaaggtttgcagctgagtatgtggaatgttctgcatgctctcgaagatgaacagcatctctggtgtctcgccggagtgcaaggactgcagagtttaggcctgggctccctgagcggttaggtggcatttcctggtctggtctcaccatttctatttgctgtaagagttttgttcttgtaagcacagcccctcacggctcgggctcggtccggaatgaggggtaaaacttgtacgggaggccacttttctggtgcttagtattaaaaagcaaagcattgggttttgagaatacttcattcaaggtttaagaagaaattgcaaagatgcggtttcaaactaggaaacggagtgaaggatgccccacacctttgagtggatgcgcgcaggaaccaatgcaagctgtagtaaggccttgaagtataaggcaacccaagtctgccatcatctctttctcgttgaactgaagcctgtccatgcctccatggcccagtccagcatcatcgccaatcagagctgagggcagccgcagagccagcggtagctagtcggctagtccattgactggccggtgcaggggtcacggactcacggttctgcatttcatattttcgtttaggtgtcgtttggatccgtttattttggaggaattagaatctatttaatagagtaggctatttagcttggaatttgacattccaccactttacaatgttaaaaaataagttatctcaaatttatagaatggaattgactttatgtatcttcaaactacgtttctactctacaatttataacatgtttttttggctcgctcctttacag

SEQ ID NO: 203934 - DNA, 1744 bp, Zea Mays
ctttaactcccttaagtttacagttggtgcggaagttgtccggcgagagggcgagcgtggagcagacgaggaggttggcgaaggagatcgccgccgagaacgacatcttgctggagttccctgagagcccagtagggattcacaaagatggtcgcacgacctcgcaggtcaacagtcagagagcaggagaggaaactaagaatgcaccggccagaacatttgtcgaggagagtgcagtcaagacgggtcgccgtgagggggagcggaattctgttaacggcaaggtgaacccgagccttgctcagctgagcctggatgagaaggtgttgagggagtccaagaagtaccccgacgcaaggatggcggcggaggcagccttcgcgtccgcgaagttcgccgcgatggccgcccgggctgccgtcgagctgtctcggtcggagtcccatgggaagggatcgacgggcggtggctacgacaaggtgccctccgtgcggacgaccgcggcaacggagcaggggacggcgccgccgctgtcgagaccgcacaagtcgccgtcgccgtcgccctcgtggagcgacaggagcacggcgacctcggtcgggtcggacgctgcacacaaggggaaggaggtcgtgttcgaccagagcgacgaggagctggatgacgtcgtctggcctccgccgcagcgccggccatcctaccggaggacggcctccacggtgggcacagtacatgcgtcggcccgtgacacgggcacgccggctgcacagctggcgcgcccgcagcacaggcgtcacgccacggagttatccgccggtaacgctcatgcgcccggcctccacgacgccctggcaggccagcgcaggcagcacgtgaccccgccgtacaggagggcctcaacggccagcacgggcagaaacagcgacgctgcggcgctggacgacggcggcgcgtacgagagctcgccgtacgtgcagccgccgtactcgaggatggcgtcggcgctggagcgcagcaacgggcacatcgcgcggcacgaggaggtgcgcaggatgggcacggacgcgcgggcgctccaggagcgggtgtacggcgcggcggcgccagggcaggggcacggcccgctggacccggagaggaggaccacctcggtgcgcacgcggagatgagcgttttcgtggcctggctggctagtggctactcgcctactcgtcattcgtcagttcagtgttcagcattgcaggagatcgggtccgttgcttcccgagcagagtggcggtttttggtgcggggtcgatggagatttcctgcctctggaaattaaatgcacatggggaaatgcacatgggtagaatcaaacagaagtatattttgctagaaattcaggattgttcatggagctgaatatggatggatacatgcatactggtgggtaggtggcccttttgtattgtactccctccgtctcaggatataaggcgtaaccactttttattcttgtcccacaatataaggcgtgctctctctatgcatacgcatatcgatgcagtggtatagagacaattaaatgcatttcttggtctttgaaccagaggtggttacgccttatatactgggacggagggagtacagaggaaggatcgagtattaattaattaagttgtactgtaattagctgcgagctgtgttttgtttcctgtagaaactgaggagttttgcttcatggtaggtgttcctaacctgc

SEQ ID NO: 203935 - DNA, 2780 bp, Zea Mays
caatcgccttcacctgcaggcaggcagacacggaaggggacgggaatggcgacaggcaggcgtcgtccgcggcagtgcaggcgatgacgatgtgggctcggcggcgcgtcgcttttacgcaagaaaccatccatcgccggaataaagaaggcgcacgacggagtgcgtcttcccccctctagtttatctgctgcccaagcgacaggcccacacccccgcattactgcggcaccagcacacgttgcagaagccagaagagaaggccatcccagaacgtcacgctgaaaggggcatcgatgagctgtttttgcagatgagccggagactgagcctgacaaagagtctcgtgatctataactaaggctctgcaaaacttggagactacccaattcccaaaagaagcagcatcggcgggcacagcaacacagcgcaggtttgcccgtccacagcaaacaccgtagtccacaagcaagtcacgtttcttctgcacaggcacagagcacagagcaccaatccggtgaccaatataagaagcaggccgccagcagttcaccgccacagcaccaaccccgacaccaccgttggcaaccgcaacccgcaaccagagccatgggcctcttcggcaagagcacctccaagcagaccgccaagctcaagtccctggtcaagctcgccgcggcgcgcctcgccgtcgtccgccggccgcgcctcggccgccggtccatcgcccgtagcgacgtcgggcagctcctctctatcggccatctcgaccgcgcgctcgtccgcgcggagcaggtgatcgaggaggacaacatgctggaggcgctggacgtcatcgagctctactgcaaaatcctcgtcgagcagaccgcgcagctggagaaacccaaggaatgcagcgaggagatcaaggaggcggctgcggggctgatgttcgcgtccgcgcggtgcggcgagctgccggagcttctggacgcgcgcgccatccttgcagacaagttcggccgagacttcgccagggcggccaaggagggcgcccacggcgtcgtcgaccccacgttggtgcggaagttgtccggcgagagggcgagcgtggagcagacgaggaggttggcgaaggagatcgccgccgagaacgacatcttgctggagttccctgagagcccagtagggattcacaaagatggtcgcacgacctcgcaggtcaacagtcagagagcaggagaggaaactaagaatgcaccggccagaacatttgtcgaggagagtgcagtcaagacgggtcgccgtgagggggagcggaattctgttaacggcaaggtgaacccgagccttgctcagctgagcctggatgagaaggtgttgagggagtccaagaagtaccccgacgcaaggatggcggcggaggcagccttcgcgtccgcgaagttcgccgcgatggccgcccgggctgccgtcgagctgtctcggtcggagtcccatgggaagggatcgacgggcggtggctacgacaaggtgccctccgtgcggacgaccgcggcaacggagcaggggacggcgccgccgctgtcgagaccgcacaagtcgccgtcgccgtcgccctcgtggagcgacaggagcacggcgacctcggtcgggtcggacgctgcacacaaggggaaggaggtcgtgttcgaccagagcgacgaggagctggatgacgtcgtctggcctccgccgcagcgccggccatcctaccggaggacggcctccacggtgggcacagtacatgcgtcggcccgtgacacgggcacgccggctgcacagctggcgcgcccgcagcacaggcgtcacgccacggagttatccgccggtaacgctcatgcgcccggcctccacgacgccctggcaggccagcgcaggcagcacgtgaccccgccgtacaggagggcctcaacggccagcacgggcagaaacagcgacgctgcggcgctggacgacggcggcgcgtacgagagctcgccgtacgtgcagccgccgtactcgaggatggcgtcggcgctggagcgcagcaacgggcacatcgcgcggcacgaggaggtgcgcaggatgggcacggacgcgcgggcgctccaggagcgggtgtacggcgcggcggcgccagggcaggggcacggcccgctggacccggagaggaggaccacctcggtgcgcacgcggagatgagcgttttcgtggcctggctggctagtggctactcgcctactcgtcattcgtcagttcagtgttcagcattgcaggagatcgggtccgttgcttcccgagcagagtggcggtttttggtgcggggtcgatggagatttcctgcctctggaaattaaatgcacatggggaaatgcacatgggtagaatcaaacagaagtatattttgctagaaattcaggattgttcatggagctgaatatggatggatacatgcatactggtgggtaggtggcccttttgtattgtactccctccgtctcaggatataaggcgtaaccactttttattcttgtcccacaatataaggcgtgctctctctatgcatacgcatatcgatgcagtggtatagagacaattaaatgcatttcttggtctttgaaccagaggtggttacgccttatatactgggacggagggagtacagaggaaggatcgagtattaattaattaagttgtactgtaattagctgcgagctgtgttttgtttcctgtagaaactgaggagttttgcttcatggtaggtgttcctaacctgc

SEQ ID NO: 203936 - DNA, 1943 bp, Zea Mays
tgaaccaatcaacccactccacagagttactagcactgcaaaacttgtgacattgtgctctctgttttcgaaacaagagggtgaaactctttgaaaaggatcctgcaaggcaagtagcgacatatgttgaggccgtgaaaactgtagacccgatgaaggcagtcgggaagccccatactctgtgggtggcatttgcaaagatgtacgagaaacacaatcgtctagatagtgctgaagatatcttcaaacgggctactcaagtgaattataaggcagttgaccacttagccagtatctggtgtgagtgggcagagatggagctacgccacaacaattttgacaaggctattgagctgatgaggcaagcaacagcagagccctctgttgaactgctgctgagggggatgagcctgtccaaatgaaagtgcacaaatctttgaaactgtggagcttttatgttgatctggaggagagccttggaaccttagactctacacgtgtagtttatgagagaatactggatttacgaattgccactccacagataattctcaattatgcatatcttcttgaggagcacaagtatttcgaagatgcatttaaagtgtatgaaaggggcgtgaaaatattcaagtatccccatgttaaggccatttgggtaacctaccttacaaagtttgtacatagatacaagagaagcaagttagaacgagcaagagaacttttccatgaagctgtccaacaggctcctccagaggaaaagaagcccctatatttacaatgggcaaaactggaagaggactatggtcttgcaaaacgtgctatgaatgtatatgatgaatctgtaagagctgttcctggcagtgaaaaaatggccatgtatgaaatctatatagcacgtgctgccgaactctttggtgttccaaggacaagacaaatatacgagcaagcaattgaatctggcctcccagacaaagatgttctgacaatgtgcatgaagttcgctgaactagagagaagccttggtgaaattgatcgtttcgcgtgccatctatgtgcatgcatccaactatgctgatccaaataatcctgacttttggaagaagtggaatgactttgagattcagcacggtaacgaagacacattcagggagatgcttcgtatcaaacggacagtggctgctagccgtagtcagacacatttcatactaccggagtacttgatgcagaaggatcataggttaaacctggacgaagccgttgacactctgaaacgtgctggcgtccctgaggacgagatggcagccttggaaaggcaactggctcctggaccatccactgcaccagcagcaacaccaactgccccagcctctgctaacaggacgatgaattttgtcagtgctggagtagaggcgcaggcagacagcagcaggcaacaggctggtaacaacgaggacattgagctgcccgacgagagtgacgacgaggaacccgatgtccaaattgcggagaagagtgttcctgctgcggtatttggtgagctcggcaagagagctgccgagaagaacgaggaaagctcaggtgcccaaggaaatgagcagctgggcgccctcgagaggataaagagacgacgccaatagtaagccgttgctaagattgtgcagccgtggtatcagcacgagctttatttaacgatgttgtacttgttacgtgtaaacaatttctttgtacaaacattgaagggagttgatcggcgtggccatttctgtgtagtcttgggtttgtttcttctccctcgaaagaacatgacaccaaaacatcatttctttggttcgtttctagattttattcgtccaaagcattagacgtgaagaaagccatcaatatcatgaaaggacaggcaacgtccgaaatcatgaaaggacaggcaacatgcgtagtca

SEQ ID NO: 203937 - DNA, 1928 bp, Zea Mays
ggaaaatttgtgatgaaccaatcaacccactccacagagttactagcactgcaaaacttgtgacattgtgctctctgttttcgaaacaagagggtgaaactctttgaaaaggatcctgcaaggcaagtagcgacatatgttgaggccgtgaaaactgtagacccgatgaaggcagtcgggaagccccatactctgtgggtggcatttgcaaagatgtacgagaaacacaatcgtctagatagtgctgaagatatcttcaaacgggctactcaagtgaattataaggcagttgaccacttagccagtatctggtgtgagtgggcagagatggagctacgccacaacaattttgacaaggctattgagctgatgagctgctgctgagggggatgagcctgtccaaatgaaagtgcacaaatctttgaaactgtggagcttttatgttgatctggaggagagccttggaaccttagactctacacgtgtagtttatgagagaatactggatttacgaattgccactccacagataattctcaattatgcatatcttcttgaggagcacaagtatttcgaagatgcatttaaagtgtatgaaaggggcgtgaaaatattcaagtatccccatgttaaggccatttgggtaacctaccttacaaagtttgtacatagatacaagagaagcaagttagaacgagcaagagaacttttccatgaagctgtccaacaggctcctccagaggaaaagaagcccctatatttacaatgggcaaaactggaagaggactatggtcttgcaaaacgtgctatgaatgtatatgatgaatctgtaagagctgttcctggcagtgaaaaaatggccatgtatgaaatctatatagcacgtgctgccgaactctttggtgttccaaggacaagacaaatatacgagcaagcaattgaatctggcctcccagacaaagatgttctgacaatgtgcatgaagttcgctgaactagagagaagccttggtgaaattgatcgtttcgcgtgccatctatgtgcatgcatccaactatgctgatccaaataatcctgacttttggaagaagtggaatgactttgagattcagcacggtaacgaagacacattcagggagatgcttcgtatcaaacggacagtggctgctagccgtagtcagacacatttcatactaccggagtacttgatgcagaaggatcataggttaaacctggacgaagccgttgacactctgaaacgtgctggcgtccctgaggacgagatggcagccttggaaaggcaactggctcctggaccatccactgcaccagcagcaacaccaactgccccagcctctgctaacaggacgatgaattttgtcagtgctggagtagaggcgcaggcagacagcagcaggcaacaggctggtaacaacgaggacattgagctgcccgacgagagtgacgacgaggaacccgatgtccaaattgcggagaagagtgttcctgctgcggtatttggtgagctcggcaagagagctgccgagaagaacgaggaaagctcaggtgcccaaggaaatgagcagctgggcgccctcgagaggataaagagacgacgccaatagtaagccgttgctaagattgtgcagccgtggtatcagcacgagctttatttaacgatgttgtacttgttacgtgtaaacaatttctttgtacaaacattgaagggagttgatcggcgtggccatttctgtgtagtcttgggtttgtttcttctccctcgaaagaacatgacaccaaaacatcatttctttggttcgtttctagattttattcgtccaaagcattagacgtgaagaaagccatcaatatcatgaaaggacaggcaacgtccgaaatcatgaaaggacaggcaacatgcgtagtca

SEQ ID NO: 203938 - DNA, 1987 bp, Zea Mays
actacatcattttttgttggaaaatttgtgatgaaccaatcaacccactccacagagttactagcactgcaaaacttgtgacattgtgctctctgttttcgaaacaagagggtgaaactctttgaaaaggatcctgcaaggcaagtagcgacatatgttgaggccgtgaaaactgtagacccgatgaaggcagtcgggaagccccatactctgtgggtggcatttgcaaagatgtacgagaaacacaatcgtctagatagtgctgaagatatcttcaaacgggctactcaagtgaattataaggcagttgaccacttagccagtatctggtgtgagtgggcagagatggagctacgccacaacaattttgacaaggctattgagctgatgaggcaagcaacagcagagccctctgttgaagttaagcggcgggctgctgctgagggggatgagcctgtccaaatgaaagtgcacaaatctttgaaactgtggagcttttatgttgatctggaggagagccttggaaccttagactctacacgtgtagtttatgagagaatactggatttacgaattgccactccacagataattctcaattatgcatatcttcttgaggagcacaagtatttcgaagatgcatttaaagtgtatgaaaggggcgtgaaaatattcaagtatccccatgttaaggccatttgggtaacctaccttacaaagtttgtacatagatacaagagaagcaagttagaacgagcaagagaacttttccatgaagctgtccaacaggctcctccagaggaaaagaagcccctatatttacaatgggcaaaactggaagaggactatggtcttgcaaaacgtgctatgaatgtatatgatgaatctgtaagagctgttcctggcagtgaaaaaatggccatgtatgaaatctatatagcacgtgctgccgaactctttggtgttccaaggacaagacaaatatacgagcaagcaattgaatctggcctcccagacaaagatgttctgacaatgtgcatgaagttcgctgaactagagagaagccttggtgaaattgatcgtttcgcgtgccatctatgtgcatgcatccaactatgctgatccaaataatcctgacttttggaagaagtggaatgactttgagattcagcacggtaacgaagacacattcagggagatgcttcgtatcaaacggacagtggctgctagccgtagtcagacacatttcatactaccggagtacttgatgcagaaggatcataggttaaacctggacgaagccgttgacactctgaaacgtgctggcgtccctgaggacgagatggcagccttggaaaggcaactggctcctggaccatccactgcaccagcagcaacaccaactgccccagcctctgctaacaggacgatgaattttgtcagtgctggagtagaggcgcaggcagacagcagcaggcaacaggctggtaacaacgaggacattgagctgcccgacgagagtgacgacgaggaacccgatgtccaaattgcggagaagagtgttcctgctgcggtatttggtgagctcggcaagagagctgccgagaagaacgaggaaagctcaggtgcccaaggaaatgagcagctgggcgccctcgagaggataaagagacgacgccaatagtaagccgttgctaagattgtgcagccgtggtatcagcacgagctttatttaacgatgttgtacttgttacgtgtaaacaatttctttgtacaaacattgaagggagttgatcggcgtggccatttctgtgtagtcttgggtttgtttcttctccctcgaaagaacatgacaccaaaacatcatttctttggttcgtttctagattttattcgtccaaagcattagacgtgaagaaagccatcaatatcatgaaaggacaggcaacgtccgaaatcatgaaaggacaggcaacatgcgtagtca

SEQ ID NO: 203939 - DNA, 3232 bp, Zea Mays
tgcaggctgcagccgctcgccccatcgcgtcgaggacgccgcgccgccaatcgccgcccagctgccggtcttccccgcgcgacctaccccgtcgcctgctaccatgccaggccgggctcttaaatcctagctaggctcagccaatccccgcgccaggatgccgtcaacctcgggtccggttgccgtggcgtcggcttcggcgtcggcgaaagccgcgccgtccccggacgtcgggatctcgccggacctgtacccgtcggaggacgacctggcctacgaggaggagatcctgcgcgagcccttcaagctcaaggggtggtggcgctacctcgtggcccgcgccgccgcgccgttcgccaagcgcgccgtcatctacgagcgcgcgctcaaggcgctcccggggagctacaagctctggcacgcctacctccgcgaccgcctcgaccacgcgcgcccgcaccccatcgatcaccccgcctactcctccctcaacaacaccttcgagcgggcgctagccaccatgcacaagatgccgcgcgtctgggtcctctacctcacctcactcctcgaccagcgcctgctcacgcgcgcgcgccgcgccttcgaccgcgccctccgcgcgctccccgtcacgcagcacgaccgcatctggccgctgtaccttcgcctcgcttcgctcccggcctgccccgtagagacgtcgctccgagtcttccgccgatatctccaattcgacccctcccacgccgaggacttcatcaacttccttgtatccaccaaccactggcaggaggctgctaaccgtctagcttccgtgctcaacgacgatgggttccgctccgtcaaggggaaaacaaggcaccagctctggctcgagctctgcgatatcctcaccaaacatgctgatgaggttgccggcctcaaggtagacgccatactgcgtggtgggatacgcaagttcaccgatgaggtcggcaagctgtggacctcactggctgattactatgttaggagaggcctttttgaaaaagctagggatgtattcgaggagggtgtttcttcagtggttaccgtcaaggagttcagcgtggtatttgaggcatatacacagtttgagcagagtatgcttgcggcaaagctcgaggctgctgaggaagaaggggctgaggatgtgaacgagggagggggcaagaagagcgggatcgataatttatcgaagaaattcctcgatggattctggttgaacgacgaagatgatactgatttgaggatggcaaggtttgagcggctgttggatcgcagaccagagcttcttagcagcgtgctgttgcgacagaatccacacaatgtggaggagtggcacaggagggtgaaactctttgaaaaggatcctgcaaggcaagtagcgacatatgttgaggccgtgaaaactgtagacccgatgaaggcagtcgggaagccccatactctgtgggtggcatttgcaaagatgtacgagaaacacaatcgtctagatagtgctgaagatatcttcaaacgggctactcaagtgaattataaggcagttgaccacttagccagtatctggtgtgagtgggcagagatggagctacgccacaacaattttgacaaggctattgagctgatgaggcaagcaacagcagagccctctgttgaactgctgctgagggggatgagcctgtccaaatgaaagtgcacaaatctttgaaactgtggagcttttatgttgatctggaggagagccttggaaccttagactctacacgtgtagtttatgagagaatactggatttacgaattgccactccacagataattctcaattatgcatatcttcttgaggagcacaagtatttcgaagatgcatttaaagtgtatgaaaggggcgtgaaaatattcaagtatccccatgttaaggccatttgggtaacctaccttacaaagtttgtacatagatacaagagaagcaagttagaacgagcaagagaacttttccatgaagctgtccaacaggctcctccagaggaaaagaagcccctatatttacaatgggcaaaactggaagaggactatggtcttgcaaaacgtgctatgaatgtatatgatgaatctgtaagagctgttcctggcagtgaaaaaatggccatgtatgaaatctatatagcacgtgctgccgaactctttggtgttccaaggacaagacaaatatacgagcaagcaattgaatctggcctcccagacaaagatgttctgacaatgtgcatgaagttcgctgaactagagagaagccttggtgaaattgatcgtttcgcgtgccatctatgtgcatgcatccaactatgctgatccaaataatcctgacttttggaagaagtggaatgactttgagattcagcacggtaacgaagacacattcagggagatgcttcgtatcaaacggacagtggctgctagccgtagtcagacacatttcatactaccggagtacttgatgcagaaggatcataggttaaacctggacgaagccgttgacactctgaaacgtgctggcgtccctgaggacgagatggcagccttggaaaggcaactggctcctggaccatccactgcaccagcagcaacaccaactgccccagcctctgctaacaggacgatgaattttgtcagtgctggagtagaggcgcaggcagacagcagcaggcaacaggctggtaacaacgaggacattgagctgcccgacgagagtgacgacgaggaacccgatgtccaaattgcggagaagagtgttcctgctgcggtatttggtgagctcggcaagagagctgccgagaagaacgaggaaagctcaggtgcccaaggaaatgagcagctgggcgccctcgagaggataaagagacgacgccaatagtaagccgttgctaagattgtgcagccgtggtatcagcacgagctttatttaacgatgttgtacttgttacgtgtaaacaatttctttgtacaaacattgaagggagttgatcggcgtggccatttctgtgtagtcttgggtttgtttcttctccctcgaaagaacatgacaccaaaacatcatttctttggttcgtttctagattttattcgtccaaagcattagacgtgaagaaagccatcaatatcatgaaaggacaggcaacgtccgaaatcatgaaaggacaggcaacatgcgtagtca

SEQ ID NO: 203940 - DNA, 3253 bp, Zea Mays
ctctatcctgtcctcccgtcgcctgcgagacgcccacggcccacctatctgcaggctgcagccgctcgccccatcgcgtcgaggacgccgcgccgccaatcgccgcccagctgccggtcttccccgcgcgacctaccccgtcgcctgctaccatgccaggccgggctcttaaatcctagctaggctcagccaatccccgcgccaggatgccgtcaacctcgggtccggttgccgtggcgtcggcttcggcgtcggcgaaagccgcgccgtccccggacgtcgggatctcgccggacctgtacccgtcggaggacgacctggcctacgaggaggagatcctgcgcgagcccttcaagctcaaggggtggtggcgctacctcgtggcccgcgccgccgcgccgttcgccaagcgcgccgtcatctacgagcgcgcgctcaaggcgctcccggggagctacaagctctggcacgcctacctccgcgaccgcctcgaccacgcgcgcccgcaccccatcgatcaccccgcctactcctccctcaacaacaccttcgagcgggcgctagccaccatgcacaagatgccgcgcgtctgggtcctctacctcacctcactcctcgaccagcgcctgctcacgcgcgcgcgccgcgccttcgaccgcgccctccgcgcgctccccgtcacgcagcacgaccgcatctggccgctgtaccttcgcctcgcttcgctcccggcctgccccgtagagacgtcgctccgagtcttccgccgatatctccaattcgacccctcccacgccgaggacttcatcaacttccttgtatccaccaaccactggcaggaggctgctaaccgtctagcttccgtgctcaacgacgatgggttccgctccgtcaaggggaaaacaaggcaccagctctggctcgagctctgcgatatcctcaccaaacatgctgatgaggttgccggcctcaaggtagacgccatactgcgtggtgggatacgcaagttcaccgatgaggtcggcaagctgtggacctcactggctgattactatgttaggagaggcctttttgaaaaagctagggatgtattcgaggagggtgtttcttcagtggttaccgtcaaggagttcagcgtggtatttgaggcatatacacagtttgagcagagtatgcttgcggcaaagctcgaggctgctgaggaagaaggggctgaggatgtgaacgagggagggggcaagaagagcgggatcgataatttatcgaagaaattcctcgatggattctggttgaacgacgaagatgatactgatttgaggatggcaaggtttgagcggctgttggatcgcagaccagagcttcttagcagcgtgctgttgcgacagaatccacacaatgtggaggagtggcacaggagggtgaaactctttgaaaaggatcctgcaaggcaagtagcgacatatgttgaggccgtgaaaactgtagacccgatgaaggcagtcgggaagccccatactctgtgggtggcatttgcaaagatgtacgagaaacacaatcgtctagatagtgctgaagatatcttcaaacgggctactcaagtgaattataaggcagttgaccacttagccagtatctggtgtgagtgggcagagatggagctacgccacaacaattttgacaaggctattgagctgatgagctgctgctgagggggatgagcctgtccaaatgaaagtgcacaaatctttgaaactgtggagcttttatgttgatctggaggagagccttggaaccttagactctacacgtgtagtttatgagagaatactggatttacgaattgccactccacagataattctcaattatgcatatcttcttgaggagcacaagtatttcgaagatgcatttaaagtgtatgaaaggggcgtgaaaatattcaagtatccccatgttaaggccatttgggtaacctaccttacaaagtttgtacatagatacaagagaagcaagttagaacgagcaagagaacttttccatgaagctgtccaacaggctcctccagaggaaaagaagcccctatatttacaatgggcaaaactggaagaggactatggtcttgcaaaacgtgctatgaatgtatatgatgaatctgtaagagctgttcctggcagtgaaaaaatggccatgtatgaaatctatatagcacgtgctgccgaactctttggtgttccaaggacaagacaaatatacgagcaagcaattgaatctggcctcccagacaaagatgttctgacaatgtgcatgaagttcgctgaactagagagaagccttggtgaaattgatcgtttcgcgtgccatctatgtgcatgcatccaactatgctgatccaaataatcctgacttttggaagaagtggaatgactttgagattcagcacggtaacgaagacacattcagggagatgcttcgtatcaaacggacagtggctgctagccgtagtcagacacatttcatactaccggagtacttgatgcagaaggatcataggttaaacctggacgaagccgttgacactctgaaacgtgctggcgtccctgaggacgagatggcagccttggaaaggcaactggctcctggaccatccactgcaccagcagcaacaccaactgccccagcctctgctaacaggacgatgaattttgtcagtgctggagtagaggcgcaggcagacagcagcaggcaacaggctggtaacaacgaggacattgagctgcccgacgagagtgacgacgaggaacccgatgtccaaattgcggagaagagtgttcctgctgcggtatttggtgagctcggcaagagagctgccgagaagaacgaggaaagctcaggtgcccaaggaaatgagcagctgggcgccctcgagaggataaagagacgacgccaatagtaagccgttgctaagattgtgcagccgtggtatcagcacgagctttatttaacgatgttgtacttgttacgtgtaaacaatttctttgtacaaacattgaagggagttgatcggcgtggccatttctgtgtagtcttgggtttgtttcttctccctcgaaagaacatgacaccaaaacatcatttctttggttcgtttctagattttattcgtccaaagcattagacgtgaagaaagccatcaatatcatgaaaggacaggcaacgtccgaaatcatgaaaggacaggcaacatgcgtagtca

SEQ ID NO: 203941 - DNA, 2976 bp, Zea Mays
ttttttgttgcattagatcagcaatctaatttcacactaatcggccacaacaagagattcttctcgacaatcacatgcaaagaagagctcaggatctgatacttcttcagataagtctgatactgagcatgtgaagtaccttgaagtgcttgagagtttaccagataagaaaggagcagcatctgaagctagctgtgctgttcgagaagcagacaccaacaagatcgaagctaggtcagaagagagatttgcacccaacagaatggtggcggctgcacatagccaatctggattcagtttcgatgataaccatgctacttgtgcacccaactgcaccatgaaacttgaacctgcacttagagatgacagcagggaagttaaggaggcaaaataccgccgcattcgtcttgaagagaaaggagaagcaaagcagccagcgagggcaagtgacagatcaccaaggcctgtggttagcaacatcccttctaatgcttaccctttagaagggccatctgagtgtcataaaaaaccaggattcatatatgctagcggtgagaagggacatctgagtgacaagaatttagatgttcctagcaccagagccggtggccttgagaaagaccgtactgagcttctgcggatgctcgatgagttgagggaccaggtacagagatcctacgagattgctgacaagtcaagtgtgaatgcttcaacaaatagaatggtggatcctgcaagctcctacaatcctcatgagcgtctgagtcgattgcggtatggttcacctcagttgcagcgtaatggttctcagtgctcaccttctttgaatggacaggcacctgttgttcctcctgcttatccttcagtatctgtacagcaagatctccatggatacggacaatctgttgcacatatgggagctcctatttacccagccgccccttatccatggagaaacttcgataactatttccatggacagtatgatcctgaccctctgatctcttatcaccatgacggcttctaccatcagcctgcttgctcttgcttacattgttaccatcgtgaattattacctgttcatggggctccactgggtttcaaccatcgcagggcaccatatcttatgaacaaccctgtagaaggcccggtggtgtttggtgcacagaactacaatccaagaggtattaatggtctgatgcgacacaatcatctgagggacaccctgagtaaaaaacctgcacagacttgtgaaccaattgccaatggtgccccttttaccatatgctacaattgctatgaagtactgcatcttcccaagaattctctcatgctgggaaaagatgagtacaagctgcgctgtgggtcatgttcacatgcaattgtggtcagacttgatggaaacaggcttgatgtttcagcacctacaccagtttcacacttatcacctggaagtaaaaattactccaacaatggccaaggaagcaatggacaaaatgctgacgagagacttcttccatcttatagcttttctgcaggcagtcatttctctcaagaaaaagatttaccatcgaattccagtgaagcagacaaaatgcaatgcatatcatcttccgccagcatttctgaggatgataatagccgagctagttctaactcacagaagaactctggatctagagaccttcctcctgatgctgaagtggttatacgtgttccaagtttgcctcttcgtgatcattttggatattctccatcagagatggtggttgatgggtcaggcaaaggaagcagaagcacccggtctgaacatgagaagggtgtgttaactgaaagttttaagccaaacaaagtgaaagatgtacctgtagcaagcgtgctagacccatcagatgatgagtttgatgatcctgagtacaatcaagatccaggtgacggagcacaatgcgtcgatcacccaagggccacaaaatcgggcgactcctttttctccagcctgataaaaaagagctttaaaattaacggtgggatgggcaatggcagagcaaaggtgttcatcaatggctatcccatttctgatcgtgctgtgaggaaggcggagaagattgctggaccaatctatccgggtgaatactggtatgactaccgtgctggattctggggtgtcataggacagccctgccttggcatgatacccccatacattgcagaatttaactatcctatgcctaagaactgtgctggcggaaatactggtgtgttcatcaacagccgagaacttcaccagaaggacttggatttacttgtgggtcgagggcttcctgattctcctgatagatcatacagagttgagatttctggtaaagtatccgacgaagtatccggtgaagagctttattgccttggtaaactcgcaccaacggtggagaagatgaagcgtgggttcgggatgcgagtcccaaggaccattcagtgaaattggttcacatcgagaagcagaggctctgagatctgtgtgctgccacgcctttgtgctagagattgctaatgtcaccccgccttgaatcgttgcatctgtcgtagtggctgttttgatcgagtgtgtcatggtgtgaccatgtaattttgtctgtggattgttcaagctttctcaacgcacaagtttctgttgtgtagtctacgaactttactgctagtgcgtctgaacttgggcttggggaagtgcgagctgccaaaaaaaagttattgcattaacggctcaagcacggattcttttctttatcttgtgccgaagcccagcccaggcacctccgtccagggtatattttaggcctatttgttttggcttgtagtcgtgagaatcggcttctggtgtccaactctttgtttctcggtctatttctatcggcttctgttgtccaaacactttgtttctcagccttattctgtgataatcatttatacaaaaattgcgat

SEQ ID NO: 203942 - DNA, 2688 bp, Zea Mays
gccccacggccggcgccgcacgcccaggcgccgctccacttgtggtggccaaaggtggattttcaggagtgtttccagattctagccaaggcgcctattctttcgcgatgatcaccagcgcaccggacacggccatgtggtgcgacgtccaactaacaaaggatggtgttggagtctgccttcgggatataaatatgaaaaactgcaccagtgttgatcaagcctaccccgagagaaagcggacctatgtcatcgatggtgtgcggaaaactggatggtttgtttcagacttcaccattgctgagcttcagtctgtttctctaacacaagcaatttggcctcgcactaggagattcgatggcatctatcctatcatcagtattactgactttcggtcccttgtcatgccatctcctgtttggttgaatgtacagcatgacatcttctacaaacaacatggtttggacatgaggaactacatactttcgatcaaaaagggtgtatccatggattatatctcatcacctgaactgggcttcctcaaaaatatgtctggaagagttggtcgcaaaacaaagcttgtgtttagatttcttgaaaaggccctcttagatcattctataaatcaaacatatggttcactgtcgagtaacctaccatttattaaatctattgcatctggcataatagtccctaagagttacatttggccggtgacgaaggataactatctactgccatccacatcaattgtcacagaagcccacaatgcagggctggaaatatatgcctctgattttgccaatgatagaattatcccctataactacagctatgatccgttggcagaatacctgaactttatcaatgatggtggcttctctgttgatggtgtattgtcagaacacccaattactgcatcagaggcaattggttgttttactaaactgaattcaaataagactgatcatggagaacccttagttatctcacataatggtgctagtggagactacccggactgtacagacttggcctaccatagtgcaattgatgatggtgcagacatcattgactgtcctattcaagtgacaaatgatggagttcttatgtgcatgagttccactaacctgcttgacactacgaatgttcagagaacaacttacaactctctggtttctgtcgttccagatattcagcctcaaccaggaatcttcacattcaacctcacttggtccgacattaacagtaatgttttaaaacctaaaatatcttctccagtgagtggttatttccttgtaaggaacccaagatacacaaatcaagggaagtttttgaagttatctgactttctagcaatcgcaatggataaagacttgtctggtgtcatgatcattattgagaatgctgcatttttagtaaattcattgggaattgacattgttgattctttaaccactgccttaagtgctgctggcttcgataatcatcctaccaaggaagttctgatcaagtcaaaagatagtgatgttcttgtcaaactgaagcagcagaaaacaaaatgcaagcttgtttacactctaccctctggcatcggggatgcttctaattcctcgttgaaagacattaagaagtttgctgaatatgtagctgtggacagcaaatctgtttttactctaagctctgacttcatcataagacagaacagtcttgtgcaagatctgcagtcagcggggctagctttgtatgcagaggtgttccagaatgagtttgtagcacaaccattggatttcttcggagatgaaactgtggaaatcaattactatattcaatcatttaatttatcaggcatcataactgatttcccgaagacagtcagaagatataaaagaaacacctgtacagttctgggaaaggatatgcccagctacatgcagcctcctcaggctggttcccttgcacagtttctacaaaccttcaaaacccagcctccatctctgccaccaatgtcgacgctgaattcttcaagcgtggaggagccacctcttcctactgttgcgttaagaagtgtatctgatggtagtgcctcgggggcgaccaagactcctggcacaccttctgatgctccaacggctacagtaaatgctggcatgctacttgtgatggttttcacagctttgctaatctgagaagccacatgagattgtatagtagacgactgaagctaatctgatctcccttggattcaggtcaagaacaggtaccacaggatgaggcgcttggaggatgctgcgatgtgttcatgagaggtctaggccgtcgtctcccagtcaactgtgggttgctggaccgttgtctccttataatataattatttattttgtatagaactcctattatatagtaaagttgtgacattcgatcatgtgccatgatttatcatatgtgtcagacttgctcccagcatacctggtgattatgttcgcgcccaggtcttggtgccccaaaacccgtgtgtgacataagaacactagacggagtagttacggttgttttaaggacctattgacttttgactcatcttatgcttgatgctgcttcaaaaacttgtcatttaaactgcttattttctatattcttgtctctgttgatttccttgctcaaagtttatgttatgcaaaatgcttt

SEQ ID NO: 203943 - DNA, 3701 bp, Zea Mays
ggagcatgtcgttttcgtttcagtgctgctgcctgcaagccagcaattgcttctccttcctctccctccctctctcttcccgaccgtttgcgccaccggaaggtcctggaagctggaacattgtgagatgaggagcaatagacgacgccttggaggaagaggaggaggatggggtggccagggcggtggtgtaagtgtggccgcttccttcgccgcgctgttgggctgtgtcgtggccctcgtcggcggcgccgccgggcagggcccccggcccccctccgactacaaaaccctcagcggcgccgctccacttgtggtggccaaaggtggattttcaggagtgtttccagattctagccaaggcgcctattctttcgcgatgatcaccagcgcaccggacacggccatgtggtgcgacgtccaactaacaaaggatggtgttggagtctgccttcgggatataaatatgaaaaactgcaccagtgttgatcaagcctaccccgagagaaagcggacctatgtcatcgatggtgtgcggaaaactggatggtttgtttcagacttcaccattgctgagcttcagtctgtttctctaacacaagcaatttggcctcgcactaggagattcgatggcatctatcctatcatcagtattactgactttcggtcccttgtcatgccatctcctgtttggttgaatgtacagcatgacatcttctacaaacaacatggtttggacatgaggaactacatactttcgatcaaaaagggtgtatccatggattatatctcatcacctgaactgggcttcctcaaaaatatgtctggaagagttggtcgcaaaacaaagcttgtgtttagatttcttgaaaaggccctcttagatcattctataaatcaaacatatggttcactgtcgagtaacctaccatttattaaatctattgcatctggcataatagtccctaagagttacatttggccggtgacgaaggataactatctactgccatccacatcaattgtcacagaagcccacaatgcagggctggaaatatatgcctctgattttgccaatgatagaattatcccctataactacagctatgatccgttggcagaatacctgaactttatcaatgatggtggcttctctgttgatggtgtattgtcagaacacccaattactgcatcagaggcaattggttgttttactaaactgaattcaaataagactgatcatggagaacccttagttatctcacataatggtgctagtggagactacccggactgtacagacttggcctaccatagtgcaattgatgatggtgcagacatcattgactgtcctattcaagtgacaaatgatggagttcttatgtgcatgagttccactaacctgcttgacactacgaatgttcagagaacaacttacaactctctggtttctgtcgttccagatattcagcctcaaccaggaatcttcacattcaacctcacttggtccgacattaacagtaatgttttaaaacctaaaatatcttctccagtgagtggttatttccttgtaaggaacccaagatacacaaatcaagggaagtttttgaagttatctgactttctagcaatcgcaatggataaagacttgtctggtgtcatgatcattattgaggtgatactttcgctcaaacattgtattaaaaagaagacattctcacataggtcgagaaaacctccaaactcctgctccacttatacacagcggcatcattgcccatgtaaggacgaccgcaaccggggccggaccttagaccttagacttgtactttgacgtgggacagacgagggaacgatcacgaccgggagggccttagacctataatttggcatgagatagacgagtgaattttttaaccacaaaatttgctctcaaggggagtcgaactcaagacccgaggagtgatattcagaccgactaaccaactcagctagaggccctttcgcttcaaagaattggactttccacctgatttttgtctccctattatgactttatgatacctgcccattttgttcaaaaaagtatgactatgttacaagcaaaagttcacatgatagttaaccacttaacctctcaatatgttgatacataatctacatatctcttttttgaaagagctcatcatctggtttcatttttacattgacaagttatataatttgctgaacggttgtcatcttgatgagttctgctacagctactagtatagactattgcttgtataaacctctgcaaagattgtattctccccttgcacatttccaaatattccactcttttttctagaagtcaaatgttatcttaataaatggaaatctttcttaaatgatcaatcgatcttttgtactacagaatgctgcatttttagtaaattcattgggaattgacattgttgattctttaaccactgccttaagtgctgctggcttcgataatcatcctaccaaggaagttctgatcaagtcaaaagatagtgatgttcttgtcaaactgaagcagcagaaaacaaaatgcaagcttgtttacactctaccctctggcatcggggatgcttctaattcctcgttgaaagacattaagaagtttgctgaatatgtagctgtggacagcaaatctgtttttactctaagctctgacttcatcataagacagaacagtcttgtgcaagatctgcagtcagcggggctagctttgtatgcagaggtgttccagaatgagtttgtagcacaaccattggatttcttcggagatgaaactgtggaaatcaattactatattcaatcatttaatttatcaggcatcataactgatttcccgaagacagtcagaagatataaaagaaacacctgtacagttctgggaaaggatatgcccagctacatgcagcctcctcaggctggttcccttgcacagtttctacaaaccttcaaaacccagcctccatctctgccaccaatgtcgacgctgaattcttcaagcgtggaggagccacctcttcctactgttgcgttaagaagtgtatctgatggtagtgcctcgggggcgaccaagactcctggcacaccttctgatgctccaacggctacagtaaatgctggcatgctacttgtgatggttttcacagctttgctaatctgagaagccacatgagattgtatagtagacgactgaagctaatctgatctcccttggattcaggtcaagaacaggtaccacaggatgaggcgcttggaggatgctgcgatgtgttcatgagaggtctaggccgtcgtctcccagtcaactgtgggttgctggaccgttgtctccttataatataattatttattttgtatagaactcctattatatagtaaagttgtgacattcgatcatgtgccatgatttatcatatgtgtcagacttgctcccagcatacctggtgattatgttcgcgcccaggtcttggtgccccaaaacccgtgtgtgacataagaacactagacggagtagttacggttgttttaaggacctattgacttttgactcatcttatgcttgatgctgcttcaaaaacttgtcatttaaactgcttattttctatattcttgtctctgttgatttccttgctcaaagtttatgttatgcaaaatgcttt

SEQ ID NO: 203944 - DNA, 2929 bp, Zea Mays
gttttcgtttcagtgctgctgcctgcaagccagcaattgcttctccttcctctccctccctctctcttcccgaccgtttgcgccaccggaaggtcctggaagctggaacattgtgagatgaggagcaatagacgacgccttggaggaagaggaggaggatggggtggccagggcggtggtgtaagtgtggccgcttccttcgccgcgctgttgggctgtgtcgtggccctcgtcggcggcgccgccgggcagggcccccggcccccctccgactacaaaaccctcagcggcgccgctccacttgtggtggccaaaggtggattttcaggagtgtttccagattctagccaaggcgcctattctttcgcgatgatcaccagcgcaccggacacggccatgtggtgcgacgtccaactaacaaaggatggtgttggagtctgccttcgggatataaatatgaaaaactgcaccagtgttgatcaagcctaccccgagagaaagcggacctatgtcatcgatggtgtgcggaaaactggatggtttgtttcagacttcaccattgctgagcttcagtctgtttctctaacacaagcaatttggcctcgcactaggagattcgatggcatctatcctatcatcagtattactgactttcggtcccttgtcatgccatctcctgtttggttgaatgtacaggttgttttactaaactgaattcaaataagactgatcatggagaacccttagttatctcacataatggtgctagtggagactacccggactgtacagacttggcctaccatagtgcaattgatgatggtgcagacatcattgactgtcctattcaagtgacaaatgatggagttcttatgtgcatgagttccactaacctgcttgacactacgaatgttcagagaacaacttacaactctctggtttctgtcgttccagatattcagcctcaaccaggaatcttcacattcaacctcacttggtccgacattaacagtaatgttttaaaacctaaaatatcttctccagtgagtggttatttccttgtaaggaacccaagatacacaaatcaagggaagtttttgaagttatctgactttctagcaatcgcaatggataaagacttgtctggtgtcatgatcattattgaggtgatactttcgctcaaacattgtattaaaaagaagacattctcacataggtcgagaaaacctccaaactcctgctccacttatacacagcggcatcattgcccatgtaaggacgaccgcaaccggggccggaccttagaccttagacttgtactttgacgtgggacagacgagggaacgatcacgaccgggagggccttagacctataatttggcatgagatagacgagtgaattttttaaccacaaaatttgctctcaaggggagtcgaactcaagacccgaggagtgatattcagaccgactaaccaactcagctagaggccctttcgcttcaaagaattggactttccacctgatttttgtctccctattatgactttatgatacctgcccattttgttcaaaaaagtatgactatgttacaagcaaaagttcacatgatagttaaccacttaacctctcaatatgttgatacataatctacatatctcttttttgaaagagctcatcatctggtttcatttttacattgacaagttatataatttgctgaacggttgtcatcttgatgagttctgctacagctactagtatagactattgcttgtataaacctctgcaaagattgtattctccccttgcacatttccaaatattccactcttttttctagaagtcaaatgttatcttaataaatggaaatctttcttaaatgatcaatcgatcttttgtactacagaatgctgcatttttagtaaattcattgggaattgacattgttgattctttaaccactgccttaagtgctgctggcttcgataatcatcctaccaaggaagttctgatcaagtcaaaagatagtgatgttcttgtcaaactgaagcagcagaaaacaaaatgcaagcttgtttacactctaccctctggcatcggggatgcttctaattcctcgttgaaagacattaagaagtttgctgaatatgtagctgtggacagcaaatctgtttttactctaagctctgacttcatcataagacagaacagtcttgtgcaagatctgcagtcagcggggctagctttgtatgcagaggtgttccagaatgagtttgtagcacaaccattggatttcttcggagatgaaactgtggaaatcaattactatattcaatcatttaatttatcaggcatcataactgatttcccgaagacagtcagaagatataaaagaaacacctgtacagttctgggaaaggatatgcccagctacatgcagcctcctcaggctggttcccttgcacagtttctacaaaccttcaaaacccagcctccatctctgccaccaatgtcgacgctgaattcttcaagcgtggaggagccacctcttcctactgttgcgttaagaagtgtatctgatggtagtgcctcgggggcgaccaagactcctggcacaccttctgatgctccaacggctacagtaaatgctggcatgctacttgtgatggttttcacagctttgctaatctgagaagccacatgagattgtatagtagacgactgaagctaatctgatctcccttggattcaggtaagctttgactagtgatctggtactaccacacacttgttttcttatttccacctttacaaatttgtcagtagaaaatgttagagtatccatttagggtttggggtttaccccgtgtaattacccgcttacccctgtgtaataggccagaccgagctaacttagtctattaatac

SEQ ID NO: 203945 - DNA, 1809 bp, Zea Mays
ccagctttccctatgcgtgtcgagtcgtcgtttactcctctgcttatagcggcgcatgcttctgcgtaagagcaactccaacagtctctctaaactgatcagaatcggtaaaaaatagaaaagtctagataaaatcgcatccaacaggctcgctttctgcctatcttttctatccggctagttatccacgtcccttcgctaggcatctttggctagtgcatacgactcgtcattttccttcatagcgcccaaatgctctcccgccgtcgaggcaaattccagctcttgctcgtcctctgactcccgcgtgccctctcgctcccgtacgaccagaagtttgtgttgggtgtcagctctattcacaacgagctcgttcaaggagttaacacaatgttgtgttgggaacaaacgacgaagcaaagaatcaagcgccaccaaaaaataaacgacctgttcggccactctgctgggaacgaacgacgaaggaatcaagcgcaaacacaaaaatgaatgaccggcagagagaaacaatcatgcgcttaaaaggcgccgctccacttgtggtggccaaaggtggattttcaggagtgtttccagattctagccaaggcgcctattctttcgcgatgatcaccagcgcaccggacacggccatgtggtgcgacgtccaactaacaaaggatggtgttggagtctgccttcgggatataaatatgaaaaactgcaccagtgttgatcaagcctaccccgagagaaagcggacctatgtcatcgatggtgtgcggaaaactggatggtttgtttcagacttcaccattgctgagcttcagtctgtttctctaacacaagcaatttggcctcgcactaggagattcgatggcatctatcctatcatcagtattactgactttcggtcccttgtcatgccatctcctgtttggttgaatgtacagcatgacatcttctacaaacaacatggtttggacatgaggaactacatactttcgatcaaaaagggtgtatccatggattatatctcatcacctgaactgggcttcctcaaaaatatgtctggaagagttggtcgcaaaacaaagcttgtgtttagatttcttgaaaaggccctcttagatcattctataaatcaaacatatggttcactgtcgagtaacctaccatttattaaatctattgcatctggcataatagtccctaagagttacatttggccggtgacgaaggataactatctactgccatccacatcaattgtcacagaagcccacaatgcagggctggaaatatatgcctctgattttgccaatgatagaattatcccctataactacagctatgatccgttggcagaatacctgaactttatcaatgatggtggcttctctgttgatggtgtattgtcagaacacccaattactgcatcagaggcaattgattttcaagtctactaagtagaaggcacaatattacaaacctccattggaatttatcttctaacgtctcatgttgatattagattgttctgtctcttaatcccccatttagtcttatagtgttcactgtccaatgatgaaatattttattgttgtcgggcttaaaataagcttactgcattttaagatatgtccacggaaacatattgtgatgtttagttgtttttattggaagagagtattcagatacccccatgtatagtgtttagttgtttttattgaaacatatattgtagggtatacaatatatgtaagcatgtctagggttccccctaaccctaagaggctataatggacc

SEQ ID NO: 203946 - DNA, 3208 bp, Zea Mays
tttcttgctagtttctcatgcttacttgcaggatggaagttctggtgaggtttacaatgtttctatggagcgtgaggaaagacgtctaactgagcttggtcagaagatactagagacatttgtgctatctcatatatttagttgcgtaccaagaagctgttgcattgaaaaggcaagaggagcttattcgtgaggaggaggaggaggctgggcttcttgaacatcagatgaaggggaagcgtggtggtggtgtaaatgaaaaggacaagcgtgccaagaaaaagcagaccaagcaaaagaagaaccgtaaggctaaagacaaggaaagagatgagaaatgcgaggttaaaattctggaaaggcttcgtgatgaaactgccattgataatagtgatggcttaccatctcaggtggaagtgatagcaaagattgatgccttggaagaaggttcttcagatgggtcagacatgtcaaatagagggaaaaatcagcgtaacaagggcttaagcattattagctttgccgaggaaggtgatggtcttccctccacctctaatgtcactggtggtttaggccgcaatagttctggctgctgcacagctccaaaactggatcaggatactgttctacttaccttgagagatagacttcgtaagttggggcagcgtctgcatgagaaaaacattgaggggcagaaacttctcaaaaaacattttgaagctagggacgcaaaagcgaaggaagaaccttctgactcatctaattctttggataagccacctgatgttccagagatcccggtgcattcatcagaagataccgttgatcttaaagtgaatggaacaccaaagaaggatgcatctgtggtcaaccctgttctggaggattctgtttcaggcataccagtcactgcaaacaatgaacctgtgccttctcccaccacaacaaaaatggacccagtttcaaacaaagttaatggatcaagtttgaaaatgaaagtcaccatggcatctccttgctccaaatcacatccagctgatatggataaagatgcctctcttccttctaaatcaccacgaaccaatagagctgctccagttcctcctaagctgccttcagctgataaagcaacgctagttccctcaaagctaccttcggttgataaagctactccagttcctcaaaaatctccgttggtaaacaaagtagctcaggcccgtcccaaatctccagcagttgacaaagcaactccacatcgtcccaaatctccagcagttgacaaagcaactccagttcgttctcaatctccagcagttgacaaagccactctagttcgccctcaatctccagcagttgacaaagcaactccagttcgtcctcaatccgcagcagttgacaaagcaactccagttcgcccaaaatctccagccattgataaagcaactccaattgctcccaaatctccaccagttgataaagcctctccagctctgccaaaatcattatcaggtgctaaagatgcgctttttccttctaggtcgctgcagattgataagtttactccagccgccccaaggttatcacaagatgataaggctgctctgccttcttcagaacagtcacatatatctccagctactagttctgaagctcaaggggcaactactaggaaggtcacaactaccacctcactttcagaggctgctgcagcatggaggccttcaagtgctcctgtgttacccacaccaagatcaaccgggccagctgcttcacatattcaaacttccacattgctttcccgctcgatgagtgaagcagctgggagaaggccagtaaatgatccttcattttctgccccatcttatactccacagacctaccggaatgcaataattggtaagtctggtctgtctatgacctccgcaagccttgcgtatcagccgtcttctctggatcaagacactgctccttcacggcctctatcagcatatgcatcaagtacagtcatgatgcctcctgcaggaagatctgatcagtcatcagctaggcatggattcaagtctgggcctggtaagttagaagcacatgacggctggcagcagtggaaaggtgacagtaatgttgatatgcatctctggagggaccacgctccttaccaacaaatgaccaacagtcaagcatatgagcagtctcggagggacgatacttatcagcaagcatgcagcagaggaacagaaaagttcagcaggcatgcaggactgcaagctaggcagcagttccaaaccgagacacccgccagtcatgtatggcatcaaccgcaggggccagtggcagaagaatttccacaccttgacatcataaacgacttgcttgaggaggaccagatcaacggcagtataccggagtcgtttcgtcaagactacaacgtgtttggcctgccgttttcaccgagaggaaacttgtcagacatggaaatggcttctgttagaagtcccgctcggttcaattcacccaagtacgatggtggattgtcgggggcttatgacatgaatgctgtcaatgggttgagggaacggcagtttccctcgttggatatctactctaatggcctgtctgacgtgagtgcttctaagccttggctgaatggctctgccagtccatcggtgagccttggggtcaacacaaatggataccacccccaggtgggtgagtacctgggaggtggggtgaacggggtctccttgtggcgccgccatgccaacggccgctggtaatgcgaggtgcctgtatacaatcatacagtcggaataatgttttgttgtaacagatggtttcgggcctgagctgatgcgccatgtaattaaaagtttttaagttttaaaagggaaagaaagagatacaccctgtaaagtctgcgcctttattaggataatttgagtgcttttctggttgaagttgaactctgacctaactttgttaaatttcaaagctaaatttggcggtggcctgtgggagagagaagaacggtatgaaggttagcctgtccgacgagtgctgacggagcaacctacctaatcgcctacactttgtgcttctgctaaacatgttagtaccctgtccaaaaaatatgtacttactagtttgcaaaagaatgacgttttggaagatctgagtcgactgagtgaaggatcgaaatctgtaatcacaa

SEQ ID NO: 203947 - DNA, 4104 bp, Zea Mays
acaggccccaagccttcagaattgtttggacgttacacttggaggattgaaaacttctcgaaggagaagaaaagagaaatgaaaagtgagccatttgaagctggtggttacaaatggtatattcttgtatatcctcaaggatgtgatgtctctaatcatctttcattattcctttgcgttgctaatcatgacaaacttctcccaggatggagtcattttgcacagttcactatagctgtagccaatatagatcctaaaaagatgaagtactcagatactttgcataggttctggaagaaggagcatgattggggatggaaaaaatttatggagctatcaaagattcaggatggttttcttgttgatgatgttcttgaaatcatagctcaagttcaggttatcagggagaaagtggatagaccttttcgttgccttgatcgtccttaccggagagaattgatccgcatctatatgacaaatgtggaacaaatataccgacgttttattgaggagcgaagaagtaaattaagcaagctcattgaggacaaaataaaatggtccagttttcgtgctttctggtcagcaattgacccaaacaccaggcatcgcatgtccagggaaaagactgacaccatattgaaaatgttagtgaagcaattctttgtagagaaagaagttacttccacattagtgatggactccttgtatacgagtctgaaggcacttgaataccagatgaagggcaggaaaggcaaaacaaaattagcagatttggaagaactacctgcgcctatggtccatgttgacatggacatgtttattttggctgatgatgtcatagctttgcttgagagagctgccttagaacccttgccttgtcaacctttagcccccaaggatgataaaacttcccaaccccgcatgaaggatggaagttctggtgaggtttacaatgtttctatggagcgtgaggaaagacgtctaactgagcttggtcagaagatactagagacatttgtgctatctcatatatttagttgcgtaccaagaagctgttgcattgaaaaggcaagaggagcttattcgtgaggaggaggaggaggctgggcttcttgaacatcagatgaaggggaagcgtggtggtggtgtaaatgaaaaggacaagcgtgccaagaaaaagcagaccaagcaaaagaagaaccgtaaggctaaagacaaggaaagagatgagaaatgcgaggttaaaattctggaaaggcttcgtgatgaaactgccattgataatagtgatggcttaccatctcaggtggaagtgatagcaaagattgatgccttggaagaaggttcttcagatgggtcagacatgtcaaatagagggaaaaatcagcgtaacaagggcttaagcattattagctttgccgaggaaggtgatggtcttccctccacctctaatgtcactggtggtttaggccgcaatagttctggctgctgcacagctccaaaactggatcaggatactgttctacttaccttgagagatagacttcgtaagttggggcagcgtctgcatgagaaaaacattgaggggcagaaacttctcaaaaaacattttgaagctagggacgcaaaagcgaaggaagaaccttctgactcatctaattctttggataagccacctgatgttccagagatcccggtgcattcatcagaagataccgttgatcttaaagtgaatggaacaccaaagaaggatgcatctgtggtcaaccctgttctggaggattctgtttcaggcataccagtcactgcaaacaatgaacctgtgccttctcccaccacaacaaaaatggacccagtttcaaacaaagttaatggatcaagtttgaaaatgaaagtcaccatggcatctccttgctccaaatcacatccagctgatatggataaagatgcctctcttccttctaaatcaccacgaaccaatagagctgctccagttcctcctaagctgccttcagctgataaagcaacgctagttccctcaaagctaccttcggttgataaagctactccagttcctcaaaaatctccgttggtaaacaaagtagctcaggcccgtcccaaatctccagcagttgacaaagcaactccacatcgtcccaaatctccagcagttgacaaagcaactccagttcgttctcaatctccagcagttgacaaagccactctagttcgccctcaatctccagcagttgacaaagcaactccagttcgtcctcaatccgcagcagttgacaaagcaactccagttcgcccaaaatctccagccattgataaagcaactccaattgctcccaaatctccaccagttgataaagcctctccagctctgccaaaatcattatcaggtgctaaagatgcgctttttccttctaggtcgctgcagattgataagtttactccagccgccccaaggttatcacaagatgataaggctgctctgccttcttcagaacagtcacatatatctccagctactagttctgaagctcaaggggcaactactaggaaggtcacaactaccacctcactttcagaggctgctgcagcatggaggccttcaagtgctcctgtgttacccacaccaagatcaaccgggccagctgcttcacatattcaaacttccacattgctttcccgctcgatgagtgaagcagctgggagaaggccagtaaatgatccttcattttctgccccatcttatactccacagacctaccggaatgcaataattggtaagtctggtctgtctatgacctccgcaagccttgcgtatcagccgtcttctctggatcaagacactgctccttcacggcctctatcagcatatgcatcaagtacagtcatgatgcctcctgcaggaagatctgatcagtcatcagctaggcatggattcaagtctgggcctggtaagttagaagcacatgacggctggcagcagtggaaaggtgacagtaatgttgatatgcatctctggagggaccacgctccttaccaacaaatgaccaacagtcaagcatatgagcagtctcggagggacgatacttatcagcaagcatgcagcagaggaacagaaaagttcagcaggcatgcaggactgcaagctaggcagcagttccaaaccgagacacccgccagtcatgtatggcatcaaccgcaggggccagtggcagaagaatttccacaccttgacatcataaacgacttgcttgaggaggaccagatcaacggcagtataccggagtcgtttcgtcaagactacaacgtgtttggcctgccgttttcaccgagaggaaacttgtcagacatggaaatggcttctgttagaagtcccgctcggttcaattcacccaagtacgatggtggattgtcgggggcttatgacatgaatgctgtcaatgggttgagggaacggcagtttccctcgttggatatctactctaatggcctgtctgacgtgagtgcttctaagccttggctgaatggctctgccagtccatcggtgagccttggggtcaacacaaatggataccacccccaggtgggtgagtacctgggaggtggggtgaacggggtctccttgtggcgccgccatgccaacggccgctggtaatgcgaggtgcctgtatacaatcatacagtcggaataatgttttgttgtaacagatggtttcgggcctgagctgatgcgccatgtaattaaaagtttttaagttttaaaagggaaagaaagagatacaccctgtaaagtctgcgcctttattaggataatttgagtgcttttctggttgaagttgaactctgacctaactttgttaaatttcaaagctaaatttggcggtggcctgtgggagagagaagaacggtatgaaggttagcctgtccgacgagtgctgacggagcaacctacctaatcgcctacactttgtgcttctgctaaacatgttagtaccctgtccaaaaaatatgtacttactagtttgcaaaagaatgacgttttggaagatctgagtcgactgagtgaaggatcgaaatctgtaatcacaa

SEQ ID NO: 203948 - DNA, 4165 bp, Zea Mays
ctaaagttttgttttgtgctatccatagctcatttggttgaattatcttaacaggccccaagccttcagaattgtttggacgttacacttggaggattgaaaacttctcgaaggagaagaaaagagaaatgaaaagtgagccatttgaagctggtggttacaaatggtatattcttgtatatcctcaaggatgtgatgtctctaatcatctttcattattcctttgcgttgctaatcatgacaaacttctcccaggatggagtcattttgcacagttcactatagctgtagccaatatagatcctaaaaagatgaagtactcagatactttgcataggttctggaagaaggagcatgattggggatggaaaaaatttatggagctatcaaagattcaggatggttttcttgttgatgatgttcttgaaatcatagctcaagttcaggttatcagggagaaagtggatagaccttttcgttgccttgatcgtccttaccggagagaattgatccgcatctatatgacaaatgtggaacaaatataccgacgttttattgaggagcgaagaagtaaattaagcaagctcattgaggacaaaataaaatggtccagttttcgtgctttctggtcagcaattgacccaaacaccaggcatcgcatgtccagggaaaagactgacaccatattgaaaatgttagtgaagcaattctttgtagagaaagaagttacttccacattagtgatggactccttgtatacgagtctgaaggcacttgaataccagatgaagggcaggaaaggcaaaacaaaattagcagatttggaagaactacctgcgcctatggtccatgttgacatggacatgtttattttggctgatgatgtcatagctttgcttgagagagctgccttagaacccttgccttgtcaacctttagcccccaaggatgataaaacttcccaaccccgcatgaaggatggaagttctggtgaggtttacaatgtttctatggagcgtgaggaaagacgtctaactgagcttggtcagaagatactagagacatttgtgctatctcatatatttagtggaattgaagttgcgtaccaagaagctgttgcattgaaaaggcaagaggagcttattcgtgaggaggaggaggaggctgggcttcttgaacatcagatgaaggggaagcgtggtggtggtgtaaatgaaaaggacaagcgtgccaagaaaaagcagaccaagcaaaagaagaaccgtaaggctaaagacaaggaaagagatgagaaatgcgaggttaaaattctggaaaggcttcgtgatgaaactgccattgataatagtgatggcttaccatctcaggtggaagtgatagcaaagattgatgccttggaagaaggttcttcagatgggtcagacatgtcaaatagagggaaaaatcagcgtaacaagggcttaagcattattagctttgccgaggaaggtgatggtcttccctccacctctaatgtcactggtggtttaggccgcaatagttctggctgctgcacagctccaaaactggatcaggatactgttctacttaccttgagagatagacttcgtaagttggggcagcgtctgcatgagaaaaacattgaggggcagaaacttctcaaaaaacattttgaagctagggacgcaaaagcgaaggaagaaccttctgactcatctaattctttggataagccacctgatgttccagagatcccggtgcattcatcagaagataccgttgatcttaaagtgaatggaacaccaaagaaggatgcatctgtggtcaaccctgttctggaggattctgtttcaggcataccagtcactgcaaacaatgaacctgtgccttctcccaccacaacaaaaatggacccagtttcaaacaaagttaatggatcaagtttgaaaatgaaagtcaccatggcatctccttgctccaaatcacatccagctgatatggataaagatgcctctcttccttctaaatcaccacgaaccaatagagctgctccagttcctcctaagctgccttcagctgataaagcaacgctagttccctcaaagctaccttcggttgataaagctactccagttcctcaaaaatctccgttggtaaacaaagtagctcaggcccgtcccaaatctccagcagttgacaaagcaactccacatcgtcccaaatctccagcagttgacaaagcaactccagttcgttctcaatctccagcagttgacaaagccactctagttcgccctcaatctccagcagttgacaaagcaactccagttcgtcctcaatccgcagcagttgacaaagcaactccagttcgcccaaaatctccagccattgataaagcaactccaattgctcccaaatctccaccagttgataaagcctctccagctctgccaaaatcattatcaggtgctaaagatgcgctttttccttctaggtcgctgcagattgataagtttactccagccgccccaaggttatcacaagatgataaggctgctctgccttcttcagaacagtcacatatatctccagctactagttctgaagctcaaggggcaactactaggaaggtcacaactaccacctcactttcagaggctgctgcagcatggaggccttcaagtgctcctgtgttacccacaccaagatcaaccgggccagctgcttcacatattcaaacttccacattgctttcccgctcgatgagtgaagcagctgggagaaggccagtaaatgatccttcattttctgccccatcttatactccacagacctaccggaatgcaataattggtaagtctggtctgtctatgacctccgcaagccttgcgtatcagccgtcttctctggatcaagacactgctccttcacggcctctatcagcatatgcatcaagtacagtcatgatgcctcctgcaggaagatctgatcagtcatcagctaggcatggattcaagtctgggcctggtaagttagaagcacatgacggctggcagcagtggaaaggtgacagtaatgttgatatgcatctctggagggaccacgctccttaccaacaaatgaccaacagtcaagcatatgagcagtctcggagggacgatacttatcagcaagcatgcagcagaggaacagaaaagttcagcaggcatgcaggactgcaagctaggcagcagttccaaaccgagacacccgccagtcatgtatggcatcaaccgcaggggccagtggcagaagaatttccacaccttgacatcataaacgacttgcttgaggaggaccagatcaacggcagtataccggagtcgtttcgtcaagactacaacgtgtttggcctgccgttttcaccgagaggaaacttgtcagacatggaaatggcttctgttagaagtcccgctcggttcaattcacccaagtacgatggtggattgtcgggggcttatgacatgaatgctgtcaatgggttgagggaacggcagtttccctcgttggatatctactctaatggcctgtctgacgtgagtgcttctaagccttggctgaatggctctgccagtccatcggtgagccttggggtcaacacaaatggataccacccccaggtgggtgagtacctgggaggtggggtgaacggggtctccttgtggcgccgccatgccaacggccgctggtaatgcgaggtgcctgtatacaatcatacagtcggaataatgttttgttgtaacagatggtttcgggcctgagctgatgcgccatgtaattaaaagtttttaagttttaaaagggaaagaaagagatacaccctgtaaagtctgcgcctttattaggataatttgagtgcttttctggttgaagttgaactctgacctaactttgttaaatttcaaagctaaatttggcggtggcctgtgggagagagaagaacggtatgaaggttagcctgtccgacgagtgctgacggagcaacctacctaatcgcctacactttgtgcttctgctaaacatgttagtaccctgtccaaaaaatatgtacttactagtttgcaaaagaatgacgttttggaagatctgagtcgactgagtgaaggatcgaaatctgtaatcacaa

SEQ ID NO: 203949 - DNA, 1586 bp, Zea Mays
acagtggaattcgcagtcagtagggagcaccggcactgactcgagctcagctcagaacacaatgtctcagatggagttggtgtccccagcctcctctgcgccgcggcaggaggtcatgatggtgaccactgatgattacagctacaagccaggcctcgccgctgcgcccgctgctgccgccccgccgagctttcagcagcaccacccgctcccgctgcagctgcacggaggagagggagggggagaccatgacaagacggaacggcggctggcgcagaacagagaggctgcgaggaagagcaggctgaggaagaaggcttacgtgcagcagctcgagactagcaggatcaggcttcagcaggtcgagcatgagctccagagagcacggtcacagggcctgttcgttggagggtgcagcgccgccggggacatgagctctggcgccgccatgttcgacatggagtacgcgcggtggcttgacgacgacaccaagcggctggcggagctccgaggcgggctgcaggcgcacctgctggacggcaacctgggactcatcgtggaggagtgcatgcagcactacgacgagctgttccagctcaaggcggcgctcgcgcgctccgacgtcttccacctcctcaccggctcctgggccacccccgccgagcgctgcttcttctggatgggcggcttccgcccgtccgagctgctcaagatcctgataccgcagctggacccgctgacggagcagcagctgctggggatctgcaatctgcagcagtcgtcggagcaagcggaggaagctctcgcccagggcctgcaccagctgcaccagtccctggccgacacagtcgccgcgggcacgctcaacgacggcgccgccgcccccaactacatgaacatcatggccgtcgcacttgagaagctcgccagcctcgaaaatttctatcaacaggccgacaatctaaggcaccagacgttgcatcagatgcgccggatcctgaccactcggcaggctgcgcggtgcttcctctccattggggagtactacagccgcctcagagctctcagcaacctctgggcttcccgtccccgcgacaacttcatcgggacagagagcctcagccccacagcaacggaactgcaagccctgcaccaccagcagcagaaccagttcgccggattttgaggcctcacctggtgagggagggtgtaaaactttggccgcgagggtggtgttacaaagattagaggttttgagagggagatgcattgtaatgttctatcattaaagtactgagaaagcaacatcactaggcgaaaagggcggggagaaggaattgctgtagtgcgatgttgggtggctcacctgttcatatggctcttgaactgattgaagggttagcaccgcagaatttttgtgcgtgtcaggagagaacaaatcagttacacaagattctggctgctcacttgccagagaggactaactgcaattagagtgacagattaaccattaaatacctttccaaatcaagtattttagcaaacacattgtcggtagtagactatctccaaggacaatactggac

SEQ ID NO: 203950 - DNA, 2299 bp, Zea Mays
gtgaccacctctgctttacgcggccttgtcctttcatccactgatccacctcgccgtgcatccatatagcccccgaggggcctttcctctgcacgtagccatatcacaccgcacacagtactcgtcctccttgcagagcttgcaccaacacgccaccttaccttgctttgctcgcactcgcacacagttgcgagcgcattgcttgcattgcgcagccgcaggccgcagcacgaagctagccagtaggcggtagatggcgagcagcgcggggaaccgcttcctgaggcagctgagcgcgagcaacggcgacgaagcggtctgcggcggcctgcagatggaccagcaggagtacggcggcgccggcgtggggaggaggggatcccggcggtggtcgaagaagcgggccgccgccgccgccgccgcgaggggctacggcgccggcagcgggaatggcgtgaagcagccggcctctgccgcggggaagcgggtgatggtggtggtggacgagagctcgggagccaaccacgccatgatgtgggcgctcacccacgtcgccgacaagggggacttcctcacgctgctccacgtcctgccgcgctccggcagcggcaggggcgaggaggcctcctccctcgccaactcgctcggcacgctctgcaaggcctccaggccagaggtggaggtcgaagcgcttgtgatccaagggcccaagctgggcaccgtgctcagccaggtgaagaagctggaggcctccgtgctggtgctcagccagtgcaggccatctccctgctggttaagctggtaaggcactccgcaccccgtaccccttctcctatcttatccgctctgcatttgtctcggaaatgtgaagctctcagaggtcaactatggaccagtaaaattggggtgagggaatctctcatgatgccaatccatagcgtttcgtttaaaaatggaaaacgaagcttagacttcagaactagtaatttacatgtctgcaattccagcagaatattcgactagtatcagatttagcttatcctctcaggtaaacaatcctaaaagcaataggtcaaggctcaggagtgagctgattggcacttatttagttgcgtttgcgtctcaatgtatactttctgtaagataaatcaggtaaaaaatgtaattatgagagggcctactcgcaagtggtggccaaactatttgtaaagaatcctcgctcgccaccgttcagtactagggtccatggctttgggtgaaaataacgcctttaggatgcagctccatgtgcaatccataaatccaagatgccatgcatgtccttctagatacatctctcccaaacaaaagcaagaaccacgcacacagatgccagcgagatacgagtacagtacactttttgctgcaatgtgacatcacatgtggaggggcagctgaacctctctaggttggataggattattagggcaaatgtagtaagtactcttcacatcagtgtctgataaccagccgttgtttgagcaaattccaatgctgtgaccctttctttttgcagcttcctgcggagcagcggcgaggagtttgtggagcagtgcatcaaccaggcggagtgcctgacgctggcggtgaggaagcagagcaagggcgtcggtgggtacctcatcagcacccggtggcagaagaacttctggctcctggcctgacaaccatgcattttacctagctagttactactgctacatgatcacatttgttttaagtcactcccgtatatgtgctgtcatttcgtgtcatcaagtgcgtcacaagaaagaccatctctctctctccttcatcctgttgtaaagcgaaaagagcctccgaatctgaccacctttctacgaacctgtatcttccctgcaagtctttagcgtgcgtgtagtactgtgatctgcactgaacaatcatgtaatgctgcataaatgaccaattctgttgtacggcgcttcttgcttgctgcaattgacacttgaggctgtacagcttgcggattacgctaccggatgaaacctgattgcttaaccacgagggaagagctacgcaaattcaggataacaacatcggcaaggccaaggcgacgtttcggatgccgaaggtcgaaattggaaagcaatcaaggcgactcacactcaagcttgggtgcgagaaggaagtcttgagttatttctagaagtaaaataatgttcaggtcctgctccgccaaaataatgttctggtcctgcagccgtccctataataaatacttcatccgtttcaattt

SEQ ID NO: 203951 - DNA, 2171 bp, Zea Mays
ctcccaccttcctctttaaattgcccctcctattcccccgtcccgaagctagaggctctctggcgccgacggccgacccacacgcgcgtccagcgatttcgccggggggagatcttgccattccgtggagcaccatccgcggtagcctagccgcgactggggatcggggcttgcgggccgtggagccacccagaaggtagccgggaaaagcttgatccggccggggacggggccttcggaggttcgtccctcgatcgggtgtcgtctgcgaaagccgggtcgaacaaatcgtcgcgactggaggcggcgcggggtcatgggggcgtgggtctcggtcctgctcgggatggacggagccgcggcggccgggcctgctgctgtgggcctgggcgacctgccggagctctgcgccgcccaggtgctgctccggctcgacccgccggagatctgcaggctcgcgcaggtcaaccacgcgttccgcggcgccgcgggggctgacttcgtgtgggaagccaagctgccggagaactacaactatctgatggagttcgtggggagcggcgacgaggggaagcggaggcggcggcgggccgggaagaaggagatctacgcgaggctcgccaggcctgtgccttttggcgacggcaagaaggaattctggttggacaagaacaaaggcatgatctgtatggcactgtcgtccaaagcactggtgattactgggattgatgacagaagatactggcaacacatgccaacttcagaatcgaggtgaatatggctttgatatcacatttactaatatttgtctgttcaatttatgccagttttctgaaaacaaagatggtctgttggcattaattgcgatggaatgggctgaagatatttactcatggtgtgattgatctgttccttttctttcttaacttagcacgtcattgattttatattcagctttcgaaagtagtgttactttctccctataatgatttatatggatgaatacctggtctcataattgtaggtatttattttaagatctgcataagcttttttttaccctggaacacaatagatgtgaatgcatacatgttgtcaaatgttaggattgagtaattgagctgattgtctctcttgaacaagagaagtagcttcctgcctcttgcacaagaggcctgcatctgttttgcaatattcatctatagaatgtttagaagtaatccaattcaatatttctagttcaaagtataggtgatatcatattcttggaagtcaaatatctgaccaatagttattgtttcttatcatgcagattccagtctgtagcctaccttcagcaaatctggtggtttgaggtggttggtgaagtcgatttctgcttccctgttggaacatatagcttgtacttcagggtccatcttgggaagttctacagacgatttggccgccgccagtgcacctcagagcatgttcatggttgggacaagaagcctgttcgcttccagctatcgacctctgacgggcagcaggcattgtctcagtgctacctggaggagcccgggagctgggtcctgtaccatgctggcgattttgtggcctcaaagcctgaccagctgatgaagctgaagttctccatggcacagatcgactgcacgcacacaaaaggcgggctgtgcatcgactcggttcttatctatccaaaagggaaggggtttcaccaggagagggtggtcaggtctcagaaatgagggttgtagatgttgtggaggtattcacattaggatgttagagcaaatgcagcttgcagcctgatcttatttttactttgggctctagttcgcagcagaggtgaagtgtatgtggttgtagaactcaggtattgtgtggtcaggtgaccaccagagtgctctgtcagtcctttggcaaggtcgttttcgccccccttcagctgaatttggacagcgagatagccatgaaactgtactgaaatgagttcgaaggtgtcattcccagtttctaatttgctttctactgcttagtttcggatgctccctttttcctatttgtcatgatccggtcttgacttggtcttaacttaatattaagaatcattattatgattataagtatcgtgtgcatttaaagtttaatttagaaactaagaggcggag

SEQ ID NO: 203952 - DNA, 1084 bp, Zea Mays
gtggagctcaattggggcagtattatcttccaattgaaataggtcacttcttttccttttggaaaattgcgttcttctttttggggcagactcaaattagtggcaggaattctggttggacaagaacaaaggcatgatctgtatggcactgtcgtccaaagcactggtgattactgggattgatgacagaagatactggcaacacatgccaacttcagaatcgagattccagtctgtagcctaccttcagcaaatctggtggtttgaggtggttggtgaagtcgatttctgcttccctgttggaacatatagcttgtacttcagggtccatcttgggaagttctacagacgatttggccgccgccagtgcacctcagagcatgttcatggttgggacaagaagcctgttcgcttccagctatcgacctctgacgggcagcaggcattgtctcagtgctacctggaggagcccgggagctgggtcctgtaccatgctggcgattttgtggcctcaaagcctgaccagctgatgaagctgaagttctccatggcacagatcgactgcacgcacacaaaaggcgggctgtgcatcgactcggttcttatctatccaaaagggaaggggtttcaccaggagagggtggtcaggtctcagaaatgagggttgtagatgttgtggaggtattcacattaggatgttagagcaaatgcagcttgcagcctgatcttatttttactttgggctctagttcgcagcagaggtgaagtgtatgtggttgtagaactcaggtattgtgtggtcaggtgaccaccagagtgctctgtcagtcctttggcaaggtcgttttcgccccccttcagctgaatttggacagcgagatagccatgaaactgtactgaaatgagttcgaaggtgtcattcccagtttctaatttgctttctactgcttagtttcggatgctccctttttcctatttgtcatgatccggtcttgacttggtcttaacttaatattaagaatcattattatgattataagtatcgtgtgcatttaaagtttaatttagaaactaagaggcggag

SEQ ID NO: 203953 - DNA, 1029 bp, Zea Mays
aattgcgttcttctttttggggcagactcaaattagtggcaggaattctggttggacaagaacaaaggcatgatctgtatggcactgtcgtccaaagcactgttttctgaaaacaaagatggtctgttggcattaattgcgatggaatgggctgaagatatttactcatgattccagtctgtagcctaccttcagcaaatctggtggtttgaggtggttggtgaagtcgatttctgcttccctgttggaacatatagcttgtacttcagggtccatcttgggaagttctacagacgatttggccgccgccagtgcacctcagagcatgttcatggttgggacaagaagcctgttcgcttccagctatcgacctctgacgggcagcaggcattgtctcagtgctacctggaggagcccgggagctgggtcctgtaccatgctggcgattttgtggcctcaaagcctgaccagctgatgaagctgaagttctccatggcacagatcgactgcacgcacacaaaaggcgggctgtgcatcgactcggttcttatctatccaaaagggaaggggtttcaccaggagagggtggtcaggtctcagaaatgagggttgtagatgttgtggaggtattcacattaggatgttagagcaaatgcagcttgcagcctgatcttatttttactttgggctctagttcgcagcagaggtgaagtgtatgtggttgtagaactcaggtattgtgtggtcaggtgaccaccagagtgctctgtcagtcctttggcaaggtcgttttcgccccccttcagctgaatttggacagcgagatagccatgaaactgtactgaaatgagttcgaaggtgtcattcccagtttctaatttgctttctactgcttagtttcggatgctccctttttcctatttgtcatgatccggtcttgacttggtcttaacttaatattaagaatcattattatgattataagtatcgtgtgcatttaaagtttaatttagaaactaagaggcggag

SEQ ID NO: 203954 - DNA, 5506 bp, Zea Mays
acgtctcgtcagttttttcctttttcccgtggcccgtgggtgtgcgtcctaggtgtgcggcgggcggtgcgccgtgcgcctcctctcctcgccgcgacgctgccgtgttcgcgattcagcgccgtgctcgacgcccctcctctcctcagaagtcagcgccgcatctccggttgcagagacttgcgctgccacatctccgcttttcgtccttcagttgctcgacgcccctcctcccctcagaagtcagcgcagcgtctccactctccacgccggcgcgtcggcgacgcgggtccttcgaataagacggtttgttctcgcatcgggcgtcagccggattcgagggacatagatgatggaagtcgatcttgggtgccaccacgtcgaagcggcttgtgctgtgtagatccggcgaaagcgcgcaggcaaagcccgggtctgcgtcgtcattggcctcatgatcttcgtattgccatcgcgctaaagggaacgaaggcgacgaggtcttaaactttgattgatatatgcggatatgaaaatgcatgcaactacatgctagaagtctgtcttggttgtgttggagaaaaattctttgttacgtttttgttgatagcgttgagtgccaaaaatggagcttctccctgttgaagtcgttggcaacattctttcccatcttggtgttgcgcgtgatgttatgattgcctctgcggtatgccgcaagtggcgagatgcatgcaggaggcatctccgtttgctgtccttcaactccaatgactttccacgggacatgactacacgtcagttggagattgtcatcacacagactatatttcagactatggggctgcaacgcctttcgattcacattgataacacccatgagttctctgcagcaccagtgattgcatggctcatgtataccagggagaccctccgaagcctgtcttacaatgtcaggacaatacccaatgtaagcattcttgaaaagtgtggtaggcaaaagctcgaagtgctagatttggaattggaccataacaccatcacaggtgtcgaaccaagctatcagaggttcacttgtctgaaatccctttccctgaggcatgtcagcattttggccttggatttgagccttttagttgctgcttgcccaagaatagagtcattagcacttgatgtccttgaggttgtcacttcagaattacagtctacgatggagctcacaagccatacattgaaaagtctatttgcaaaatcggtaggtgtagataagatcatacttgatgcagataatttggaagttctgcacctgaatgctttaaatctcgatctgtttgagcttaacgggaaaggaacactaaaacattttaagattgatgatgtcagtgttactcatttggatattggggacaatactgatcatttggaggcagtagacgtgagcaacttcacaatagtctggccaaaattctatagcatgatatccagggcatctaatttgcgtatgctacgattttggggtgttgtgtttgatgacgaggatgagatcgtggattcagaaactatagctgtttcatttcctcttcttaggcatctttcattgagttatgaattacgagatgggttacttcactacagccttcagggatcatcattactggagaatgtctcagttctggaacttggttggacagtaataagtgagcactttggaccctgggtgtttggtatgattggaaggtgtccaaatctcaagaaacttgttattcatggtgttctttctgagacaaaaacgcgagaggatcgccagatgttagcaagctttacctcattcatagtctgtgtcatgaggaagtatgtgcatgttgatgtacaatttgagtatgagtgacagctactaggttgggtgggcatcttgtcattgttcagatgaagctgtgccatcagttgcttgatactgggttcttccacattgatccacatctaggcaatatgatcagaacacctgacggagattatgttgcagaactgtatcaactccctctaattttatgttatattatatttggtaggaatttctactgggtctgaaacttgtaacatacagttttctgaagatctacgaaagatagtggatacttatcagatgagtgcttgcactgcctttcaagtcatccgactaatcgcgattagtcgggctggtcggtttagggtggccgattagggaagccgacccgatcagaacacctggtcgccctggtgttgatgaatttcagttggatgaagatctttaggtcactggtagtgtggtagtaagtgtttctttgctgttttgaacacctgcattactttagggtcattgggagctactgttttaagttggatgaacaaatgtcttttcttaaatgagtattgcagaatcaatgttttcaagtcggacgacttgctggtcgttctggctgaccgactagggcgattagtcggacgacttgggtgattaatcgtgattggtccaaaccgacttggacgattaatcgcgactaatcacgattaatcggacgacttgaaaacattgcataattcatgtcatgtttaccctttatatatagttatctactatgttatatactctatacaaatatggtcttatataccatatatactctatacatatgtcctagatgaacaagacgactagtagacgaccagggtcgaccagaggtcgattagttgacctagtcgtcgactaatcaagattagtcgcctagtcggacccctaggtcgatcagttggtcgctcgactagaaaacatagtgcattgcaaaagttactaatgcttccatccttttggaagctttgatgttgtcattttttattgaaagtggtgaagttggaagaataaatattgttgagggtgttggggtatgttacttttattttatgtatgttgtcagttagctgatcgaagggcgggcctggtgcagcggtagagcctaccgtctgtaaccggaaggtcccaggttcgagccctaatgcatattatatggataaggcttggtgcttaaagatacccttgcacagacctcgcacagtgcgggaagcctgcggcattgagtacaccttttttttgtcagttacctgatcatttgtttcaccctccccacccaagtacacaatgttgtattcatgtgagtggacaggttctaattttaagagcaatttctcgatggccattattcagattggtccactcagatgctggccaggtggattgtgggcctgtttggttcgctacctaacttgccacactttgcctaacttttctgcctaaggttagttcttcaattcgaacaactaaccttaggcaaagtgtggcgcagttagccacgaaccaaacaggccctgtgtctatcaaggtcaataggtgatattgacgtcgaggaatttatagttcctgtcccatatgtgaagcaagtaaatgtgcataacatatatgaactatttatataggtgcagtggtggaaaaggtttttcatgctaaaagattccccttgttatacaaatctgccatttttttgcttgtagcatctgcccgttttttccctgacaaacgtgtcatcaattaatttgtaaaaaaaatgatagattaagcggcgatcggcatgctctgccgtagcaccgactcgacacacgagacagcgtgtgagcagaagaccgaggtgagatttcgtacacactcatcccaaacggtctgaatcagaaggggaatcgctggcgcgtaggctatgaatactgtgagacaaaagagatttgatattttattgctagctgcagatcagagaacctgaagtatattgatttcataggtggttcttgctggatcatgtaaagctccatctcttataatagcttgaacttatacatatttggtacttgttttaaatttataatgcacaaattattgatattcgtatagatgagatgatatgatatgatccatgatgttcttctgctacttcagagctctctttgttctctgtgactgacagcaagagatgaaccaacgtgttttgttgcattgggagcagaggctggagataatcgtaggagttgccaaaggtgttgcttatctgcaaggactaagaaaggaagtgatacacagtgatctaaaaccatccgacatactcttggatgaaaactagagagctaaaattgcagattttggcaccacaaaagtgttcgtggatggccagacgaatccaacacttgtacaatagagtatggctgaaacctgacctcctcgtctgctgtttcaattcaagtacagtagaatcacttggtaacatgcatatataacatcagttagctatgatgtaagcttcctaagaatttgttttttttcatagtagtatttttccccaaactaaactgcaagataaagttgtggtaacaaagtgtaggatttatcctagccacctactctatagtgcacattttttgcttctgttctgttctccatgcgcgccaatccgtcctcaacttactgaactttttttagattaatagcttactaaactgtttatattggcaacaggggacacagggctctagagtacactgtttgagatccagtgtttcaaagtccagccaaaaatgttgaaattcaggttcagttcagaactaagtttcagttctgtctaagccatgatagtgttcaatttagttattaaataattgttgttctttggttacaaacaattgtactttttaattgttgaaacattatacttttggttaattccaaagtattaaataattgtagttgtttgatgaatttggacaatgatgatgatgatttagaatctgatccagagtttgatgaatgatgatgaagagatggtatacaatacaatcagggtaggggcaaaagtttagattgttcgaaagcaaaaaaaaataaaaaaataaaaagaagactggaccaatactagaggagctatgggacattttatcactccaggttttgtaagtacctcagaatctatggaaaaattgagactgtctaattacaagaattgaatatttgaattccagtttgattgatagttgaagtattgacgaatctgcaattgaaatcattagcctttaattgatttgggattttaagtatactgtatagatgctacattctttgtgtcacatatatgtttgctttttttatcaatatattatgacaaaaaaatgctagagtccagataaggcatgcaacgtgcgcccaattttctagtattcttcacaatgaagaggaccaagataacatggaagatgcggatgcatggactcactagtcattagttatttattttcgtgtttaccgtgcaatgttcttaacgtttcagtttgatcatttatctttattttagttaattctcggtgcaatgttaatgggatagtttttgccaatagttgcaaacataatgggtagttttcactgctaagtaccctagtcatg

SEQ ID NO: 203955 - DNA, 3115 bp, Zea Mays
cttagagttggtacgtgaccccaagctcaaggggtctacgatcccggatcattgtattgggacgaaggtcgtgatccaaacaatacacaaagctgctgtcatatcttcctccacgaagctgctggatgtaatggctagtcggccggtggggcacgcgccgcatgccacgaagccgcgggcgagtgtgcacgaccagtgtcatgacggcgacggcagatgcggatggccaacggcatgacaatggcggatgtgcacagcctggagcacggcagcgttgtaaaaagctcacctcagcacggaagcaaatgtttatgctcagggcacctaaggtgctcgtcatacaactcaagaggtttgaggggataaatggtggaaagatcaacaggaatatagaattcaaggaggcacttgatctttctgattgcatgtacaataaaaaccaggttgctcattgatgaaaccacatgttaactgccatcagttgctagtttgtttaagatcattgtttccaattatgtggatcaaacttctttaaggatcgtcacacaggggatgtgattgggactggccgtcgccgtaaatcttcgcctcgcctctacatcttgaacaccttgcgtcttccttcctaccatacctctacacctcatgtgcttgctgcttcgggtcccacgacatcgtttgcccagtggcatcctcgtctaggtcacttatgtggatctcgtctgtccactctaataaagtcaggatgtttaggccctacacatgttgagtctagttttcattgtaaatgttgtcatcttggaaaacaaatacaacttccatattttactagtgaatctcattctgctaaaccttttgatctaattcactctgatgtttggggtccagctccgtttgtttcaaaaggcggtcataaatattatgtcattcttattgatgatcattatcgttatacttggatttactttatgaaacgccgctcggaattgccttctatttataagtccttcactcgcatggttcacacccagttttctgctactattaaaatattctgttccgattctggtggtgaatttttatctgacaatttccgccagctattgaccttagagcgtactctttctcaactttcttgtcctggtgctcatgcctaaaatggtgttgctgaacgcaaacaccgtcatattattgcgagtgctcgtactattttgatatcttcttttgtttcttgacacttttggagtgaagctgtttccactgctgtgtatctcattaatagacaaccatcatctaaactttctggcaaatccccgggtgaagttcctttctgggctccacgatatgatcatcttcgtgtgtttgaatgtatatgttatgtcttgttaccaccacgtgagcagaccaaattgactgctcaatctgtagaatgtgtattccttggatacaatcctgaacacaaaggctatcgttgttatgatccttctactcgtcgtattcgaatttccagagatgtgagtttcaatgaaaatcgctccttctttcacaaccagtctactcacttctcatattatcccatagaatctacttctttcatgtgtcttccttccattccttaatctgcaccatcatcttctacatccacatttgatgttctcattaccataacaccaccttccacctccacatcatcttcttcttactcttccaaaccacctgtcatccaaacctacattcgttgttcccgctctatttctacggctagtcctggtactgatcatgtacctgattcttgtactgacaataatgagtctaatgatgtttttaatcagggataccgtcttcgtgaccgtggtaccattgaacctccagatcgctatggttttccacgggctgatgtggcaattgttgaacccactacatattaggaagcttctgggattctcgagtggcagctagctatgattgatgaattggctgctcttgaacgcattggtacatgggatatcgttcctttaccctcgcatgttgttcctatcacatgtaaatgggtcttcaaagttaagacaaaatcagatggttccattgagaggtataaagctcgtctagtggctcatgattttcaacagactcaaggacttgattacgatgagacttttgcacctgttgcgcatatgactactgttcgaaccttgatcgcagttgcagtctcatcttcttggactatctcctagatggatgtcaagaatgcttttcttaatggtgatctacaagaagaagtttatatgcatcctccttccggggttgatactccctcagggcatgtttgttgtctccgtcgcacattgtatgggctgaaacaagctcctcatgcttggtttgagcgattcatctctgtcatcacaactgctggtttttcttctagtgaacatgatcctgcattgtttgttcatgtctctccaaaaggtcgcactttacttctattatatgtggatgatatgctgattacaggtgacaacttagaacatatttctcatgtcaagtaacatcttagtaaggaattttagatgtctgatttgggaccgcttagctatttcttgggcattgatgttcaacagactcaaaaaggcttttatctgtctcagtccaaatatatacaagatcttcttgatcgctcttgacttactgatacacacaccgttgcaacaccaatcgatattcatttaaaactttgtccgaaggatggggcaccactagcagacccaactcggtatcgtcatattgtggttagtcttgtttatctcaccatcaccagacctgatattgctcatgctgttcatatgttgagccaatttatatcaacacctacttcagttcattatggtcatttgcttcgtgtgcttcgatatttacgcgggacaagatccagatgtttactttatgctttgatagcccacttcagcttcatgcgtattctgatgccacttgggcaagtgatcctgttgaccattgttctactacaggttactgttttctccttggatcatctccccgttgcctggaaatccaagaagcaagcagccatatctcgttctagtgctgaagccgaacttcg

SEQ ID NO: 203956 - DNA, 483 bp, Zea Mays
cttagagttggtacgtgaccccaagctcaaggggtctacgatcccggatcattgtattgggacgaaggtcgtgatccaaacaatacacaaagctgctgtcatatcttcctccacgaagctgctggatgtaatggctagtcggccggtggggcacgcgccgcatgccacgaagccgcgggcgagtgtgcacgaccagtgtcatgacggcgacggcagatgcggatggccaacggcatgacaatggcggatgtgcacagcctggagcacggcagcgttgtaaaaagctcacctcagcacggaagcaaatgtttatgctcagggcacctaaggtgctcgtcatacaactcaagaggtttgaggggataaatggtggaaagatcaacaggaatatagaattcaaggaggcacttgatctttctgattgcatgtacaataaaaaccaggtatatgatgtttgaacatcaatacggtttccaacatgca

SEQ ID NO: 203957 - DNA, 1571 bp, Zea Mays
ctcttcccttcgcccatctctcttccaagctctgagttctgattctgacccagacggggaataatcagactcctcgcatcccctctcttctctcttcaccccgtcgccgtcccgttactcgattcgagggcgcgacccttccccatctctcttgcctcgccttgccggcggcgccaatcccagggctcgcgtcgggagtgcccaacttctccacagtggccgttccgccgcggcgcccgcaggtgggcgatgcgatcggatgagttggcggcggcggcggcgcttcgtggaaaggaggaggaggggggccttgtgctttcccgcggcggtgctatccccgccgcatccgcccctcggagccggtgatggccccgaccgcggagccgtcttcgcggccgccccaatggcgcccccgcacgggcccacccccggggctgaagaacctcggcaacacatgctacctcaacagcgtcctacagtgcctcgcgtccacgccgcccctcgccacgttctgcctcgcctctcgccactccaaccagtgcaagaaggtgttcccgaatagggacaatgactgcgcgctatgcgtgcttgagcggcagattgctcggctgcttcgggcagatgctggggcgctcgattccccagcaaaggttatccgctgcatgcccctatttgccgagcacttcaggtgggggcgccaggaggatgcacacgagttcctccgctatgtcgtagatgcctgtcacactgctgacctccgcatgcgcaaggggttacgtgcagcagctgccagtggaaactgtggtgaggatgtccgggggcagggggtttgtctggttatgagggagacatttggcggggcattactgagtcaagtgaagtgccttgagtgcaagggagaatctaacaagactgatgagataatggatatcagtctcgatctacctgggagcagttctgttgctgatgccctttcccgcttctttcatccggagaccttggatggcgcaaacaaatattgctgtgaaaggtatgctgttctttatctaaaaaggaacaaatggttcctagacgaaggttctatgtactgcaagaattttcactgtttacttgctaaagatgcaaaagccgttttacgatgctttagggttgataataatattttcagtggaaacaaaatcatgtaggaagtttcaccagcctcttctcttgcaatctaattttttttcctgtaggcaaatgttgctgttcccttagtattcaaatccataggaatgtaaatgttagtttggacctcttgaaattaccctacttggctacttttttggagaaggaaaagcttactattcctttctcgggaaagtttatatgttgtcattttcaccaaggcaaagctaactctggtaatctctctagcttatgactgcttactatagattttttttaagaatactacagaacaaagttggtgtgaccccaaccatggatccttgtgattgttccaaaactggtgaaaatgccttttaagctcttttgagtctctttccaaattgaaattgtcaaaatcatag

SEQ ID NO: 203958 - DNA, 795 bp, Zea Mays
caagagcttgagagacattacaggattggaaagaagaatttcagcacacagcatattcaaccaacgcttatgttaccttaggagcattgtggaagccagcactacaaggaaacagagtagtcaagcttgagattgctattgcttctaaagatagagatgttagatccaagggcgcaaaacgaggtcgcatgagtgatttggaagccaaactagatgaactgcgtagggatctgtcatccacgggtagcgatgccatatttccccatgcagttcttactgcgcaacaaatttcactactgagcagccagaagccaaccactccagctgagctagaaaaggttatagggaaggtgaagacaaggaagtacggcagcaagatcattgagctgatgaggtcacatgacaattcaggaagtggccgaggcaaggaggctggcgatgaacacagagctaagaagatcaaaacgaaggatgaggatgttgtttgtgttgagagtagcgaggaagaatagaatatgcccttcacatacttggctttttagtctatcatctcatggttaattattttgccaatcatttcctccgacgtcatctttctgtaatttagactttcacggattaatgcacagtcatatttcttacagagaaagcctcgagcatccttttgaccggttcatagtcttttgcttcggtagctttgtatcttgttgatgatcggattaatgtgcgaatacttgggattaatgtgcgaaaactttgtgccaagtgtttgaatgtactatacacatgctgagg

SEQ ID NO: 203959 - DNA, 1394 bp, Zea Mays
gttcgatttgttattcatcacagccttagcaagtctatggagacatactaccaggagagtggtcgggccggacgggatggattaccttcagaatgtattttgtattatcggcctggtgatgttccacggcagagttcaatggtgttctatgaaaactgtggcctgcaaaatctttatgacatcgtgcggtattgtcagtctaagaggagttgtcgtcatggtgcattctttcgccattttggagaggtccctcaggactgcaacggaatgtgcgacaattgtgcttccactattgagcagaaggatattgatgtcacctgtatgatttattttgcgtcagtttaaaaattacaacaaatgaccaacatttattcactttatttcagggggaaaatgttttttatttcatgatattctcacagtaattttttctacttcctgtttagaccatacaaaaattatagtttcacttcttcacgatatgcaactttaatgatcaaagagctacactactacagctggtggataagttcaagtcaaagtggaaaggtttaggtagtttcaatgaagctgttgatcttagaaaagaagaagttgagcagttgatagttaaccttatactcgacaatgttttgaaagaagaatttcagcacacagcatattcaaccaacgcttatgttaccttaggagcattgtggaagccagcactacaagagtagtcaagcttgagattgctattgcttctaaagatagagatgttagatccaagggcgcaaaacgaggtcgcatgagtgatttggaagccaaactagatgaactgcgtagggatctgtcatccacgggtagcgatgccatatttccccatgcagttcttactgcgcaacaaatttcactactgagcagccagaagccaaccactccagctgagctagaaaaggttatagggaaggtgaagacaaggaagtacggcagcaagatcattgagctgatgaggtcacatgacaattcaggaagtggccgaggcaaggaggctggcgatgaacacagagctaagaagatcaaaacgaaggatgaggatgttgtttgtgttgagagtagcgaggaagaatagaatatgcccttcacatacttggctttttagtctatcatctcatggttaattattttgccaatcatttcctccgacgtcatctttctgtaatttagactttcacggattaatgcacagtcatatttcttacagagaaagcctcgagcatccttttgaccggttcatagtcttttgcttcggtagctttgtatcttgttgatgatcggattaatgtgcgaatacttgggattaatgtgcgaaaactttgtgccaagtgtttgaatgtactatacacatgctgagg

SEQ ID NO: 203960 - DNA, 1284 bp, Zea Mays
aaaagcagatgttcgatttgttattcatcacagccttagcaagtctatggagacatactaccaggagagtggtcgggccggacgggatggattaccttcagaatgtattttgtattatcggcctggtgatgttccacggcagagttcaatggtgttctatgaaaactgtggcctgcaaaatctttatgacatcgtgcggtattgtcagtctaagaggagttgtcgtcatggtgcattctttcgccattttggagaggtccctcaggactgcaacggaatgtgcgacaattgtgcttccactattgagcagaaggatattgatgtcacctaccatacaaaaattatagtttcacttcttcacgatatgcaactttaatgatcaaagagctacactactacagctggtggataagttcaagtcaaagtggaaaggtttaggtagtttcaatgaagctgttgatcttagaaaagaagaagttgagcagttgatagttaaccttatactcgacaatgttttgaaagaagaatttcagcacacagcatattcaaccaacgcttatgttaccttaggagcattgtggaagccagcactacaaggaaacagagtagtcaagcttgagattgctattgcttctaaagatagagatgttagatccaagggcgcaaaacgaggtcgcatgagtgatttggaagccaaactagatgaactgcgtagggatctgtcatccacgggtagcgatgccatatttccccatgcagttcttactgcgcaacaaatttcactactgagcagccagaagccaaccactccagctgagctagaaaaggttatagggaaggtgaagacaaggaagtacggcagcaagatcattgagctgatgaggtcacatgacaattcaggaagtggccgaggcaaggaggctggcgatgaacacagagctaagaagatcaaaacgaaggatgaggatgttgtttgtgttgagagtagcgaggaagaatagaatatgcccttcacatacttggctttttagtctatcatctcatggttaattattttgccaatcatttcctccgacgtcatctttctgtaatttagactttcacggattaatgcacagtcatatttcttacagagaaagcctcgagcatccttttgaccggttcatagtcttttgcttcggtagctttgtatcttgttgatgatcggattaatgtgcgaatacttgggattaatgtgcgaaaactttgtgccaagtgtttgaatgtactatacacatgctgagg

SEQ ID NO: 203961 - DNA, 1130 bp, Zea Mays
tgcagtgcccctcagccgcaggctttgttgttgataatggacatggaaagactcaaacaagaatatcaacaacatcttcaggaggcacaatatcttcttatgcagtccaaggagcttcataacaacttggaactggcacaaaagagcattgtagaccacacttctgctcagagaaaacgaaaggcgagagtaatttcagagtatgctgttatggcccgttctatcattcgtaagaagtttcagcagttccaagaatctgctatagctgaaagagtgaaagaagaagagaatgctgtgaatgatgccaaatctgacagagtgaaggatcctatgccggcaaatacatctgccattggaaacatacagaacatagataccagcttgggcatgacagccaacgatgatgaagatgaggttccagaagttggagattcagtgtacgttcctaagctcaagaatgaagctaccgtggtgaaaatagattcgtccaaaaatgaagtgcaagtccaagccggtatgatgaagctcaaactaaagctgaaagatgttaaggttcagaagcggaaagtatccagatagaacatctacactgtcctgcactagcagatattcagataaatatgcatatgctgtttcgtccaattcgtaccatttcattggcctcattttcagcaataataataatgtggtctttcaagtgaaaatatggatttattatctgcatgtacttctcattcttcactacttgcggtactcaaaaccttcagcagagttccagaacatcttcagattatcacttctttatagaaaatgagcttgtgatttatcacttgtctatataaattttagttcttcgaaggttcttaaaaagaagtagcatgccaatgaaatagttggcactagctggttatttgaaattgccaaattggccacattgtagagatgtttctgtgcggcgccggttttatatggcttcacgctatttccaggagccttctatcccatctatctcatttcttattttaaattttactatgttttttccctaaaccctaaattgtactatgtaaacactgcaatataatgaacggcataaaccatctcggcaaaggacgagaactgcttctttg

SEQ ID NO: 203962 - DNA, 2062 bp, Zea Mays
ctgcaactgcaagtctgcaaggcggagaagccggtcgttcgttcatccggtgcgctatcccaaatacagcggacaacttcgcacctttttcacccatcactcgcgaacgcaggtcgcactgtcgcagcatgcttcgcctctccatcgccgtcctcacctcacctctcctccccacgtccgtccccgccgtccgaccccatccgcgccgcctactccgcctccgtctgcgctccctcgccgcctcctcctcgctctcgccgtccgcccgcagcctccgcctcctcgagtggggcaaggtctgcgacgccgtcgcctccttcgccggcactgcccacggccgcgacgccacaacgaaacaactgtgggaggtggaggatgtgagctatgagcagagccagatgctgctccaggagacggaggcggccgtgttgctgcttgacaacgctggtggggcaatggatttctcggggttggatacagttgcgatagagtcagcaatacatagtgtctctgggggcgctgtgataaaaggcctggaagcaatggcagtcactagcctgatgatgtttgttgaatccttgcaagtaaacattaaagctgccatgaaactggatgaaggctcatgtagtcgattaacaacacttacagaaacaattttagatgctgtcattaacaagtcattagtgaaatccatacaagatattgttgatgatgatggctctgttaaagacactgcaagccctgagctgagacggtatcgagagcaagtacagcgtctagaaaacaggttatatcagcttatggacaagttgatgcgcaatgctgatgatgaagcttcattgtcggaagtatgcattgtaaatggaagatgctgcattagaacaaccatggataattcttcattttttgatggattattgctctccagcaggtcagatgctggaagcatgatagaaccaattgttgctgttccgttaaacgatgagttgcaggaatcaagagcattagtggctaaagctgaactggatgtcttatcaaaacttactgataagattcgtcttgatcttgatagcattcagaatttgcttcaggaaacaattaaactcgataagatcgcagctcgtgcaaaatacagtattgcatatgatggaacatttcctgacctgtatttgccgaactttgagaatgaaactgtcactagtgctacaggtggatctatcaaacaaatttcctcagctcaacttcctaagaaggcatggaaactgtatatgccaaatgcataccatccactactacttcagcggcatcaggaaaatatccatcgtgccaaaagggatgttgcaagtgccacagcggagatccggaggaggaggatatatgggcaagatattgcagaagaagatcaattggcatcagaccttgattccatgaaacttagggtttcccaactggagaaagaccagccagtaccagtagattttatgattgctgaagaaactactgtcttggtgataactggcccaaatacagggggtaaaacaatcagcttgaagacggttggcctggcatcattgatggctaagataggtctatacattctagcttctgaaccagtaaaaattccatggttcaatgctgtttatgctgacattggagatgagcaatctctgacccaatcactctctacattttctggacatctgaagcagattggtgccattcgtgcagagtcaacttcagagtccttggtccttttggatgaggtaggcgctgggacaaacccacttgaaggagccgctctggggatgtctcttttggagtcttttgctgaagctggctcctttctgactctagcaacaactcatcatggagaactcaaaacactaaaatacagaatatggttttcaccaactgtgtgtttccaaggcaattctggtttcccctcctgcgttactttgggctgcaaactctagtgcctttgttgaatgatgattcctttgatgactgccggaggagaaaaacgagatggttgatgaacaatttcagcaaggcatcaattctc

SEQ ID NO: 203963 - DNA, 1759 bp, Zea Mays
gtgaccttttgcatttgttagacgttaaggtacggtatttatagatttggctgaagaaactggttgttgctattatgaagactaagacgagtaggagcttacagaagtctgggagaggtaaccatgtccaaggagaagggccaaactgggttcttgttgctggcggggttttgcttagcacgctttcagtcaaggttgtgtgcaaactaaagcagttgttagacgggaagcagcaaaataatacttccgaagctaaaggaaggcctgaagcatgcaagctgcattcagatctctaccggttcagtgaccaaactggctgctactactggcttgcaaatggtggagtggaagtcaagcaaacacctgcaagtcctgtacccaaatcagttgaatcctcacttccacttgtcaagatacccacaccagaatcaagcaaagagaacagcggtgttatgtggatatcctcacctgatcggcttgaagatcctcgaaggccatttcagtactctaacagttctggctctccctgtgtttcagaatcaggatctgacatttatagcaaaagagaggtcatacagaagctaagacagcacctcaagaaacgtgatgagatgatcatggagatgcaaactcagattgctgatcttaagaactctcttaacattcaggtgacacagtccagcaatctgcagtctcaattggatgctgccaatcgtgatctgtttgaatctgaacgagagattcagcatctaaggaagattattgcagatcattgtgtcacagaagcactctctcatgataaacctttgcaagctgcgcattggcagccagatgccgcaaatgggcattctaatggctatggtgatggttgtgttgatgatgctgacctgcattgtattagcatcgagaagaggaaggtagaagtagagagggtggagatgctcaagaaagaggtggttgaactgaaggaagtcattgagggaaaggactttgtgcttcagagctacaaggaacagaaggtggaactcttctcaaagatcagggagttgcaggaaaagctctcagcacaagtgccaatcatcttgtaggatctatctgtgatactttttagaagattgaatctaagcataatgttgccatgtcccatgagcagcagagggggtcccgcttcagtgaagattgcagaaggtcttggcatttggcaatcgtcacgcatgccaaacaccatgctaggatctttgtggaatgcttctcttttcctttgaggggagctttgcataatgttaggttgatttgtttctttcttggttgtcataatgttaggttggtttgctttcttccttcttcaatatctagcccttggttgctcaaagtttacaaagggattctttttttcagttgctaggcctcaggtaactcaattgaacttcatactcaagttgctgtacaggttctcagatttcaggagacacagaagtctgtactgtgcctctgcctcctgtttcatgcttttttttttgttaagtgatctttggaatgttaggtccatgacatttctactatgagatttgaagactatggcattgcccttttttgtgattccttctggataaaaagcaacttaggcccggtgatgcagtgtatgacattgcccgttgttcatctgatagttattgggggtgtgtgggcagttgcaaaacataatgcatgtgattgggctatgggtaacatgcagtgttctagctttatgctacatcag

SEQ ID NO: 203964 - DNA, 758 bp, Zea Mays
cggcaaagggcaaagtgggaaacaatcaagttccacaaaatcgcatctcatctgcttcgactccaccgaggactcccttctttcctcccactcccatctgctctcctcgccgccacctgcgccgtcagagcacggagcagtccgcgaccacgctttcgctgccgctctccgacaggcgacggagccgcagctccagtcgcagtcggctcccctgaattcgggctcgccaaataccctccaatcgtctgcgtccgtcgtccgggacttccggtgcaactgaatccggcaccacctgtgcggcctgtcatggcacttggaagaggagggaggaaggactcaagaggttaaggtacggtatttatagatttggctgaagaaactggttgttgctattatgaagactaagacgagtaggagcttacagaagtctgggagaggtaaccatgtccaaggagaagggccaaactgggttcttgttgctggcggggttttgcttagcacgctttcagtcaaggttgtgtgcaaactaaagcagttgttagacgggaagcagcaaaataatacttccgaagctaaaggaaggcctgaagcatgcaagctgcattcagatctctaccggttcagtgaccaaactggctgctactactgtatgtcaggttctagaggttgcgacctcatggaatcttgtgtgtcgtgtgtggggtggactggagattagggcaaggccgggggatatgtgcaacagaatgaagtgtgct

SEQ ID NO: 203965 - DNA, 685 bp, Zea Mays
aaataatgagtaatttaatggagtggagtgttccgatcggcgagttcctcgagcggatccatctgctcgtccggtcagaggcggccgccgggcacgcgatccgcgtcgacggcacgtgtctcgtgctcgctggggtgtacctgacgcgtttcatcggcagccacgcggcgcgggtcgcggggatcgtggtggagccgtccaccgcgcaccgattggtggccgtcgcgctgttcctgggcggtcactcccccaagaactgggctgccgcgttcgaggcggtctcagaccgcgcgatccgcacaggcacagggccatgaggagaagacggtgcatggtcgtggctatcttcgactcagcacgaggccagagaagacgtagacggtagatgctctcttgctcgtggccacgctcctcggaagaggacgatgctctcgtcattgatcaagctcgctggaccagaacggggtggagctggagcatccccacagttgctgcctagcttcaagttttattagtgattggtcttgttgtttccagctctggtagagagctcggcgtcgctgctcactagcagagcagcttgctgtgttttatgtgtactggatcagcaagtaccaataaaacctgtcgttgcatcaatgacgtacgtgtgtttcaggcgcctgaaattttaggtgtgagacat

SEQ ID NO: 203966 - DNA, 3481 bp, Zea Mays
gcggctgcaatccggctgcggctgcggcttctacagtatttttctctctatggattgcagctgcagcagtccaaacagctgcaacagtgtcggcttgtagccagccgaacacgcccagtgttcccagccctaaaacacttgacactacgacactaccgtatcagtctggcaggtcctgtgcataatccaccatctcgctcacaggctcgccgcccccgccggcaatggagggcgttcacagcctcctggcccggcccaactccgcgccgttcgccttctcaccgctgcccctccgcaggagccacatttcctaggcgatggcattcggagggcgttcgagtcgcggatagctaagccacctcagtatgggtacagcacagaagctcttgttgggcgacggcaaatgctgcagattgcccatgatactctcacaaaccagagctcgcgcaccgagtacgaccgtgcgctttccgaggaccgtgatgcggcactcaccatggatgttgcctgggataaggttccaggtgtgctgtgtgtgcttcaggaggctggggaggcacaactggtgttagcaactggagagcacttgcttcaggaccgtccacctaagcggttcaagcaggatgtggtgctagcaatggcattggcttatgtggacatatcaagggatgctatggcagcaagccctccagatgtaatctgctgttgtgaggtgcttgagagggcactgaagctcctgcaggaggatggtgcaagcaatcttgcacctgaactgcttgcacagattgatgaaactttggaggagattacacctcgttgtgtattggagcttcttgctcttcctactgatgaaaaacataaaaataaacgccaagaaggtctgcaaggtgcaaaaaacatattgtggagtgttggcaggggtggtattgctactgttggaggaggattttctcgtgaggccttcatgaatgaggctttcttgcagatgacatcagctgagcagatggatttcttctctaaaacaccgaatagcataccacctgaatggtttgagatctatagtgtcgcacttgcccacattgctcaagcaattgcaagtaaaaggccacaattcatcatgatggcagatgaactcttcgaacaacttcagaagttcaatataggttctcaatatccttatgaaaacgagatggacctcgcattagaaagggcactctgctcgttacttgtgggggatatttgcaattgcagaatgtggcttggaattgataatgagtcctcgtcatatagggaccccaaaaatatcgagtttgtggtgaataactctagcatgaacgaagagaatgatcttcttccagggctgtgcaagctcttggagacatggcttgtctccgaggtattcccaaggagcagagatacccgagggacgcagttcagactgggagactattacgacgacccaaaagttctaagctacttagaaaggatggaaggcggtggtgcttcccatttagctgcagctgccgctatagcaaaacttggtgctcaagctactgctgcgcttggtactgtaaaatcaagtgctcttcaagctttcagtaaggttttcccattgacagaacagctagacatgtcaggcaaggatatcccaagtgatgatcttgataaatctcttgaaaaactcgcccaaggaagtgttgctggagacgctatccatgattccagaaatgacgccttgaagattatctctgctggtacactgcttgcactatttgcagtgttaggtctcaagtgcttgcctcgtaacaagtcacttcctgctcttaggggcgagtatgggtctgtggcggttgttgactccattgatggtccagcggcagatgaagagccactggaaatccctaggatggacgcgaagttggctgaagacattgttcgcaggtggcaaagcatcaagtccaaggctttggggccagaacacactgtcacggcattgcaagaggtcctcggcggcaacatgctgaaggtgtgggcggaccgagctgcagagatcgagcgccacggctggttctgggagtacgcgctctctggcgtgacgatcgacagcatcaccgtctccgtggacggccggcgggcagcggtggaggcgacgatcgaggaggtgggccggcttaccgacgtgaccgaccctaagaacgacgacgcgtacgacaccaagtacaccgcccggtacgagatgacctactccaggccagcagggtggaggatcaccgaaggcgcagtcctcaggtcgtaggtagaacggctgtgcttgtgcagctgcagcaggagtaggcgagtagcgattctgaagaattccagccagttgtgcctgttgtgaaagccgagccacttaaaaatcagtgggctgatgaagatgttgaagaagatgatgtaaaagaatcatgggaagaagaggaggaggaggagaaacctaagccagcgccagtggaaaaggtcgctgcaaaacctagcactaaggctcctgctaaaaagggaaaacagcaagcattgacaagtgctgaagaaccagatgagcctcctcttagtcccacttcacagaaaattcgccaacaaagacttgtggaagaagctgacttcaagtctaccaccgagctttttgcaaagaagggcagtgagcaaaagtcactagatacttttattccaaagtccgagagtgactttgcggaatacgcggagcttattgcaaacaaactacgcccctatgagaaaagctttcactacatggctctgcttaagaatgtcatgagactttccatgacatcgttgaaaggtgcggacgccaaagatatatcttcttccgtgacggcaattgctaacgagaagatcaaggctgagaaggaggctgcagcaggcaaaaagaaacaaggagcgaaaaagaagcaactccacatcgagaaaggagacgacgacttcatccccggccggggtggtggctacgatgaccccgatgagtacgacttcatgtgatctggctgggagggatagtaggtttctgttatgtatacctttggcgggcagagaatatatcactagagtttgcggcatactattgcatggaacatgcgttatctattcgagaatgatttttgactctgcaggataagaagagcacttgtgatctggatgcatgggtgttttcttatttatccttgaatctttgtgttatttttttttcaacattgcattttttgccaaatgtactatagtaccttgtactatctggttactccgtgagtcatgaaagcaattaaatccctggagggtgtctcgcttgtgtttgcagctgtatgaccgtgtgcattgtttttggagatcttgtgtgatccactgactactccgactggcatggttgtcttcctttttctgacgctcggacgagacacagcaagacactattggtgtgctagtttgctgcacg

SEQ ID NO: 203967 - DNA, 3149 bp, Zea Mays
gcggctgcaatccggctgcggctgcggcttctacagtatttttctctctatggattgcagctgcagcagtccaaacagctgcaacagtgtcggcttgtagccagccgaacacgcccagtgttcccagccctaaaacacttgacactacgacactaccgtatcagtctggcaggtcctgtgcataatccaccatctcgctcacaggctcgccgcccccgccggcaatggagggcgttcacagcctcctggcccggcccaactccgcgccgttcgccttctcaccgctgcccctccgcaggagccacatttcctaggcgatggcattcggagggcgttcgagtcgcggatagctaagccacctcagtatgggtacagcacagaagctcttgttgggcgacggcaaatgctgcagattgcccatgatactctcacaaaccagagctcgcgcaccgagtacgaccgtgcgctttccgaggaccgtgatgcggcactcaccatggatgttgcctgggataaggttccaggtgtgctgtgtgtgcttcaggaggctggggaggcacaactggtgttagcaactggagagcacttgcttcaggaccgtccacctaagcggttcaagcaggatgtggtgctagcaatggcattggcttatgtggacatatcaagggatgctatggcagcaagccctccagatgtaatctgctgttgtgaggtgcttgagagggcactgaagctcctgcaggaggatggtgcaagcaatcttgcacctgaactgcttgcacagattgatgaaactttggaggagattacacctcgttgtgtattggagcttcttgctcttcctactgatgaaaaacataaaaataaacgccaagaaggtctgcaaggtgcaaaaaacatattgtggagtgttggcaggggtggtattgctactgttggaggaggattttctcgtgaggccttcatgaatgaggctttcttgcagatgacatcagctgagcagatggatttcttctctaaaacaccgaatagcataccacctgaatggtttgagatctatagtgtcgcacttgcccacattgctcaagcaattgcaagtaaaaggccacaattcatcatgatggcagatgaactcttcgaacaacttcagaagttcaatataggttctcaatatccttatgaaaacgagatggacctcgcattagaaagggcactctgctcgttacttgtgggggatatttgcaattgcagaatgtggcttggaattgataatgagtcctcgtcatatagggaccccaaaaatatcgagtttgtggtgaataactctagcatgaacgaagagaatgatcttcttccagggctgtgcaagctcttggagacatggcttgtctccgaggtattcccaaggagcagagatacccgagggacgcagttcagactgggagactattacgacgacccaaaagttctaagctacttagaaaggatggaaggcggtggtgcttcccatttagctgcagctgccgctatagcaaaacttggtgctcaagctactgctgcgcttggtactgtaaaatcaagtgctcttcaagctttcagtaaggttttcccattgacagaacagctagacatgtcaggcaaggatatcccaagtgatgatcttgataaatctcttgaaaaactcgcccaaggaagtgttgctggagacgctatccatgattccagaaatgacgccttgaagattatctctgctggtacactgcttgcactatttgcagtgttaggtctcaagtgcttgcctcgtaacaagtcacttcctgctcttaggggcgagtatgggtctgtggcggttgttgactccattgatggtccagcggcagatgaagagccactggaaatccctaggatggacgcgaagttggctgaagacattgttcgcaggtggcaaagcatcaagtccaaggctttggggccagaacacactgtcacggcattgcaagaggtcctcggcggcaacatgctgaaggtgtgggcggaccgagctgcagagatcgagcgccacggctggttctgggagtacgcgctctctggcgtgacgatcgacagcatcaccgtctccgtggacggccggcgggcagcggtggaggcgacgatcgaggaggtgggccggcttaccgacgtgaccgaccctaagaacgacgacgcgtacgacaccaagtacaccgcccggtacgagatgacctactccaggccagcagggtggaggatcaccgaaggcgcagtcctcaggtcgtaggtagaacggctgtgcttgtgcagctgcagcaggagtaggcgagtagcgattctgaagaattccagccagttgtgcctgttgtgaaagccgagccacttaaaaatcagtgggctgatgaagatgttgaagaagatgatgtaaaagaatcatgggaagaagaggaggaggaggagaaacctaagccagcgccagtggaaaaggtcgctgcaaaacctagcactaaggctcctgctaaaaagggaaaacagcaagcattgacaagtgctgaagaaccagatgagcctcctcttagtcccacttcacagaaaattcgccaacaaagacttgtggaagaagctgacttcaagtctaccaccgagctttttgcaaagaagggcagtgagcaaaagtcactagatacttttattccaaagtccgagagtgactttgcggaatacgcggagcttattgcaaacaaactacgcccctatgagaaaagctttcactacatggctctgcttaagaatgtcatgagactttccatgacatcgttgaaaggtgcggacgccaaagatatatcttcttccgtgacggcaattgctaacgagaagatcaaggctgagaaggaggctgcagcaggcaaaaagaaacaaggagcgaaaaagaagcaactccacatcgagaaaggagacgacgacttcatccccggccggggtggtggctacgatgaccccgatgactgtatgaccgtgtgcattgtttttggagatcttgtgtgatccactgactactccgactggcatggttgtcttcctttttctgacgctcggacgagacacagcaagacactattggtgtgctagtttgctgcacg

SEQ ID NO: 203968 - DNA, 3695 bp, Zea Mays
gcggctgcaatccggctgcggctgcggcttctacagtatttttctctctatggattgcagctgcagcagtccaaacagctgcaacagtgtcggcttgtagccagccgaacacgcccagtgttcccagccctaaaacacttgacactacgacactaccgtatcagtctggcaggtcctgtgcataatccaccatctcgctcacaggctcgccgcccccgccggcaatggagggcgttcacagcctcctggcccggcccaactccgcgccgttcgccttctcaccgctgcccctccgcaggagccacaggccgccaccgcctggcccctccacctgccgcgccgccagccgctgggccgaccgcctcttcgccgacttccacctcctccccgccgccgccgacccgccagccgcggcctcctcttcctcctcgtccccgttcgtcccgatcttccccgaagccgccgaccgcgccttgcccctcccggtcgacttctacaagattcttggtgcggagccacatttcctaggcgatggcattcggagggcgttcgagtcgcggatagctaagccacctcagtatgggtacagcacagaagctcttgttgggcgacggcaaatgctgcagattgcccatgatactctcacaaaccagagctcgcgcaccgagtacgaccgtgcgctttccgaggaccgtgatgcggcactcaccatggatgttgcctgggataaggttccaggtgtgctgtgtgtgcttcaggaggctggggaggcacaactggtgttagcaactggagagcacttgcttcaggaccgtccacctaagcggttcaagcaggatgtggtgctagcaatggcattggcttatgtggacatatcaagggatgctatggcagcaagccctccagatgtaatctgctgttgtgaggtgcttgagagggcactgaagctcctgcaggaggatggtgcaagcaatcttgcacctgaactgcttgcacagattgatgaaactttggaggagattacacctcgttgtgtattggagcttcttgctcttcctactgatgaaaaacataaaaataaacgccaagaaggtctgcaaggtgcaaaaaacatattgtggagtgttggcaggggtggtattgctactgttggaggaggattttctcgtgaggccttcatgaatgaggctttcttgcagatgacatcagctgagcagatggatttcttctctaaaacaccgaatagcataccacctgaatggtttgagatctatagtgtcgcacttgcccacattgctcaagcaattgcaagtaaaaggccacaattcatcatgatggcagatgaactcttcgaacaacttcagaagttcaatataggttctcaatatccttatgaaaacgagatggacctcgcattagaaagggcactctgctcgttacttgtgggggatatttgcaattgcagaatgtggcttggaattgataatgagtcctcgtcatatagggaccccaaaaatatcgagtttgtggtgaataactctagcatgaacgaagagaatgatcttcttccagggctgtgcaagctcttggagacatggcttgtctccgaggtattcccaaggagcagagatacccgagggacgcagttcagactgggagactattacgacgacccaaaagttctaagctacttagaaaggatggaaggcggtggtgcttcccatttagctgcagctgccgctatagcaaaacttggtgctcaagctactgctgcgcttggtactgtaaaatcaagtgctcttcaagctttcagtaaggttttcccattgacagaacagctagacatgtcaggcaaggatatcccaagtgatgatcttgataaatctcttgaaaaactcgcccaaggaagtgttgctggagacgctatccatgattccagaaatgacgccttgaagattatctctgctggtacactgcttgcactatttgcagtgttaggtctcaagtgcttgcctcgtaacaagtcacttcctgctcttaggggcgagtatgggtctgtggcggttgttgactccattgatggtccagcggcagatgaagagccactggaaatccctaggatggacgcgaagttggctgaagacattgttcgcaggtggcaaagcatcaagtccaaggctttggggccagaacacactgtcacggcattgcaagaggtcctcggcggcaacatgctgaaggtgtgggcggaccgagctgcagagatcgagcgccacggctggttctgggagtacgcgctctctggcgtgacgatcgacagcatcaccgtctccgtggacggccggcgggcagcggtggaggcgacgatcgaggaggtgggccggcttaccgacgtgaccgaccctaagaacgacgacgcgtacgacaccaagtacaccgcccggtacgagatgacctactccaggccagcagggtggaggatcaccgaaggcgcagtcctcaggtcgtaggtagaacggctgtgcttgtgcagctgcagcaggagtaggcgagtagcgattctgaagaattccagccagttgtgcctgttgtgaaagccgagccacttaaaaatcagtgggctgatgaagatgttgaagaagatgatgtaaaagaatcatgggaagaagaggaggaggaggagaaacctaagccagcgccagtggaaaaggtcgctgcaaaacctagcactaaggctcctgctaaaaagggaaaacagcaagcattgacaagtgctgaagaaccagatgagcctcctcttagtcccacttcacagaaaattcgccaacaaagacttgtggaagaagctgacttcaagtctaccaccgagctttttgcaaagaagggcagtgagcaaaagtcactagatacttttattccaaagtccgagagtgactttgcggaatacgcggagcttattgcaaacaaactacgcccctatgagaaaagctttcactacatggctctgcttaagaatgtcatgagactttccatgacatcgttgaaaggtgcggacgccaaagatatatcttcttccgtgacggcaattgctaacgagaagatcaaggctgagaaggaggctgcagcaggcaaaaagaaacaaggagcgaaaaagaagcaactccacatcgagaaaggagacgacgacttcatccccggccggggtggtggctacgatgaccccgatgagtacgacttcatgtgatctggctgggagggatagtaggtttctgttatgtatacctttggcgggcagagaatatatcactagagtttgcggcatactattgcatggaacatgcgttatctattcgagaatgatttttgactctgcaggataagaagagcacttgtgatctggatgcatgggtgttttcttatttatccttgaatctttgtgttatttttttttcaacattgcattttttgccaaatgtactatagtaccttgtactatctggttactccgtgagtcatgaaagcaattaaatccctggagggtgtctcgcttgtgtttgcagctgtatgaccgtgtgcattgtttttggagatcttgtgtgatccactgactactccgactggcatggttgtcttcctttttctgacgctcggacgagacacagcaagacactattggtgtgctagtttgctgcacg

SEQ ID NO: 203969 - DNA, 2510 bp, Zea Mays
gcggctgcaatccggctgcggctgcggcttctacagtatttttctctctatggattgcagctgcagcagtccaaacagctgcaacagtgtcggcttgtagccagccgaacacgcccagtgttcccagccctaaaacacttgacactacgacactaccgtatcagtctggcaggtcctgtgcataatccaccatctcgctcacaggctcgccgcccccgccggcaatggagggcgttcacagcctcctggcccggcccaactccgcgccgttcgccttctcaccgctgcccctccgcaggagccacatttcctaggcgatggcattcggagggcgttcgagtcgcggatagctaagccacctcagtatgggtacagcacagaagctcttgttgggcgacggcaaatgctgcagattgcccatgatactctcacaaaccagagctcgcgcaccgagtacgaccgtgcgctttccgaggaccgtgatgcggcactcaccatggatgttgcctgggataaggttccaggtgtgctgtgtgtgcttcaggaggctggggaggcacaactggtgttagcaactggagagcacttgcttcaggaccgtccacctaagcggttcaagcaggatgtggtgctagcaatggcattggcttatgtggacatatcaagggatgctatggcagcaagccctccagatgtaatctgctgttgtgaggtgcttgagagggcactgaagctcctgcaggaggatggtgcaagcaatcttgcacctgaactgcttgcacagattgatgaaactttggaggagattacacctcgttgtgtattggagcttcttgctcttcctactgatgaaaaacataaaaataaacgccaagaaggtctgcaaggtgcaaaaaacatattgtggagtgttggcaggggtggtattgctactgttggaggaggattttctcgtgaggccttcatgaatgaggctttcttgcagatgacatcagctgagcagatggatttcttctctaaaacaccgaatagcataccacctgaatggtttgagatctatagtgtcgcacttgcccacattgctcaagcaattgcaagtaaaaggccacaattcatcatgatggcagatgaactcttcgaacaacttcagaagttcaatataggttctcaatatccttatgaaaacgagatggacctcgcattagaaagggcactctgctcgttacttgtgggggatatttgcaattgcagaatgtggcttggaattgataatgagtcctcgtcatatagggaccccaaaaatatcgagtttgtggtgaataactctagcatgaacgaagagaatgatcttcttccagggctgtgcaagctcttggagacatggcttgtctccgaggtattcccaaggagcagagatacccgagggacgcagttcagactgggagactattacgacgacccaaaagttctaagctacttagaaaggatggaaggcggtggtgcttcccatttagctgcagctgccgctatagcaaaacttggtgctcaagctactgctgcgcttggtactgtaaaatcaagtgctcttcaagctttcagtaaggttttcccattgacagaacagctagacatgtcaggcaaggatatcccaagtgatgatcttgataaatctcttgaaaaactcgcccaaggaagtgttgctggagacgctatccatgattccagaaatgacgccttgaagattatctctgctggggcgagtatgggtctgtggcggttgttgactccattgatggtccagcggcagatgaagagccactggaaatccctaggatggacgcgaagttggctgaagacattgttcgcaggtggcaaagcatcaagtccaaggctttggggccagaacacactgtcacggcattgcaagaggtcctcggcggcaacatgctgaaggtgtgggcggaccgagctgcagagatcgagcgccacggctggttctgggagtacgcgctctctggcgtgacgatcgacagcatcaccgtctccgtggacggccggcgggcagcggtggaggcgacgatcgaggaggtgggccggcttaccgacgtgaccgaccctaagaacgacgacgcgtacgacaccaagtacaccgcccggtacgagatgacctactccaggccagcagggtggaggatcaccgaaggcgcagtcctcaggtcgtaggtagaacggctgtgcttgtgcagctgcagcaggagtaggcgagtagcggtaagctcgattcccattcttttcttttcttttggcagcgtgtgtaaataaacagtgtgagcactggctcgttccagtactagaaagcttggttaggttgctgagtgatgagctcctgaggtcgaaatttgtcatgtagtttttattgatagataatttggtgttactattgctgggtcagatcctctgaaacgattgatcttaatgaaggcggcagtgcatcactgcttaccacatca

SEQ ID NO: 203970 - DNA, 687 bp, Zea Mays
cgggactgtgtctgtgtcggctggctgaccagaacacttgagcagactagcaaggccttcagaccgggagggctccctgtcctgtcccccgcgccgccgcggatggccggagccaccacgccggcatcaggcgccctcgtcaggctctgcctgccttcgctcctcctctttctgtaccggtgctgcagatgtgaggctgttgagatggagagaacccttgcgatgatcaagcccgatggtttgtcaggtaagtacacagaagcaatcaaggaggtcatcttggattctggatttcatatcgtcaaagaaaccgaggtccagcttgatgctgagagggcatctgtcttctatgcggagcattcccagagaagcttctttgacagcctagtcaagtacataacaagtggtccagttcttgctatggttctggaaagacctgacgccgttgcgcaatggcgcactttgattggaccaactgatgcaaaaaaggccaaaacctctcatccaaacagcattagagcaatgtgtgggctggactctgagaaaaattgcgtgcatggttcggattcaccagaatctgcagacagagagatctcatttttcttcggagaagctgaatccgtaactgtggaacatgatgagctatagacgccacactggtatcagtttcgtttgctttggtgagta

SEQ ID NO: 203971 - DNA, 672 bp, Zea Mays
tgtgtctgtgtcggctggctgaccagaacacttgagcagactagcaaggccttcagaccgggagggctccctgtcctgtcccccgcgccgccgcggatggccggagccaccacgccggcatcaggcgccctcgtcaggctctgcctgccttcgctcctcctctttctgtaccgatgtgaggctgttgagatggagagaacccttgcgatgatcaagcccgatggtttgtcaggtaagtacacagaagcaatcaaggaggtcatcttggattctggatttcatatcgtcaaagaaaccgaggtccagcttgatgctgagagggcatctgtcttctatgcggagcattcccagagaagcttctttgacagcctagtcaagtacataacaagtggtccagttcttgctatggttctggaaagacctgacgccgttgcgcaatggcgcactttgattggaccaactgatgcaaaaaaggccaaaacctctcatccaaacagcattagagcaatgtgtgggctggactctgagaaaaattgcgtgcatggttcggattcaccagaatctgcagacagagagatctcatttttcttcggagaagctgaatccgtaactgtggaacatgatgagctatagacgccacactggtatcagtttcgtttgctttggtgagta

SEQ ID NO: 203972 - DNA, 1951 bp, Zea Mays
gcattatgcctactaatttcgattttttgcaaaaaaaaaaaatcggtcagaaatgtcttcagttgggagaagcaatggcaccagggcggcgaatggtgcagctgccatcagtacttccacgacggaagcaggctcagccgacgccagatttcactcccaactactacatcaggacaggcaaagtagatgggctggctgcttttcaggcttatcatgtttcggatcgcagaagggcgggaaaagaattgttcctgcagcacgcacttctgatgggaatggatcaaatactcgtggaaatggtctccagtctggtgccaattcaaaccaaaatctgcctatgaatttatctcttctagctccaccatcatcaccagcatccttctcaaactctgcgcttccttcgactgctcaatcaccgaattgctttctgtctgtatctgcaaactctcctggtggtccaacgtccaatatgttcgctgttgggccatatgctaatgaacctcaacttgtctcaccacctgtcttctcaacttacacaactgagccatccactgcaccgttgaccccaccacctgagctggctcatgcaactacaccttcttctccagatgttccatatgctagatttctttcttcttctatgggtatcaaaactgccagcaaggatcacaacatgcctttcctatcaacaacctattctggtggttcaggactccagacatcttatccactttaccctgaaagcccctgtagcagcctcatctcaccggcttcagtaactccgaggactggtctatcttcacctatacctgagcaagaggttcctcctgcccattggaagacctctaggtctgcctgcgacacgccatatttcagggcttcgcccattcccgagcaagaaaccactgcacaatggaagacctctagatctgcttgtgacacaccgtatgccaggacctcaccaaccaatatatttgggctggattcatctacaccgagaaactatatgctagacaacaatttctttcggccagcggcatctgctcaattctacctggaccaggctcagcagacattttcacataatggcggaagggtcagtgtatccagggagaagcaaggtgccgatgaaattgaagcttacagggcttcatttggatttagtgcggatgaaattgtccaatctcagtcttatgtgggaataccggatgcagttgatgaatcattcagtatatcaccatttggaaacaatactccagctactgagatctgcccattcagtgatctgcctaatgaggtggataaatcatgtgcctacgcgaaagatgacacaagcccaaagaaatcagcaaaccagctctccactgattctccaaacaaagttctgcgtttggacgtgttcaaaggaacaaaaggaggtcatcagtctgaggacgagtgtatcaggaaagatggtcatcttttcagaaagacagcagatgaaatatccctaaaacccatagaagtaagaaagaaatcgcttcctggccattcttgctcggatgcagagatcgagtacaggaggacacggagtttaagggatgccaacggcgttctatcacggcgcagtgcattggcaagacagctgcactaatatggtactagtatgcagggtgatttcatagttcatgtagcctagtgtgcattggatccgagctgtcattagagtaatctgtagggcaaagagtagcctctaccgtatatgaggatcatattgccagattgtgctctagatatgtgattatgagcctgtactctgtttgaactccaagatcctctttgtaggcacactccaatcgtatgcaggagctgtgagatggaatagcgttggtacattacaggagttcgtgtttcggtcttcctcttcctgatgatgtaacttgtgtttgaatcttgcagaatgctggtttgg

SEQ ID NO: 203973 - DNA, 2885 bp, Zea Mays
cagctcccaggcaagaatcgtagggtcatccatgtaggcgacatttgtgattgtattttttctcatcaaaacagcctaagatatgaaagaacaatgtatgcaattgtgatggtatctggtaagacatggcagaagggcgatcaaacaaaataagtgccataaaaaacagctgttgttaagaattcagatcccaacgctatgaatataccaacactcgcttctccatcttgtgaatgtggcatcagggaagaaggcgtcatcagaagtatgatccaggccagcctcctttccccaccttggcatgctgtgccttacctccataatcttaccagctattacacagtgacagtatcagcctcatcttatagtttcctgcctcgctgatcacaaaatctaatgcctataacaagggaaaaaaaggaattctaagcttagctgtcacttaattagtaaatagcgagtctctgtttgagagatacaggcaatgtagtactacaaactacaaacgctggacgataacaataataaatgatgtgaagacgcgcgcggatgcaccaagcatttcaccaaacaagcgccgcggatgctacagaatcgcgacgcgcgcgcacatagaagacctcctcgtcgtaggagaagtgcttgagctgcagcgcgcggtacccgccgtcgttgaaggcccaggtgcagcacacattgaggtccgcgcgggcggcgtccactagagcagcggtgaacgcggcgcgcgtggcggcgtccgccgcgaaatgagtcgtgcacgaagaagggccgccccgacgctcacaggtgcgggccccggcgctccaccgccgcccactcgccctcgtcggcacccagcagcatggcggaggggatgcagcaggaggccgcgaggaggacgcggcggaggagagacacccgcggcgtcgctcggcctcggagcggcggccgcggtggcgccgccaagcgaggacacgtcgggctgttccactcccacgccgattggtgggtccggtcaggcgggtcaacgcccgccccggcggcgggcatctggaggcttgctcttgtttggaggctgacacgtgggggccacaacacagcggcagaaataatcccgaccggaccaagcgcccaacaactgccgccccaagccaagggaagggaaaaggctatcgttctcgtcagtcgtcacgagagccgcgacggcgcgcatggcggcgacggcagcggcgctccggtgctgcttccccggatcctccggtgtcggtagtggcttcgtcaagcccaactcctccaggcgaggctggtgcgcagcggccgtggcggcgccgtcgcgggaggcggaaccggtttcgtcgctggggcaccgcacccgcgtcgacttccccatccttcaccaggaatttgatgatgccaaattagtttacttcgacaatggtgcaacatcgcagaaaccatgtagtgtgatgaaaacattagatgagtactaccgatcgtacaattcgaatgttcatcgtggtatccatgcactcagtgcgaaggctactcatgcatatgaggatgcaagaagaaaagttgcaaattttgtcaacgcagctgatagcagagagattgttttcactcgtaatgctactgaagctattaatctggtagcctattcatggggactatctaacttgaaagaaggagatgaaattgttcttacagttgcagagcatcatagtgctattgttccatggcaatttgtttcccagaagactggtgccaccttaaaatatgttggattgactaaagaaaatgtcccagacattgagcagttaaaagggtttctgtcgaacaagacaaagatagttgttgttcatcatgtctcaaatgttctaggttccatgcttcctatcgaggagattgtaacatggtcaaacagagttggagctaaagtccttgtagatgcttgccaaagtgttccccatatgccagttgatgttcagaaacttggcgcggactttcttgtcgcatcctctcataagatgtgtggccctacaggcgtcggatttttgcatggtaaatttgagattttgtcgtctatggagcctttcttaggtggtggtgaaatgattgcggatgtattcgaagacaaatccacatatgctgagcctccctctagatttgaggctggaactcctgcaattggagaagctataggactgggagcagccatcgactatttatcatgcattggcatggagcagatccacgaatatgagaagagctggggacatacctctacgaaagccttctctctgttccaaatgtccagatatatggcccggcgccttcccagactgtccaccgtgctccgttgtgctccttcaatatcgagaacgtccatcctacagatatcgcagagattcttgatctgcagcatagcgtagcgattcggtcggggcatcactgcgcgcagatcttgcataggacccttggcatcaacgcaagtgctcgtgcgagtcttcacttctacaacacaaaagacgaggtggataccttcgtcgacgcgcttaaagccaccgttgatttcctcacggatcgatactagtgcggttcagttcagttcccttttttttttgccagtttcatcgctctctcgtttgaactgttgtatgcacacacaaaaaagtatgcatatatatttggtataaagaaaacatacaaagtgtacggcttggcaaagtgagctcccttatttggagttttggactgtactcccttatttggcggttgttgttgaattaaacgtagttcaggatgcagagagtacaaacgactcgaccatggtcactgttatgcagtaaaacattgttatacgagaagatgagccggcagttaac

SEQ ID NO: 203974 - DNA, 794 bp, Zea Mays
acttcaaggtggtggtgaaatgattgcggatgtattcgaagacaaatccacatatgctgagcctccctctagatttgaggctggaactcctgcaattggagaagctataggactgggagcagccatcgactatttatcatgcattggcatggagcagatccacgaatatgagaaagagctggggacatacctctacgaaagccttctctctgttccaaatgtccagatatatggcccggcgccttcccagactgtccaccgtgctccgttgtgctccttcaatatcgagaacgtccatcctacagatatcgcagagattcttgatctgcagcatagcgtagcgattcggtcggggcatcactgcgcgcagatcttgcataggacccttggcatcaacgcaagtgctcgtgcgagtcttcacttctacaacacaaaagacgaggtggataccttcgtcgacgcgcttaaagccaccgttgatttcctcacggatcgatactagtgcggttcagttcagttcccttttttttttgccagtttcatcgctctctcgtttgaactgttgtatgcacacacaaaaaagtatgcatatatatttggtataaagaaaacatacaaagtgtacggcttggcaaagtgagctcccttatttggagttttggactgtactcccttatttggcggttgttgttgaattaaacgtagttcaggatgcagagagtacaaacgactcgaccatggtcactgttatgcagtaaaacattgttatacgagaagatgagccggcagttaac

SEQ ID NO: 203975 - DNA, 761 bp, Zea Mays
ttttctttgatcttcgaagatatgttattggccgcaatcatttgaggctggaactcctgcaattggagaagctataggactgggagcagccatcgactatttatcatgcattggcatggagcagatccacgaatatgagaaagagctggggacatacctctacgaaagccttctctctgttccaaatgtccagatatatggcccggcgccttcccagactgtccaccgtgctccgttgtgctccttcaatatcgagaacgtccatcctacagatatcgcagagattcttgatctgcagcatagcgtagcgattcggtcggggcatcactgcgcgcagatcttgcataggacccttggcatcaacgcaagtgctcgtgcgagtcttcacttctacaacacaaaagacgaggtggataccttcgtcgacgcgcttaaagccaccgttgatttcctcacggatcgatactagtgcggttcagttcagttcccttttttttttgccagtttcatcgctctctcgtttgaactgttgtatgcacacacaaaaaagtatgcatatatatttggtataaagaaaacatacaaagtgtacggcttggcaaagtgagctcccttatttggagttttggactgtactcccttatttggcggttgttgttgaattaaacgtagttcaggatgcagagagtacaaacgactcgaccatggtcactgttatgcagtaaaacattgttatacgagaagatgagccggcagttaac

SEQ ID NO: 203976 - DNA, 2620 bp, Zea Mays
ctctctctcacctccctcctattattattgggttcttcaccgtaccccacacacacccttctcccccaaccccatctctctctctctgcctgcgttctcctggtgctgctctcgctctcctcccctgctttgacctccccgcctttccccgccgtttcttggatttctaggatccagacaaccgcccttgtgagcctgccttcctgcctactacctgcgtacgtacaggagggtccttgcttgggtgatccgggtgcctggtttctcggttccgcggcttccgctgctgttggattcgccgagccggagccgccggagatgaccgtcgacgagctgaagctgcaggcgagggccagcggcggccacggcgccaaggaccagttccccgtcggcatgcgcgtgctcgccgtcgacgacgacccgacctgcctcaagatcctcgagaacctcttgctccgctgccagtaccatggtatgccacgctcctctcgctcccctctctctctctcttccccgtatgcttggttccctactcttctcatcggattgtacatacatcctgccgttctttttcacctttattgtccccgattcggctcttcggtttggttttatttagtttccgttgttcgcgtgtatcaactatcaagaagtctacggagatatttgggttgctgtttttgcattttttttcatcacataaatagcaaccccgactttatgcccccacccccacttcctcctcctgttgttttcgccgtgaaatatttttttgccatgtaatgtcatgtcaggctcagtttcatcttctttcttctgcaaataataataattgtgacgccaagaacagtggcaatgacaacgatgattcgggtaaaaagttgcaggtggtgagcgctgaaggtgacaatggcggtgttaatcgcaacaagagaatttcacgcaagggtagggatgataatggtgatgacggtgatgattctgatgacaacagtaatgagaatggagactcgtcgagccagaagaagccaagggttgtgtggtctgttgaattgcaccgaaagtttgtggctgctgtcaaccagcttggcattgacaaggctgttccaaagaaaatattggatcttatgaatgttgagaacatcacaagggagaacgttgcaagtcatctgcagaagtatcggctgtatctgaaaagactcagcgcagatgcaagcaggcaggctaacctaactgctgcatttggaggaagaaaccctgcttatgtgaacatgggactagacgccttcaggcagtacaatgcatatgggagataccggccagttccaaccactaaccattcacagccaaacaacctccttgcaaggatgaactctcctgcatttggtatgcatggtctgctgccttcgcagccacttcagattggacacaaccagaacaatctgagcacttccctagggaatgtcggggggatgaacaacggcaacctgatcaggggtgcgcatatgccactgcaggatactagcaaatgctttcctactggcccttctggtaattcgttcgcgaacatatcaaacagcacacaactggttacgacaaacaacttgccattacagtctcttgagccaagcaaccaacaacaccttggtcggctgcattcctctgcagaccctttcaactcatttgttggtgagcccccccagtttgcagatcttggaaggtgcaacaccacctggccaaccgcggtctcatcatccaatgttcaggagattggccagaaggacaggatcgtgaataggcccaagcttgagcctctctcaagctttacagaagcatccagtcagatccctttgctgggaagtgaaatgcagagccaccaagtagcatcactagccagcaacggtcttccgatgccgttcactcaggaagcggtgcccttcgcttatggaagcagcacgaactcgagagagatgctgaataacaaccttgcgcttagtaattcaggcgtcaactctacattgccgaaccttcgcatagacggttctgttgttccagggcagacactgggtggtagcaattcaggtggttgtgttgtcccccctctgcaagatggcaggattgatcaccaagctgtcagcagtcatctaaactacaacaacgaactcatggggacaggtaggctgcaaaggggacttagtggtggtctggatgacattgtcgtggacatgtttaggccgacgatggcgtctccttcattgatggggactgggaactggtctagcaagtttcagttctctacatcaagtctgccttcgtgtgagattttccgcatttgtggttgtggaggggttcggcgcttgattggtccaaagttgtttatagtagcaagattgcatcacaaatgccctttgcatttggtttttcagtttagcgaccaggttccagtgtcacgtccgaatatcaactatgtggtatttgctaccttaactcgtatggctatgttttcaagtcaggtgttaactgtggctatcgtgatatatacagcatggttatgagccaaggaatgctgtcctgtttcctcttggaaatcgttttgctgttccctttgttgattgtcact

SEQ ID NO: 203977 - DNA, 2630 bp, Zea Mays
ctctctctcacctccctcctattattattgggttcttcaccgtaccccacacacacccttctcccccaaccccatctctctctctctgcctgcgttctcctggtgctgctctcgctctcctcccctgctttgacctccccgcctttccccgccgtttcttggatttctaggatccagacaaccgcccttgtgagcctgccttcctgcctactacctgcgtacgtacaggagggtccttgcttgggtgatccgggtgcctggtttctcggttccgcggcttccgctgctgttggattcgccgagccggagccgccggagatgaccgtcgacgagctgaagctgcaggcgagggccagcggcggccacggcgccaaggaccagttccccgtcggcatgcgcgtgctcgccgtcgacgacgacccgacctgcctcaagatcctcgagaacctcttgctccgctgccagtaccatggtatgccacgctcctctcgctcccctctctctctctcttccccgtatgcttggttccctactcttctcatcggattgtacatacatcctgccgttctttttcacctttattgtccccgattcggctcttcggtttggttttatttagtttccgttgttcgcgtgtatcaactatcaagaagtctacggagatatttgggttgctgtttttgcattttttttcatcacataaatagcaaccccgactttatgcccccacccccacttcctcctcctgttgttttcgccgtgaaatatttttttgccatgtaatgtcatgtcaggctcagtttcatcttctttcttctgcaaataataataattgtgacgccaagaacagtggcaatgacaacgatgattcgggtaaaaagttgcaggtggtgagcgctgaaggtgacaatggcggtgttaatcgcaacaagagaatttcacgcaagggtagggatgataatggtgatgacggtgatgattctgatgacaacagtaatgagaatggagactcgtcgagccagaagaagccaagggttgtgtggtctgttgaattgcaccgaaagtttgtggctgctgtcaaccagcttggcattgacaaggctgttccaaagaaaatattggatcttatgaatgttgagaacatcacaagggagaacgttgcaagtcatctgcagaagtatcggctgtatctgaaaagactcagcgcagatgcaagcaggcaggctaacctaactgctgcatttggaggaagaaaccctgcttatgtgaacatgggactagacgccttcaggcagtacaatgcatatgggagataccggccagttccaaccactaaccattcacagccaaacaacctccttgcaaggatgaactctcctgcatttggtatgcatggtctgctgccttcgcagccacttcagattggacacaaccagaacaatctgagcacttccctagggaatgtcggggggatgaacaacggcaacctgatcaggggtgcgcatatgccactgcaggatactagcaaatgctttcctactggcccttctggtaattcgttcgcgaacatatcaaacagcacacaactggttacgacaaacaacttgccattacagtctcttgagccaagcaaccaacaacaccttggtcggctgcattcctctgcagaccctttcaactcatttgttggtgagcccccccagtttgcagatcttggaaggtgcaacaccacctggccaaccgcggtctcatcatccaatgttcaggagattggccagaaggacaggatcgtgaataggcccaagcttgagcctctctcaagctttacagaagcatccagtcagatccctttgctgggaagtgaaatgcagagccaccaagtagcatcactagccagcaacggtcttccgatgccgttcactcaggaagcggtgcccttcgcttatggaagcagcacgaactcgagagagatgctgaataacaaccttgcgcttagtaattcaggcgtcaactctacattgccgaaccttcgcatagacggttctgttgttccagggcagacactgggtggtagcaattcaggtggttgtgttgtcccccctctgcaagatggcaggattgatcaccaagctgtcagcagtcatctaaactacaacaacgaactcatggggacaggtaggctgcaaaggggacttagtggtggtctggatgacattgtcgtggacatgtttaggccggaccgcgcagacgatggcgtctccttcattgatggggactgggaactggtctagcaagtttcagttctctacatcaagtctgccttcgtgtgagattttccgcatttgtggttgtggaggggttcggcgcttgattggtccaaagttgtttatagtagcaagattgcatcacaaatgccctttgcatttggtttttcagtttagcgaccaggttccagtgtcacgtccgaatatcaactatgtggtatttgctaccttaactcgtatggctatgttttcaagtcaggtgttaactgtggctatcgtgatatatacagcatggttatgagccaaggaatgctgtcctgtttcctcttggaaatcgttttgctgttccctttgttgattgtcact

SEQ ID NO: 203978 - DNA, 759 bp, Zea Mays
gcagaggcaaccctgtccatgctttctcccccaaagccgaacacacttcctcgcgctcgcgctctcgagtcccgactcacctgcttctagccatggaggcgcctccatcttctcccttcctagtgttgctcctgctgttcttcccttcgagcggccttgccgcccccatggattttaaccatgaagtgcaagtccttatggtgatcaagagcctcctcaaggacccctatggcgcgctgagaaactgggacaggaactccgtcgatccctgtacctggtccttcatctcctgctcgccggagaatctcgtcactgcactggaagctccaagcaagaacctttccggccggctctccccgagcatagggaacctgacaaaacttgagaagcttcagctgcagaacaacaacataattgggccaatcccagcagagatcggcaagttagcaaagctcaggacgctggttctgtccagtaacaaattacatggcacagtcccaaattctttaggccgactcggaagactccagtacatagacttgtcgtacaataacttgagtggcccgataccaaaaacgtctgcaagaacgctcaacatagccgggaatcctctcatctgtgctgcagaacaggattgtgacagtaccaagctgaaaccgatgctggattcctatatcgctggtgaacagtaggagccccaagttgggagtcggttaccttgctaaggagcacattttcatgtcgggcatatgacgttcg

SEQ ID NO: 203979 - DNA, 1809 bp, Zea Mays
aaccatacactctatctcttccttctcccaaccccgctcaaaaccctagctcaacgccacaggctcgccgactttcgcccggccgccgccggggacgatggcgaagcctcggcgcggccgctccgcgtctcgctcctcctcgggatcttcttcccgctcgctgtcccactccgtctcctccggctctgtctcgtcccgctcccggtcgcgctcccgctccttctcgtcgtcgtcctcccagtcccggagccgctcccctcctcaggctaagcgcagttcgcctggagcacggaaagggcgatcaccttcaccgccccctaaaaagggttcaccttcaaagaaagtccgttcgccatcaccaccacttaaaaaggcttcaccccctaggaaagtgtcgcctcctgctgaatcagctgttctctgcattgatcatttatcaaggaatgttaatgaggctcacttgaaagagatatttggaaactttggcgaagtggtgaatgtggagctatcaatggaccgaatggttaaccttcctcgtggctatggatatattgaattcaagaagagagctgatgctgagaaggctcttcttcacatggatggtggtcaaattgatggaaatattgttaagttgagattcactcttcaaccacgccaaagggctgcatcacctgtaaaagctccgccccctcctccaaaaagagatgctcttcagattgaaaaaggtgttagcagtgctgaaaaggatgcccagcagcgtcctaaggaatcatctccacgaaggaaaccagcttcacctctacggaaacgatctccaaatcgaagggctgaatcacccaggcgtccacctgacccatcacctaggcgccgtcctgattctccacctatacgtcgccgaccagatccttctcctgtcagacgtggtgacacacctcgcaggagaccaccatctccagttcgaaggcgttctccttctccaccacctaggaggcataggtcaccgatgcgtctttcacctaggagggggcgtggtagcccatcaccacgcaggcgctcccctgggcctcttaggcggcgctcaccacctccaaggcggttgaggagcccaccaagaaggccaccacctccacgtcgcttcagtcgctctcctcctcgccgaccccttcgctcccgctccagatcaatttctccaagaaggggacgagggcctccattgaggcgtggtaggtcagactcatcatattctcgatcacctactccaccaccaagaaaggggccaaggagggtatcaaggagccgcagccctagaaagcctcctagagcaggaagaagcgtctccagtgacagccgcagcagcagttcaccttcccctagacgcggcaggtagaaagaacccgtggcattgtgtatgcggcagtattggttcgaggagaagatgagagaacgctacagcaatgctccaaacggatctgctcaacatgcctggtcgaccgccctagtttgtgtggtctaccctagacagaattatctgctgtgttggcttgtgtactttgattgtaccccaagtattttgaagttctgaacttatttctgctaattggtgtctgaagtggatatgttgaatgtattttgttttgttggatagagttcctcagcattgccaccgtatgaaagatgaatctattgatcaaccaatttgtgcatgcgtcactatgtagttgagactagacgcatgtgccacgcgcagcttacaatttgttttctaatctgtttttaaaaaagttccattttgccaacccatgctcagcc

SEQ ID NO: 203980 - DNA, 1791 bp, Zea Mays
aaccatacactctatctcttccttctcccaaccccgctcaaaaccctagctcaacgccacaggctcgccgactttcgcccggccgccgccggggacgatggcgaagcctcggcgcggccgctccgcgtctcgctcctcctcgggatcttcttcccgctcgctgtcccactccgtctcctccggctctgtctcgtcccgctcccggtcgcgctcccgctccttctcgtcgtcgtcctcccagtcccggagccgctcccctcctcaggctaagcgcagttcgcctggagcacggaaagggcgatcaccttcaccgccccctaaaaagggttcaccttcaaagaaagtccgttcgccatcaccaccacttaaaaaggcttcaccccctaggaaagtgtcgcctcctgctgaatcagctgttctctgcattgatcatttatcaaggaatgttaatgaggctcacttgaaagagatatttggaaactttggcgaagtggtgaatgtggagctatcaatggaccgaatggttaaccttcctcgtggctatggatatattgaattcaagaagagagctgatgctgagaaggctcttcttcacatggatggtggtcaaattgatggaaatattgttaagttgagattcactcttcaaccacgccaaagggctgcatcacctgtaaaagctccgccccctcctccaaaaagagatgctcttcagattgaaaaaggtgttagcagtgctgaaaaggatgcccagcagcgtcctaaggaatcatctccacgaaggaaaccagcttcacctctacggaaacgatctccaaatcgaagggctgaatcacccaggcgtccacctgacccatcacctaggcgccgtcctgattctccacctatacgtcgccgaccagatccttctcctgtcagacgtggtgacacacctcgcaggagaccaccatctccagttcgaaggcgttctccttctccaccacctaggaggcataggtcaccgatgcgtctttcacctaggagggggcgtggtagcccatcaccacgcaggcgctcccctgggcctcttaggcggcgctcaccacctccaaggcggttgaggagcccaccaagaaggccaccacctccacgtcgcttcagtcgctctcctcctcgccgaccccttcgctcccgctccagatcaatttctccaagaaggggacgagggcctccattgaggcgtggtaggtcagactcatcatattctcgatcacctactccaccaccaagaaaggggccaaggagggtatcaaggagccgcagccctagaaagcctcctagagcaggaagaagcgtctccagtgacagccgcagcagcagttcaccttcccctagacgcggcaggtagaaagaacccgtggcattgtgtatgcggcagatgagagaacgctacagcaatgctccaaacggatctgctcaacatgcctggtcgaccgccctagtttgtgtggtctaccctagacagaattatctgctgtgttggcttgtgtactttgattgtaccccaagtattttgaagttctgaacttatttctgctaattggtgtctgaagtggatatgttgaatgtattttgttttgttggatagagttcctcagcattgccaccgtatgaaagatgaatctattgatcaaccaatttgtgcatgcgtcactatgtagttgagactagacgcatgtgccacgcgcagcttacaatttgttttctaatctgtttttaaaaaagttccattttgccaacccatgctcagcc

SEQ ID NO: 203981 - DNA, 1774 bp, Zea Mays
aaccatacactctatctcttccttctcccaaccccgctcaaaaccctagctcaacgccacaggctcgccgactttcgcccggccgccgccggggacgatggcgaagcctcggcgcggccgctccgcgtctcgctcctcctcgggatcttcttcccgctcgctgtcccactccgtctcctccggctctgtctcgtcccgctcccggtcgcgctcccgctccttctcgtcgtcgtcctcccagtcccggagccgctcccctcctcaggctaagcgcagttcgcctggagcacggaaagggcgatcaccttcaccgccccctaaaaagggttcaccttcaaagaaagtccgttcgccatcaccaccacttaaaaaggcttcaccccctaggaaagtgtcgcctcctgctgaatcagctgttctctgcattgatcatttatcaaggaatgttaatgaggctcacttgaaagagatatttggaaactttggcgaagtggtgaatgtggagctatcaatggaccgaatggttaaccttcctcgtggctatggatatattgaattcaagaagagagctgatgctgagaaggctcttcttcacatggatggtggtcaaattgatggaaatattgttaagttgagattcactcttcaaccacgccaaagggctgcatcacctgtaaaagctccgccccctcctccaaaaagagatgctcttcagattgaaaaaggtgttagcagtgctgaaaaggatgcccagcagcgtcctaaggaatcatctccacgaaggaaaccagcttcacctctacggaaacgatctccaaatcgaagggctgaatcacccaggcgtccacctgacccatcacctaggcgccgtcctgattctccacctatacgtcgccgaccagatccttctcctgtcagacgtggtgacacacctcgcaggagaccaccatctccagttcgaaggcgttctccttctccaccacctaggaggcataggtcaccgatgcgtctttcacctaggagggggcgtggtagcccatcaccacgcaggcgctcccctgggcctcttaggcggcgctcaccacctccaaggcggttgaggagcccaccaagaaggccaccacctccacgtcgcttcagtcgctctcctcctcgccgaccccttcgctcccgctccagatcaatttctccaagaaggggacgagggcctccattgaggcgtggtaggtcagactcatcatattctcgatcacctactccaccaccaagaaaggggccaaggagggtatcaaggagccgcagccctagaaagcctcctagagcaggaagaagcgtctccagtgacagccgcagcagcagttcaccttcccctagacgcggcaggtagaaagaacccgtggcattgtgtatgcggcagcaatgctccaaacggatctgctcaacatgcctggtcgaccgccctagtttgtgtggtctaccctagacagaattatctgctgtgttggcttgtgtactttgattgtaccccaagtattttgaagttctgaacttatttctgctaattggtgtctgaagtggatatgttgaatgtattttgttttgttggatagagttcctcagcattgccaccgtatgaaagatgaatctattgatcaaccaatttgtgcatgcgtcactatgtagttgagactagacgcatgtgccacgcgcagcttacaatttgttttctaatctgtttttaaaaaagttccattttgccaacccatgctcagcc

SEQ ID NO: 203982 - DNA, 1916 bp, Zea Mays
gttggagtgtggatggaaccatacactctatctcttccttctcccaaccccgctcaaaaccctagctcaacgccacaggctcgccgactttcgcccggccgccgccggggacgatggcgaagcctcggcgcggccgctccgcgtctcgctcctcctcgggatcttcttcccgctcgctgtcccactccgtctcctccggctctgtctcgtcccgctcccggtcgcgctcccgctccttctcgtcgtcgtcctcccagtcccggagccgctcccctcctcaggctaagcgcagttcgcctggagcacggaaagggcgatcaccttcaccgccccctaaaaagggttcaccttcaaagaaagtccgttcgccatcaccaccacttaaaaaggcttcaccccctaggaaagtgtcgcctcctgctgaatcagctgttctctgcattgatcatttatcaaggaatgttaatgaggctcacttgaaagagatatttggaaactttggcgaagtggtgaatgtggagctatcaatggaccgaatggttaaccttcctcgtggctatggatatattgaattcaagaagagagctgatgctgagaaggctcttcttcacatggatggtggtcaaattgatggaaatattgttaagttgagattcactcttcaaccacgccaaagggctgcatcacctgtaaaagctccgccccctcctccaaaaagagatgctcttcagattgaaaaaggtgttagcagtgctgaaaaggatgcccagcagcgtcctaaggaatcatctccacgaaggaaaccagcttcacctctacggaaacgatctccaaatcgaagggctgaatcacccaggcgtccacctgacccatcacctaggcgccgtcctgattctccacctatacgtcgccgaccagatccttctcctgtcagacgtggtgacacacctcgcaggagaccaccatctccagttcgaaggcgttctccttctccaccacctaggaggcataggtcaccgatgcgtctttcacctaggagggggcgtggtagcccatcaccacgcaggcgctcccctgggcctcttaggcggcgctcaccacctccaaggcggttgaggagcccaccaagaaggccaccacctccacgtcgcttcagtcgctctcctcctcgccgaccccttcgctcccgctccagatcaatttctccaagaaggggacgagggcctccattgaggcgtggtaggtcagactcatcatattctcgatcacctactccaccaccaagaaaggggccaaggagggtatcaaggagccgcagccctagaaagtaacatatatgtatttgttttgcctcctagagcaggaagaagcgtctccagtgacagccgcagcagcagttcaccttcccctagacgcggcaggtagaaagaacccgtggcattgtgtatgcggcaggtaaagccttttatcccttgactctatctgtatcgtttgcctgtgcttgtgacttgctgtgagttcaagtattggttcgaggagaagatgagagaacgctacagcaatgctccaaacggatctgctcaacatgcctggtcgaccgccctagtttgtgtggtctaccctagacagaattatctgctgtgttggcttgtgtactttgattgtaccccaagtattttgaagttctgaacttatttctgctaattggtgtctgaagtggatatgttgaatgtattttgttttgttggatagagttcctcagcattgccaccgtatgaaagatgaatctattgatcaaccaatttgtgcatgcgtcactatgtagttgagactagacgcatgtgccacgcgcagcttacaatttgttttctaatctgtttttaaaaaagttccattttgccaacccatgctcagcc

SEQ ID NO: 203983 - DNA, 1868 bp, Zea Mays
cgggtgggttgagttggagtgtggatggaaccatacactctatctcttccttctcccaaccccgctcaaaaccctagctcaacgccacaggctcgccgactttcgcccggccgccgccggggacgatggcgaagcctcggcgcggccgctccgcgtctcgctcctcctcgggatcttcttcccgctcgctgtcccactccgtctcctccggctctgtctcgtcccgctcccggtcgcgctcccgctccttctcgtcgtcgtcctcccagtcccggagccgctcccctcctcaggctaagcgcagttcgcctggagcacggaaagggcgatcaccttcaccgccccctaaaaagggttcaccttcaaagaaagtccgttcgccatcaccaccacttaaaaaggcttcaccccctaggaaagtgtcgcctcctgctgaatcagctgttctctgcattgatcatttatcaaggaatgttaatgaggctcacttgaaagagatatttggaaactttggcgaagtggtgaatgtggagctatcaatggaccgaatggttaaccttcctcgtggctatggatatattgaattcaagaagagagctgatgctgagaaggctcttcttcacatggatggtggtcaaattgatggaaatattgttaagttgagattcactcttcaaccacgccaaagggctgcatcacctgtaaaagctccgccccctcctccaaaaagagatgctcttcagattgaaaaaggtgttagcagtgctgaaaaggatgcccagcagcgtcctaaggaatcatctccacgaaggaaaccagcttcacctctacggaaacgatctccaaatcgaagggctgaatcacccaggcgtccacctgacccatcacctaggcgccgtcctgattctccacctatacgtcgccgaccagatccttctcctgtcagacgtggtgacacacctcgcaggagaccaccatctccagttcgaaggcgttctccttctccaccacctaggaggcataggtcaccgatgcgtctttcacctaggagggggcgtggtagcccatcaccacgcaggcgctcccctgggcctcttaggcggcgctcaccacctccaaggcggttgaggagcccaccaagaaggccaccacctccacgtcgcttcagtcgctctcctcctcgccgaccccttcgctcccgctccagatcaatttctccaagaaggggacgagggcctccattgaggcgtggtaggtcagactcatcatattctcgatcacctactccaccaccaagaaaggcctcctagagcaggaagaagcgtctccagtgacagccgcagcagcagttcaccttcccctagacgcggcaggtagaaagaacccgtggcattgtgtatgcggcaggtaaagccttttatcccttgactctatctgtatcgtttgcctgtgcttgtgacttgctgtgagttcaagtattggttcgaggagaagatgagagaacgctacagcaatgctccaaacggatctgctcaacatgcctggtcgaccgccctagtttgtgtggtctaccctagacagaattatctgctgtgttggcttgtgtactttgattgtaccccaagtattttgaagttctgaacttatttctgctaattggtgtctgaagtggatatgttgaatgtattttgttttgttggatagagttcctcagcattgccaccgtatgaaagatgaatctattgatcaaccaatttgtgcatgcgtcactatgtagttgagactagacgcatgtgccacgcgcagcttacaatttgttttctaatctgtttttaaaaaagttccattttgccaacccatgctcagcc

SEQ ID NO: 203984 - DNA, 3152 bp, Zea Mays
gtaaaattgatcaaccaatctgacaacaaagtcttaacatttgattttgcttttagagacaatagagcaaattcaggcttgaaagattgcttccatctgccgactgattgaaccacatcttcgaagactactattttgatgacaccaaatagtttaaacagcaatttccctgaaaacaggagacccaaatatttctgttccagcagcagataacaccaggagaattcactgagatggcctgggaggggattgttggtgcggttgatgcagcaagattatcaaaacaacagatagtagagtcggagcacttgatgaaagctcttctggagcagaaggatgggctagcacgcaggatattttcaaaagcgggtgtagataacacatcagtcctgcaagctactgacgactttatttctagacagccaaaggttgtcggtgatacaactgggccaattataggatcaagttttgtgttgatattggataatgcaaagaagcataaaaaagaacatggtgatgaatttgtgtcagttgagcacatcctgcaagcattcacttcagataaaaggtttggacaacagctcttcaaagatctgaaaattgtggagaatgatcttaaagaagctatttcagcagtacggggaagccagcgagtcacagatcagaatccagaaggaaaataccaggctctagagaagtatggtattgacttgacagaatcagctcgacgtggaaaacttgatcctgttataggccgtgatgatgaagtgcgcagatgcattcagatcctatgtagaagaactaaaaacaatcctgtaatcattggcgagccaggagttggcaaaactgctattgctgaaggactggctcagcgtattgtacgaggagatgttcctgaacctctaatgaatagaaggcttatttcgttggatatgggagcattacttgctggagctaaattccgtggtgattttgaggagagattaaaggctgttctaaaggaggtcactgcttctaatggacagatcatcttgttcattgatgagatccatactgttgttggtgcaggagctgctggtggagcgatggatgctggtaacctgttgaagccaatgctaggccgtggagaactccgctgcattggagcaacaacattggatgagtacaggaagtacattgagaaggatgctgctcttgagcgtaggttccagcaggtttattgtggtgagccagcagttgaggataccatctccatattgcgcggtttgcgagaacgatatgaactgcatcatggtgttaagatatcagatggggctcttgttgctgctgcagttctatccgatcgatacatcactggacgttttttgcctgacaaagccattgatctagttgatgaagcagctgccaagctcaaaatggagataacatcaaagcctattgaattggatgaggtagacagagaaatcataaggcttgaaatggaaaagctctcattgaagaatgatacagataaggcctccaaagaacggctgagcaagcttgaagctgaactagaatctctcaagcagaagcagaaaagtctttcagaacattgggaatatgagaagtctttgatgactcgtataagatcaattaaagaagagactgacagagtgaacctggagattgaagctgctgagagagaatatgatttgaatcgtgctgctgaactgaagtatggaacacttttatcacttcagaaacagctggaagaggctgagaataaacttgttgaattccagcaatcagggaagtcaatgcttcgagaagaggtgactgacgtggacattgctgagattgtgagcaagtggactggtattccagtgtcgaaccttcaacagtctgaaagggaaaagctgctgctgctggaagatgtacttcacaagagggttattggccaagacattgcagttaaatcagtggccaatgccatccgccgttctagggcaggcctatcagatcctaaccgtccgatagcaagcttcatgtttatgggacctacaggtgtgggaaagactgagctgggtaagacactggctgaattccttttcaacactgagaatgccctaatacgaattgatatgagtgagtacatggagaagcacgccgtctcccgtttggttggtgccccacctggatatgttggttatgaggaagggggccaattgactgaatcagttcgtcggcgaccttactcagttgttctgtttgatgaaattgagaaagcacaccaggaagtctttaacatattgttgcaactgttggatgatggaagaatcactgattcacaaggcaggactgtcagcttcactaactgtgtcataatcatgacatcgaacattgggtcaccattgatccttgacacacttagaaacaccacagacagcaaggaggccgtgtatgagataatgaagaagcaggtgattgagatggcccggcaaacattccggccagaattcttgaacaggatagatgagtacattgtgttccaaccactggatacaaccgagatcaaccatatcgtggagatccagctgaatcgggttcagaaccggctgagacaacagaagattcatctccagtacactgcggaagccgttgagcttctggggtctcttggctttgaccctaactatggtgcgaggcctgtcaagagagtgattcagcagatggtggagaacgagattgcccttggtgtcctgaagggcgatttcaaagaagacgatactgtcctcgtggatgtaagttcggcggcgatcgcaaaaggactcgctccgcagaagaagcttgtccttcagagggtagaaaacggaaacgacgagttagttgctaatgactaggtcagatgggatcaccttttagcgagaatgttcaagtgtgatgaaacgcagctgttagctctgcgttttcgcgtatgagaaacttggccttttatttaggttctaccatgaagtcgtgtccagtctccggtggcaaaactcaatgttcaaatctctctgaatataatcttgagagctctacctcaagagctgtgaatatctgttcaggcaacccctatctttctcgcccccggaaaagttcttcggttggcctctgtgctccatcgttcctcc

SEQ ID NO: 203985 - DNA, 3124 bp, Zea Mays
cttcgcttgacttgcagtgctagggcaggtttgcaagtgctctttctttgtgacaaaaacgtggggtgttttctcgagagtaagatatcttgttttgtatgtatatacagaaaaggaaaaaaaaatgtaacaagggagtcacaaggatcataaatcaaaagaggaggcggctaacatcatgataacaccaggagaattcactgagatggcctgggaggggattgttggtgcggttgatgcagcaagattatcaaaacaacagatagtagagtcggagcacttgatgaaagctcttctggagcagaaggatgggctagcacgcaggatattttcaaaagcgggtgtagataacacatcagtcctgcaagctactgacgactttatttctagacagccaaaggttgtcggtgatacaactgggccaattataggatcaagttttgtgttgatattggataatgcaaagaagcataaaaaagaacatggtgatgaatttgtgtcagttgagcacatcctgcaagcattcacttcagataaaaggtttggacaacagctcttcaaagatctgaaaattgtggagaatgatcttaaagaagctatttcagcagtacggggaagccagcgagtcacagatcagaatccagaaggaaaataccaggctctagagaagtatggtattgacttgacagaatcagctcgacgtggaaaacttgatcctgttataggccgtgatgatgaagtgcgcagatgcattcagatcctatgtagaagaactaaaaacaatcctgtaatcattggcgagccaggagttggcaaaactgctattgctgaaggactggctcagcgtattgtacgaggagatgttcctgaacctctaatgaatagaaggcttatttcgttggatatgggagcattacttgctggagctaaattccgtggtgattttgaggagagattaaaggctgttctaaaggaggtcactgcttctaatggacagatcatcttgttcattgatgagatccatactgttgttggtgcaggagctgctggtggagcgatggatgctggtaacctgttgaagccaatgctaggccgtggagaactccgctgcattggagcaacaacattggatgagtacaggaagtacattgagaaggatgctgctcttgagcgtaggttccagcaggtttattgtggtgagccagcagttgaggataccatctccatattgcgcggtttgcgagaacgatatgaactgcatcatggtgttaagatatcagatggggctcttgttgctgctgcagttctatccgatcgatacatcactggacgttttttgcctgacaaagccattgatctagttgatgaagcagctgccaagctcaaaatggagataacatcaaagcctattgaattggatgaggtagacagagaaatcataaggcttgaaatggaaaagctctcattgaagaatgatacagataaggcctccaaagaacggctgagcaagcttgaagctgaactagaatctctcaagcagaagcagaaaagtctttcagaacattgggaatatgagaagtctttgatgactcgtataagatcaattaaagaagagactgacagagtgaacctggagattgaagctgctgagagagaatatgatttgaatcgtgctgctgaactgaagtatggaacacttttatcacttcagaaacagctggaagaggctgagaataaacttgttgaattccagcaatcagggaagtcaatgcttcgagaagaggtgactgacgtggacattgctgagattgtgagcaagtggactggtattccagtgtcgaaccttcaacagtctgaaagggaaaagctgctgctgctggaagatgtacttcacaagagggttattggccaagacattgcagttaaatcagtggccaatgccatccgccgttctagggcaggcctatcagatcctaaccgtccgatagcaagcttcatgtttatgggacctacaggtgtgggaaagactgagctgggtaagacactggctgaattccttttcaacactgagaatgccctaatacgaattgatatgagtgagtacatggagaagcacgccgtctcccgtttggttggtgccccacctggatatgttggttatgaggaagggggccaattgactgaatcagttcgtcggcgaccttactcagttgttctgtttgatgaaattgagaaagcacaccaggaagtctttaacatattgttgcaactgttggatgatggaagaatcactgattcacaaggcaggactgtcagcttcactaactgtgtcataatcatgacatcgaacattgggtcaccattgatccttgacacacttagaaacaccacagacagcaaggaggccgtgtatgagataatgaagaagcaggtgattgagatggcccggcaaacattccggccagaattcttgaacaggatagatgagtacattgtgttccaaccactggatacaaccgagatcaaccatatcgtggagatccagctgaatcgggttcagaaccggctgagacaacagaagattcatctccagtacactgcggaagccgttgagcttctggggtctcttggctttgaccctaactatggtgcgaggcctgtcaagagagtgattcagcagatggtggagaacgagattgcccttggtgtcctgaagggcgatttcaaagaagacgatactgtcctcgtggatgtaagttcggcggcgatcgcaaaaggactcgctccgcagaagaagcttgtccttcagagggtagaaaacggaaacgacgagttagttgctaatgactaggtcagatgggatcaccttttagcgagaatgttcaagtgtgatgaaacgcagctgttagctctgcgttttcgcgtatgagaaacttggccttttatttaggttctaccatgaagtcgtgtccagtctccggtggcaaaactcaatgttcaaatctctctgaatataatcttgagagctctacctcaagagctgtgaatatctgttcaggcaacccctatctttctcgcccccggaaaagttcttcggttggcctctgtgctccatcgttcctcc

SEQ ID NO: 203986 - DNA, 1973 bp, Zea Mays
aaacattcctaattgccaattggagccagagcgcagagcgcgaaaggcgagcggcgactccctggcgttgaccagagccccaccccactcgccgtctcgccctaaaccaaatcctccccaaaggcaaatacgaaggtacagtgccccagccccgcgccccctagaccaaagcagaccagaatccgccctaccaatcgcctccccagatcggcggtccacccggaggcggcgatggcgtcgtcgcaggcgaacctcgacaagatgcagctccgccagagctaccgcaacgtctggcacaccgacatgacgaacgccatccaggccgacttcccctactgctgcctcgcgctgtggtgtggaccttgcgtgtcgtacatgcttcgcaaaagggctctctacaatgacatgtcaagatatgtctgttgcgctggctacatgccatgcagtggaaagtgtggcgagagccggtgcccagagttctgtcttgcaactgaggtgttcctttgctttggcaattcagttgcatcaacccgcttcttgctgcaagatgaatttaacatacagaccactcagtgtgacaactgcatcattggcttcatgttatgccttcaacaagttgcttgcatcttctctatagttgcagctattgttggtagcgaggagctttcagaggcttcccagatccttaattgtctgtctgatttggtctactggacggtttgtgcatgtatgcagacgcagcacaaagtcgaaatggacaagagggatggaaagttcagcccacagcctatggcagtgcccccggtgcaacaaatgtcacgcatcgatcagcctatgccgcctcctgctggatatgcaccgcaaccagcatatgggcagccttatggtggctatccatctcctcctggccaaggttatccgcctcctcctggccaaggttatccgccagctggatactcgcagggcggtgcataccctccacccgctcaaggttacccacatggtggtggatatcctccacctggtcaaggttacccccagggtcagggtggtgcatatcctccgcctggttcttaccctccacaaggttcctaccccccagcagagggctcctacccagcacaaggttcctaccacccagcacagggctcctacccagcacaaggttcatatcccccagcacagggctcgtacccagcacaaggttcctaccccccacaggcttaccctggcaagtaaagatgacacgacaggtgaaccaaatatcgtgaacatgtaaacagtaggaccgctttagcgctataggttattttgataaaattcttgttactgttcagggtggcattcggtgaacaatatttctattttatacggtcaacatcttgtgttgatcatgtcgtgttgagtctatcctcttttttcttttcctgaataaggaatggcattcaactggaatgtatttgaatttggtgacaactcacgtggatattgttttggttcagagttgtcactttgctgtgtatgatagtcgcaacttttgatgacgtttgataatggagtgaaggaatggaatgcttatgacttgtgagcacgagcagtccctttcacacacgttactattatcataggacgagatgaatagacagacagcaaccctcagtctgatagcgatgtctcaacggagctgtccttgtagctagctccagcatcaatcgatgggaatatctgacaaagtcgcgtagcagctattatctctttgagacattaatcagagacgatgtatgtatctgaatttcatgcagctgtaggcatgaatacgcgccggaaaaacgttgggattattatgagccttaatttgtcccgtggcgtttgttaggcctaatcgcccaataaatctccaccgggctgtccagtttcagtttggtacacctaatcgatacaaggcccacagcgatagagatttccgatctgat

SEQ ID NO: 203987 - DNA, 1295 bp, Zea Mays
ccaaaaaaaaagaaaaatgtactcggagtcaatagttgcccaaattgtttcgatcgcccatttcgacatcgtatcggattttttcaaaataatggggaaaatagcgaagggaaaaaaaaaccctccgtgtggccgtcccaaactcccaatgagatgaagagaacgcaccacacgaccgcgtgacagaggcacagagcaaaagccaaactggcagccagcacagcagagcgccactcgactcgactcatcctttcggttcccctcccccctccgcgttccacaaccctcgagaagcttccaccctcccctcctgcgacgccgccagagccgcggaaaccctacccaccccggccgctcacgcaccgggcgcccgccgccgccggtcgcgtacctgccgccgacaccgcccaaagcgattggatctagagatcgtcagtagccacgatggaggactgggattctgaagaattccagccagttgtgcctgttgtgaaagccgagccacttaaaaatcagtgggctgatgaagatgttgaagaagatgatgtaaaagaatcatgggaagaagaggaggaggaggagaaacctaagccagcgccagtggaaaaggtcgctgcaaaacctagcactaaggctcctgctaaaaagggaaaacagcaagcattgacaagtgctgaagaaccagatgagcctcctcttagtcccacttcacagaaaattcgccaacaaagacttgtggaagaagctgacttcaagtctaccaccgagctttttgcaaagaagggcagtgagcaaaagtcactagatacttttattccaaagtccgagagtgactttgcggaatacgcggagcttattgcaaacaaactacgcccctatgagaaaagctttcactacatggctctgcttaagaatgtcatgagactttccatgacatcgttgaaaggtgcggacgccaaagatatatcttcttccgtgacggcaattgctaacgagaagatcaaggctgagaaggaggctgcagcaggcaaaaagaaacaaggagcgaaaaagaagcaactccacatcgagaaaggagacgacgacttcatccccggccggggtggtggctacgatgaccccgatgagtacgacttcatgtgatctggctgggagggatactgtatgaccgtgtgcattgtttttggagatcttgtgtgatccactgactactccgactggcatggttgtcttcctttttctgacgctcggacgagacacagcaagacactattggtgtgctagtttgctgcacg

SEQ ID NO: 203988 - DNA, 1262 bp, Zea Mays
ccaaaaaaaaagaaaaatgtactcggagtcaatagttgcccaaattgtttcgatcgcccatttcgacatcgtatcggattttttcaaaataatggggaaaatagcgaagggaaaaaaaaaccctccgtgtggccgtcccaaactcccaatgagatgaagagaacgcaccacacgaccgcgtgacagaggcacagagcaaaagccaaactggcagccagcacagcagagcgccactcgactcgactcatcctttcggttcccctcccccctccgcgttccacaaccctcgagaagcttccaccctcccctcctgcgacgccgccagagccgcggaaaccctacccaccccggccgctcacgcaccgggcgcccgccgccgccggtcgcgtacctgccgccgacaccgcccaaagcgattggatctagagatcgtcagtagccacgatggaggactgggattctgaagaattccagccagttgtgcctgttgtgaaagccgagccacttaaaaatcagtgggctgatgaagatgttgaagaagatgatgtaaaagaatcatgggaagaagaggaggaggaggagaaacctaagccagcgccagtggaaaaggtcgctgcaaaacctagcactaaggctcctgctaaaaagggaaaacagcaagcattgacaagtgctgaagaaccagatgagcctcctcttagtcccacttcacagaaaattcgccaacaaagacttgtggaagaagctgacttcaagtctaccaccgagctttttgcaaagaagggcagtgagcaaaagtcactagatacttttattccaaagtccgagagtgactttgcggaatacgcggagcttattgcaaacaaactacgcccctatgagaaaagctttcactacatggctctgcttaagaatgtcatgagactttccatgacatcgttgaaaggtgcggacgccaaagatatatcttcttccgtgacggcaattgctaacgagaagatcaaggctgagaaggaggctgcagcaggcaaaaagaaacaaggagcgaaaaagaagcaactccacatcgagaaaggagacgacgacttcatccccggccggggtggtggctacgatgaccccgatgactgtatgaccgtgtgcattgtttttggagatcttgtgtgatccactgactactccgactggcatggttgtcttcctttttctgacgctcggacgagacacagcaagacactattggtgtgctagtttgctgcacg

SEQ ID NO: 203989 - DNA, 3375 bp, Zea Mays
aaaataccaacggtatcgatcgtcgcttgcctagatttttcacattagccctaggtaggccgaagcgggattcaatcaaacaaccccgttccgacaaatagaagcgttctcaggggcttactcgcgaaaagctcaataaatcccgagtcgtagcacgggactggagcacccaacccaagttcacgatcgcgaggtcttcgtctccgcctgggtccagctctcggatttccgcgcgttccacttccacccacacacacacccccaaggacgcaggccgcaatggcggagcccgaggtctcccccgcagcggccggcggcggcgggcggctccgcaacgccttcgggggcgtgctctgcgccttcacgcttctcctcatcggcgtcgtcgccttctcgatccgcctcttctctgtaatcaagtacgagagcgtgatccacgagttcgacccctacttcaacttccgcgtcactcagtttctgtccaagaatggaatttatgagttctggaactggtttgatgataggacatggtacccccttggccgtgtgatcggtggcactgtgtatcctgggttgacattgactgctggaactatgtggtggttgctgaactctcttaacatcccattgtcggtggagacagtttgtgtgttcacagctccaattttctcagcaaatgcatcatgggctacctacctgctaacaaaggaagcgaaaggtactggagctggattaatggcagcagccattttagcaatggtcccctcatatatttcaagatctgttgcaggcagctatgataatgaagctgtagcaatatttgccttgatatttacattttatctatatgtaaagacgctgaacacgggatcactcttttatgcaacactcaatgctctctcatatttctacatggtctgctcttggggaggctacacattcattatcaatcttatcccaatgcatgtcctcttgtgcattgtaactggtcgttattcttcgcgtctctacattgcatatgctccccttgttgtacttggaacgcttctggcagcattagtaccggtggttggttttaatgcagtaatgacctctgagcacttcgcatcatttctggtgttcataatccttcacgtggttgctcttgtgtattatatcaaagggcttttgactcctaggctgttcaaagttgctatgactcttgtcatatctgttggcttagctgtttgttttgcagtagtagccatacttgttgcattggtggcatctagtccaacgaaaggctggagtggccgcagtttgagtctacttgacccaacttatgcaagcaagtacatccccatcattgctagtgtcagtgaacaccaacctcctacctggccctcgtattttatggacattaatgtgttggccttcctgattcctgctgggattatttcatgcttcttgcctctgtctgacgcaagctccttcatggtcttgtacttagtcactgcagtttatttttctggagtaatggtacggcttatgcttgtccttgctcctgctgcgtgcattttatctgggattgctctatctgaagttttcagtgtgctcacacgatccattaaattgcagctgtcaaaattatttgatgatagccctacttcttcaggtgacagtagcccagagagttctacaaattcaacaaaaaatgaaaataggaatgaaaaacacgaaatagctccaaaggaaaaaacatcaaagaagaaccggaagaaggagaaagaagtggcagagagtgttcctgtaaagcctaaaaaggaaaataggcttttggttctgccttttgaattatctgttatgggtattttattgctcatcgtattaggtggtttctatgtggtccattgtgtatgggcggcagctgaagcgtactccgcgccttcaattgtgttgacatctcgttcacgagatgggttgcatgtttttgatgatttccgtgaagcttacgcatggctgagccataacacagatgttgatgacaaggttgcttcctggtgggactatggttaccaaacaactgcaatggccaacagaactgtgattgtagacaataacacctggaacaacactcatatagcaacagttggtacagcaatgtcgtccccagaaaaagcagcttgggaaatcttcaattctttagatgtcaaatatgtgcttgttgtctttggaggacttgttggataccctagcgatgatatcaataagttcctttggatggtacgaataggaggtggtgtgttccctcacattaaggagccagattatcttagggatggtcaatatcgcgttgatgctcaagccactccaactatgctgaattgcctcatgtacaagctttgttactacaggtttgtggagactgatggaaaaggctttgacagagtaagaggatatgaaataggaaagaagcatttcaagctaacacattttgaggaggtatttacaacccaccattggatggtccgcatatataaactgaaaccccagaagaacagggttcgaggcaagctgaagaagttgaaggccagtgccaaaactagtcccacacttgcggcagggcgaaagaacccgtggcaataggtgaagttaccaatagtgccatttacctgatactttgttggtagatcaagtgcgctaggttggtgaaccagaaaactacagaactagattagagatctggactattgtattggaccctcgttatatgttctcccaaccggccgggtgctgatgaaatttttgatagaccagaggagtttatcaatcccatgggtttgagattggatggcggcgataattttctagtgacaggggttgtttaagactacctgttacttgctgttttgtgtaacctacaatttttcttacaaggtacttctctactggggtgatagtgagttcaggacatcgtgagcactgagcactgaggctatatccactatccagcaaagaaggcaaaatgcaaaatagggtatcgcacggcactttagcacaatggcatgtctctaatagggtatgcattaggaggtaaaatgcatatgagaggggatatgcaaaatacagtattgatttgcatatgcatgatctgttggaggaatctatactatatgttttttttgtaaaataaaaaaatataatcgtgtcgggccgggccagcactacgtgccgaggctacagcctaaacatggcacgacgtttttggctcttgcaagcattaggtcgtttctcagaccacattggcgcaatggattccatgatgtttgaggttgctgaattagatggagcaataatgatttgtcacactaacagtaaaatgaaagattatttgtt

SEQ ID NO: 203990 - DNA, 1088 bp, Zea Mays
ctgtggtgtttggttggttgggaagattgatccagcgaaatacaagagtatttcatctggatttggtgtcctattaaaggagcaaggggctaggggctttttcagaggatgggttcctacattgcttggatccgcatctgctgaggtaattgctgatgtggctctctgtccttttgaagctgtgaaggtacgtgtgcagacacaacctggatttgctcgtggattgagtgacggtcttcccaaatttgtccgatctgagggtgctcttgggctttacaagggaattgttcctctctggggtcgtcagattccttataccatgatgaagtttgcttcctttgagaccatcgttgagcttatatacaagcacgctgtgcctgttccgaagtctgagtgcagcaagactacccagttgggtattagttttgctggtggttacattgctggtgtcttctgtgctattgtttctcacccggccgataaccttgtgtctttcctgaacaatgccaaggatgctactgttggcgatgctgttaagaagcttggtctctggggtcttttcactagagggctgcctcttcgtatcgtcatgattggtacccttactggtgctcagtggggaatttacgatgctttcaaagtgatggttggactcccaacaacgggaggtgttacacctgccccggcagcgaaggctgaactgaaagccagtgcttgatttttctgtattcacggagatcattacttggtggagggtggaagtgtatcagtcactcgagagtttagtttccgattttttttttcttaaaaggaaaatttgtccatcatccttttggtgagaggaactcattaaacaggtggagtagatcttttttgtcccgggaaaagtttatgctttgatgcataataatttgtaggacagcagtgctgttagagcgcaggttttgtttacctcctgtaccgaggaatgcttactaagtcacatttcacattatggtgtttattttgaaagcgtgcacctcgcttgatgtccttttttgcccttgctgtccgacatttggagcgcactaagcagggaaacactgttt

SEQ ID NO: 203991 - DNA, 1205 bp, Zea Mays
gtagatttatttcctgtgtgcatcgattgatccagcgaaatacaagagtatttcatctggatttggtgtcctattaaaggagcaaggggctaggggctttttcagaggatgggttcctacattgcttggttacagtgctcagggggcttgcaagtttggcttctatgagttctttaaaaagtattactcagacattgcagggcctgagtatgctcagaagtacaagactctaatctacctcgcaggatccgcatctgctgaggtaattgctgatgtggctctctgtccttttgaagctgtgaaggtacgtgtgcagacacaacctggatttgctcgtggattgagtgacggtcttcccaaatttgtccgatctgagggtgctcttgggctttacaagggaattgttcctctctggggtcgtcagattccttataccatgatgaagtttgcttcctttgagaccatcgttgagcttatatacaagcacgctgtgcctgttccgaagtctgagtgcagcaagactacccagttgggtattagttttgctggtggttacattgctggtgtcttctgtgctattgtttctcacccggccgataaccttgtgtctttcctgaacaatgccaaggatgctactgttggcgatgctgttaagaagcttggtctctggggtcttttcactagagggctgcctcttcgtatcgtcatgattggtacccttactggtgctcagtggggaatttacgatgctttcaaagtgatggttggactcccaacaacgggaggtgttacacctgccccggcagcgaaggctgaactgaaagccagtgcttgatttttctgtattcacggagatcattacttggtggagggtggaagtgtatcagtcactcgagagtttagtttccgattttttttttcttaaaaggaaaatttgtccatcatccttttggtgagaggaactcattaaacaggtggagtagatcttttttgtcccgggaaaagtttatgctttgatgcataataatttgtaggacagcagtgctgttagagcgcaggttttgtttacctcctgtaccgaggaatgcttactaagtcacatttcacattatggtgtttattttgaaagcgtgcacctcgcttgatgtccttttttgcccttgctgtccgacatttggagcgcactaagcagggaaacactgttt

SEQ ID NO: 203992 - DNA, 696 bp, Zea Mays
aaacgaggtcttcattgatctcaagggaggaaactgcaaaatttagggtttgtttggccctattcgcacacacccacgccgtcggatcctcctgccctccccacgtccacctctctccgccgaagaatcggcggcggcggcggcggcggcgagcgccttcccttgtcaaaatccacccggcggcagagcagagcctcgttgctgaggaggggagatggcaggcatgaccgatatgccgatgaggccggcgcggccgggcccgccgatgcagcaccggggccctccgccgatggcgcgcctccgccccgaaccaatcgaccgcgagaagacctgccctctgctgctcagggttttcacaagggttgctggtcaccaccaaaatgaagagttttctgtgagagggaaagaaccaaaggatgaagttcagatttacacatggaaggatgccactctccgtgagcttactgatcttgtgaaagaggttgctcttccagcaaggaaaaggaacgcgaggctttcttttgcatttgtatacccagacaagaatggtcgttttgttgtcagacaggtgggttcgaccttcgcttatggccatggaagaggtgatgatgccaaaactcttgcagagcttgggttccagattggcgattacctgagcgtcgcgatcattgaagagggagagctcctccagtgtgc

SEQ ID NO: 203993 - DNA, 764 bp, Zea Mays
cggagcaccagctgctccctaatcaggcgaacgcgagatcgggtgtcgctgtgaacgatgagtgcatgctgaagtttggcgagctgcagtcgaagaggctgcaccgcttcataactttcaagatggacgacaagttcaaggagatagttgtggaccaggtcggggatcgcgctaccagctacgatgacttcacaaacagcctccctgagaatgactgccgatacgcgatctatgatttcgactttgttactgcagaggatgtccagaagagcaggatcttctatatcctatggtccccatcctccgccaaggtgaagagcaagatgctttatgcaagctcaaaccagaaattcaagagtggcctcaatggcattcaggttgaactccaggccacagatgcgagtgaaatcagcctcgatgagatcaaggatcgggcacgctaggcgcaccgccatcgcgagtttcatggtcacgcatcatggactcgcctactactgtggatttgtacgccattatagacttggtgctgcgaaagactgctttggtgatttgtgggtttgttgctgtgtaaaaagatcctcatggcttccagaagaccatgaaggtttggatctatcatgtaattccttgttatctgccaattatgtatggactatggacatgtgttgcgctgttcaactcactacaaataagtaatcgatatattccctacccatgaatcggtgacaattgtctggagaagcttagtttgatttctggaaaaa

SEQ ID NO: 203994 - DNA, 1835 bp, Zea Mays
gaggcaccagctcggggagatgggagttggctacagaccagagccatcaagtttgacacgctgctcccttgttctcttcctgagaaagagaggacgggctcacatggaaagtttcctttctgtagccctgggtgaattggtgactagatcaataaatttcatcatcaacaagttctcgaagccgccgacacttgccatggaggaaagcctacaaaggactcttctccgagcacaggtcatcgacgaggaggccatggggcggcacattccaaatcaagccatgatccagcagttaggcatgctgagagatgccatgcaccggggctcttacgcactcgacgccttcaggtacaagcctcactatggagaggacgacagtgttcaagttgtgagtggattcatgtccctatccaagttaccctttgcaaaggatccctatttcttcagtcgaactgcacagtctcgggaacaactacaagaggcacttgacagattgggctccatgattgttgatctgaatgagttggtgatgttcttggcgagctaccctcgtctgcatcgccaaccttacagcatgcatatcttactgggtaactgcatgtttggtcgccaggtggaagcagaacttgtcattaattttttgctgcacacacagcctcatagctctgaagaactggaggtcctgccaattatcggtccatgcagagtcggcaagagcaccctagtcgctcatgtttgcaaagatgaaagagtccaagatcatttctcagaaatcttgtggctgaatgaccttgcttttacagatgacgagcgagctttcagacagggatatgcaatggagcatcagaatcaagtgtcgaactggaacaaagacaagagatcgctagttgttatagaactatctggaaatctccatgaagatgcttggaacaggttctatcttgcttgcaaacggagcttttgtagcgggagtaaaatcgtagtcacaagcagttcagacagagctgcaaagtttggaacagcacaggctctagctctgaagcatctatctcatgaagcatactggtatttcttcaagacacttgcgtttggaagcatggatcctgagacacacccaaggcttgcacaggtagccatggagatagccagaacgcagaatcgttcaatcaacgccgcgtacatcatctgttatttgatgaggaacaattttaacatccacttttggtgcaaggttctgaggttcttcagagtgttcgtccagaagcatgtctccagattcggcacgcatccatacgatcttctgaaccagaacagaccaataaggattagccgaatgggtacagcttctgaatatttcactattcatcgtcagtatcattgctcttcacaagaggaggttcctaagataagagtccacgatgtggtgtatggaagcatgaagacttgcagaaaatttgaggtcctatcatggagatctccaatacccccctactacagctatgccaatacttatgagattcaagagcgaaggactacaagtgccaagaggaagcgttctacggaagatggagtcacattttgctaattttgccattacctgtgtcatgtaggaatattgtttcgttcagttttttctgggtaggatgccacaagttacaacacagaccaagtgtaaataaaacctgtgaagtgtcacaggttatagttacagcataatcaaactgtactataataactcttgtatttccgttatgctataataactcttgtatttccgttatgctataatggaaatgaggttgctatataatcatcacactaagcttttctgtttt

SEQ ID NO: 203995 - DNA, 2067 bp, Zea Mays
ccggctcgtcatctactcccctcgctaggcatctttgccgagggcgtacggctcgccatttccttttatcgcgcccaactgccctcccgccgtcacggcaaattccagctcccgcgaccgcgacattgcaccctcgccaccgcgaccagcccgtgcctccacattcatccgtcgccatgtacaaacctgtacggccccattcgttgaacaagtgaagaaactggattgtggaatgctcctctttctcagtgttcgccaggaaggatagatccggaggcgcatcgtacgggtggagatttggaccaatccactgtaggattgatgcaccggcgtttgcttcctcctacaagcttcgaaggcctaatgtcagcaaatctgtcccatgccaatcgaataaacagggatgaatcctacacagggaggcaatcctttggatttcaaaatgtagttgatctaattcatgcatatgctgccaaagctgttactgaacaactagaccaaaatgagaaccttgtatcagtcaatgcagatgtctgcaatttctgggaaaaggatgttatgccgatgcttttctgtaggagttgcagatttttttttaaaaaaaaaacttcagccgaaacaggatgttatatcgaaacattgaattagcagtggatcgtgttcagaaagttgggttcattgtagggatcagcttccaggggttggttcgttgcaggatcaattgccaacctaccactgagtctaaatttagagtctgttggttacccacccttcaggaagttctatattttataaagccatctccaaaactctaaaattagctaggaattatagctatgctgttggagttgctctcagttccttacaccagttgtttctttaattcaggatgcccagaacttgaagaagatgaagcgcaacagcaaaattggaaaagaaattgttgcggccatcaagaagggtggcccaaacccttcatccaacacaactttatcagctatactagagaaagcaagggaacttgatgtccctagagaaattttggagcgcaacatcaaaagggcatcagaaaagggacaagatacttacacagaaaaggtttatgagattcagacaagctcgagtggtgaacataaaagttactgatgcagataaggaccaactgctcaccgttgcgttagatgctggtgctgatgacgtccttgaaccaaattttgatgatgatgactctgaagaagaagcagaaaggttctacaagatagttactacatcagaaaactacccagttttgctatcgaagcttcaagaagaaggattgaagtttgaaactgataatggctacgaacttgttcctctgaacccaattgaggtggacgacgaggccgtggaactaaacaaggaacttgtttcaaatttgctagagcttgatgacgttgatgccgtctatacagaccaaaaatgagtgaattcatgagctacagctctcaattcaagacgcgctcggccaatggactttgttcgagtatattcacttttcattgatgggaaaaaaatgttaggtctttttatgaagcctggttgagcaccatcggctctacccaaaaacttaacctagttatccagcatctttttgatactttggcatttcgcaagctcatgtctataccttggtttcttcccagcccatcgtgttgggatggtttgatacatgttcagaaagcagatgtgagaaaccatagtaaaataatacgttgatgctgatccatttttgggtcttgttaaattgcaatggaaatgctatgattttggtaagcattgaaatgaaaatgctttggctctctgaataaatgaatgtgctcttcgctcctataagctggaaataggaatataaaatacttggaacaaacaatttttctgtcagtttcaatatccaccggaagatctcatcagattggcagttatgcgtaccactttcaccgagtggccacaagttccatagttccatactgtagcattcaggttatcccccaacaaggaaatgcattttcaaaaagtggtgtataaaat

SEQ ID NO: 203996 - DNA, 2463 bp, Zea Mays
ctcgcatcgttatcacatcacatcctgcccggcagcccgggtgcacacccaggctcctcacctcaccaccgcggccgcctgcccaaagcagcccaccactcgggcgcagcaattcgtcgagcatccgccgcgctcgacggccaccggcccaccagggcaccatggcgtccgccacgcgtgctctgggggcgctcctccacagggcctcgtctctgtcttcctccgctcccgctctccggggagcctcgctcctccgcggggacgggcctattggaagcgccggactgttccggaggcatgcggcgaggcggcggatttcgtcgttccagccgctctgcatgggaagacgctcctgcaaaatcgctggaaggaagggaggcaatcctttggatttcaaaatgtagttgatctaattcatgcatatgctgccaaagctgttactgaacaactagaccaaaatgagaaccttgtatcagtcaatgcagatgtctgcaatttctgggaaaaggatgttatgccgatgcttttctgtaggagttgcagatttttttttaaaaaaaaaacttcagccgaaacaggatgttatatcgaaacattgaattagcagtggatcgtgttcagaaagttgggttcattgtagggatcagcttccaggggttggttcgttgcaggatcaattgccaacctaccactgagtctaaatttagagtctgttggttacccacccttcaggaagttctatattttataaagccatctccaaaactctaaaattagctaggaattatagctatgctgttggagttgctctcagttccttacaccagttgtttctttaattcaggatgcccagaacttgaagaagatgaagcgcaacagcaaaattggaaaagaaattgttgcggcgtaggtgttgctggacactgtgaacttgcactatcattttaacagcttggtatttcattgatttcataatttggattattttgagcatatggttaatccaacatgctgtcatctgctagtatatgttgacataagatgttttacctttttggccgtttaaacttaaatcattggacatctgttcccgtgctacagtgtctatatattctcagtctgtagcgtttcatgttattatgttgtgaaggtattgcggttgtatttagtaattagacattgcctgcttaatatctctgaagtgaatggcactatcttacccaagtggtaggccttgttaaaatgaaaaaaaagcaactgacaacaagaccaagcatcagactatcagagttctagtgccattcatttaaattaattaatctggtccgtttctggatatcacacagcatcaagaagggtggcccaaacccttcatccaacacaactttatcagctatactagagaaagcaagggaacttgatgtccctagagaaattttggagcgcaacatcaaaagggcatcagaaaagggacaagatacttacacagaaaaggtttatgagattcagacaagctcgagtggtgaacataaaagttactgatgcagataaggaccaactgctcaccgttgcgttagatgctggtgctgatgacgtccttgaaccaaattttgatgatgatgactctgaagaagaagcagaaaggttctacaagatagttactacatcagaaaactacccagttttgctatcgaagcttcaagaagaaggattgaagtttgaaactgataatggctacgaacttgttcctctgaacccaattgaggtggacgacgaggccgtggaactaaacaaggaacttgtttcaaatttgctagagcttgatgacgttgatgccgtctatacagaccaaaaatgagtgaattcatgagctacagctctcaattcaagacgcgctcggccaatggactttgttcgagtatattcacttttcattgatgggaaaaaaatgttaggtctttttatgaagcctggttgagcaccatcggctctacccaaaaacttaacctagttatccagcatctttttgatactttggcatttcgcaagctcatgtctataccttggtttcttcccagcccatcgtgttgggatggtttgatacatgttcagaaagcagatgtgagaaaccatagtaaaataatacgttgatgctgatccatttttgggtcttgttaaattgcaatggaaatgctatgattttggtaagcattgaaatgaaaatgctttggctctctgaataaatgaatgtgctcttcgctcctataagctggaaataggaatataaaatacttggaacaaacaatttttctgtcagtttcaatatccaccggaagatctcatcagattggcagttatgcgtaccactttcaccgagtggccacaagttccatagttccatactgtagcattcaggttatcccccaacaaggaaatgcattttcaaaaagtggtgtataaaat

SEQ ID NO: 203997 - DNA, 4112 bp, Zea Mays
ctcccgcatcaaggaccggtccttctcaactccgcgccggagcccctccgcctcgggggcgcgatggatctcctcatcgcgcagatcaccaccgaccttcgctcctcggacgcactccggcagtcattggcgctgctgcaggccctgcagcagtgcgccgcggggcgggatgtctccgcgctcgcccgcaccgctgccaccgagatcctgtcggcaccctcctccgcagtctgcaagcgcctggctctcgacctcctccgcgcgctcccgctgccgccagacctcctcgacccgctcctcctctcctccctccgctccgacctctcctttccggaccccgacgtcgcctcctcttccatcgcctcgtttccatccttgccctcccaccttctcccatcgctcctctcctctgcccatgctgaaatcgctaatgcgctctcctcgcccgctgagtcgctgcgcctcggcgctgtcacatctctgtcctcgttcctcccgcgcgatgacctcgtgctcatgtgctccacaaacccctccctcatggcacacgccaccacgtggtgggcccgcctggccgagcttgcgctggactctgcagacgctgtttccgccggtgcgtttgaggcccttgcacggttgttccaggagctagaggggcgccgcatgagccggctagctggtgacaagcttgttgatggagaaggtgtgcttgcagtgcgggcccagtgggcggctgatgccattgatttcatttggtcaaggcgcaatatgctgattgcgcgctccgtggtgatgcctgcggagagcttccgacttactgtgcaccctctagtgcatgcagcgaaaatggttgcttctggtgtagtaaacacgctgcagcggattgccaagccaggggacactacaattgctgatagtgtggagtctagtgcggagaaattggttggagtgtcagacattgtctcgcacttgctgccattccttagttcacttgacccaccactggtgtttgaggtggggatcaatatgctggcacttgcagatgtccctggtggcaagccagagtgggcttcagctgccattattgcaatcctgacactatgggaccggcaagagttctcatcgatgagggagacaattgtaagggctgttgtgaccaatcttcatttgctggatcttggaatgcaggtctctctgttcaaaagactgcttcagatggtgagaaatttgagagcagaatcagatcgtatgcatgctctggcatgtatttgtcggactgctctttgtgttgatctttttgcaaaggaaagtgttcgaagaggtcagaagcctgttccaggaacagacgtgatatcactctttgaggatgtgaggctgaaggaagatctaaatagtgtaaccagcaaaaacttgttcagagaagagctagtggcttccctggtcgaaagttgtttccagctatcccttccactaccagagttgaagaattctgggacagagagcagagttataggagctttagcctacggaactggttatggtgcccttaattggacagaacctgctttggatgtggtggaagtttgcaggccctgtgttctttgggattgtgatggtcgtacctatgcagttgattgctatctaaagttgtttgggaggctttgtcatatatacgacaccagaggtggtgtgaagacaattaaagctggtgcatctcaagatcagattctgaatgagatgcgacttagaaatttgcagctacagcttatcagggaccttcgcgaggttcacactccacgtatatcttcacgcttgatatgggcaatttctgaacactttgatcttgaaggatacaagatgtgcaggctgtgctaatttgtgctcaacgtttgggagcaagaaatacaagagcaggacaacttctcactaaagaactggaagaatttagggcaagtacttcagccgattctgtcaccaagcatcaatcacgttatgtgttgcaagtaataaaatatgtaacaaaccatcccaataacaggtgggttgctgtaggtgatgctacaggggattatccatttagtcaccacaaacttacagttcaattttcagaggcatctgctgcccaagatagaaaattggaggtattagttcataaggccattcaggagctttggaggccgcatcccagtcaattaactctcctacaaacaaagggaatcagtgccttgcataaagagcttccaaaagcctgtactttgaccggcagcagtgatccgtgctatatcgaagcatatcatttggcagatccaactgatggcagaatcaccctacatctgaagattttaaatttgactgagctagaactcaacagggtggacattcgtgttggcctctctggagcactgtattatatggatggtttctctcggactgttcgccacctcggaaatcttgtttcccaggatcctgtccaaagtagtgtgactgttggagtttcacattttgagagatgctcgctctgggttcaagttttgtattacccgttttatggaagtggtggatctgcagactatgaaggaaactatgcagaagaagaggattcgcagatgatgaggcagaagcgctcacttcggcctgagcttggggaaccagttgttttgcggtgccaaccctacaagttccctctcgccgagcttctgctaccattagaatgctctccagttgagtatttccggctatggcctagcctaccagccatggtggagtgcactggcacgtacacatatgaaggcagtggtttcaaggccacggccgctcaacagtatgacagctctcccttccttggtggactgaagtcaatttcttctaagcccttccatcaagtctgctcacatttcatccgaacagtagctggattccagttatgttatgcagcaaagacatggtttggtgggtttgtgggcatgatgatatttggggcaagtgaagtcagccggaatgttgatttgggtgatgagaccaccacaatgatctgcaaattcgtcatgcgtgcgtctaatgaatccatcacgagagagattgaatctgatctccagggctggctggatgatatcaccgacggtgctgtggaatacatgcctgaggatgaggtgaagagcgcggccgctgagcggctgaagatctccatggagaggatctccctgctcaaggcagccaagccaaaggtcccacctgcgaagaccgagcaagaggaggaagaggagcgaaagcagagcgaggaactagatgggtttgggaaccccaagggcccctcgaccctctccaagctcactgcggaggaagccgagcaccgagctctccaggctgccgtgctgcaggagtggcaccagctgtgcaaggagaaagctatgaaagcacaatattgtgtcgcgaacaaactttttgtaacagtagcatttttaagatctggcgtgaagatcaattatgcctcggctgatgctccagaggttaagaagaaaaggaagctccagtgttcgttggacatgcagccgatgtctacccaagctaagctagacatcagcgatgatgtggtggatgctggtttggtggatgatgtggaaggtggaggcatggtgaagacagtcaggtatgttggggaggaaatggaggaagatgatgatgatgatgagggagttcttgcattagtcggctatgccgccgatccagtcctgaccctagagggcgctccagcccccgagggtgctctagccctcgagggtgtcgtgcttggttctccttctgctgcttcaatggaagttcaggttgggtcgctaatgcctccgattgacgatgctgtggcaacaagttctaccctgcccatcagatctcgtccagacgatccaaccacttttggagaggccaccccgagtcaagttcctgaagatgctacaacaacttcgaccagcgttgggatcccaatgggtgttgcacttcgtctgggggatttggagcctttggcgcttgttcctacttcctttgtggcttctacggatgttgctacttctgggctatcttggcttcaccagctttggatcttccagtgtttctattga

SEQ ID NO: 203998 - DNA, 5379 bp, Zea Mays
gcgagcgcttcctctcgtgtttgggcactccatcggacgacgattgcgtatgagacttgctcgtgcgcgagcaggtgcacaatgcgtcgtcgtctgttctccaagcatccgagtgcgaccaatgaatagatcaagaattgatccaatctaaagacataccgctcgactgtgtagaagaggattcgaagtctgtcgcgtaggacagttcggctaggccggaggacctgccggcttgacggagagttgatgcagatctgatcccgtagcaaagtcgaggtagagcgtgctgataacgtgttgagaactatggcatcacggatcaccagatccgctcccttctctcccgttagcagtagagaaacaaaagatatagaggacacgtctctcttcccataagcacgacaaaagaaaaacacgagacacagaatatagggttggacctctggcctccttctcttctatttcttatgagggggtgtacagaatccttatatagagatgtgagacctattaggagcaaagtcggtatttacctatataaccctaactagggttacttaacacaaatgactactcatgcaaatgactttcttctccaattaacctctggattttcttttcagcccaagccggcctattaaccggcccagagactccgaaacgttcgtaaccattcccacctcccgcatcaaggaccggtccttctcaactccgcgccggagcccctccgcctcgggggcgcgatggatctcctcatcgcgcagatcaccaccgaccttcgctcctcggacgcactccggcagtcattggcgctgctgcaggccctgcagcagtgcgccgcggggcgggatgtctccgcgctcgcccgcaccgctgccaccgagatcctgtcggcaccctcctccgcagtctgcaagcgcctggctctcgacctcctccgcgcgctcccgctgccgccagacctcctcgacccgctcctcctctcctccctccgctccgacctctcctttccggaccccgacgtcgcctcctcttccatcgcctcgtttccatccttgccctcccaccttctcccatcgctcctctcctctgcccatgctgaaatcgctaatgcgctctcctcgcccgctgagtcgctgcgcctcggcgctgtcacatctctgtcctcgttcctcccgcgcgatgacctcgtgctcatgtgctccacaaacccctccctcatggcacacgccaccacgtggtgggcccgcctggccgagcttgcgctggactctgcagacgctgtttccgccggtgcgtttgaggcccttgcacggttgttccaggagctagaggggcgccgcatgagccggctagctggtgacaagcttgttgatggagaaggtgtgcttgcagtgcgggcccagtgggcggctgatgccattgatttcatttggtcaaggcgcaatatgctgattgcgcgctccgtggtgatgcctgcggagagcttccgacttactgtgcaccctctagtgcatgcagcgaaaatggttgcttctggtgtagtaaacacgctgcagcggattgccaagccaggggacactacaattgctgatagtgtggagtctagtgcggagaaattggttggagtgtcagacattgtctcgcacttgctgccattccttagttcacttgacccaccactggtgtttgaggtggggatcaatatgctggcacttgcagatgtccctggtggcaagccagagtgggcttcagctgccattattgcaatcctgacactatgggaccggcaagagttctcatcgatgagggagacaattgtaagggctgttgtgaccaatcttcatttgctggatcttggaatgcaggtctctctgttcaaaagactgcttcagatggtgagaaatttgagagcagaatcagatcgtatgcatgctctggcatgtatttgtcggactgctctttgtgttgatctttttgcaaaggaaagtgttcgaagaggtcagaagcctgttccaggaacagacgtgatatcactctttgaggatgtgaggctgaaggaagatctaaatagtgtaaccagcaaaaacttgttcagagaagagctagtggcttccctggtcgaaagttgtttccagctatcccttccactaccagagttgaagaattctgggacagagagcagagttataggagctttagcctacggaactggttatggtgcccttaattggacagaacctgctttggatgtggtggaagtttgcaggccctgtgttctttgggattgtgatggtcgtacctatgcagttgattgctatctaaagttgtttgggaggctttgtcatatatacgacaccagaggtggtgtgaagacaattaaagctggtgcatctcaagatcagattctgaatgagatgcgacttagaaatttgcagctacagcttatcagggaccttcgcgaggttcacactccacgtatatcttcacgcttgatatgggcaatttctgaacactttgatcttgaaggatacaagatgtgcaggctgtgctaatttgtgctcaacgtttgggagcaagaaatacaagagcaggacaacttctcactaaagaactggaagaatttagggcaagtacttcagccgattctgtcaccaagcatcaatcacgttatgtgttgcaagtaataaaatatgtaacaaaccatcccaataacaggtgggttgctgtaggtgatgctacaggggattatccatttagtcaccacaaacttacagttcaattttcagaggcatctgctgcccaagatagaaaattggaggtattagttcataaggccattcaggagctttggaggccgcatcccagtcaattaactctcctacaaacaaagggaatcagtgccttgcataaagagcttccaaaagcctgtactttgaccggcagcagtgatccgtgctatatcgaagcatatcatttggcagatccaactgatggcagaatcaccctacatctgaagattttaaatttgactgagctagaactcaacagggtggacattcgtgttggcctctctggagcactgtattatatggatggtttctctcggactgttcgccacctcggaaatcttgtttcccaggatcctgtccaaagtagtgtgactgttggagtttcacattttgagagatgctcgctctgggttcaagttttgtattacccgttttatggaagtggtggatctgcagactatgaaggaaactatgcagaagaagaggattcgcagatgatgaggcagaagcgctcacttcggcctgagcttggggaaccagttgttttgcggtgccaaccctacaagttccctctcgccgagcttctgctaccattagaatgctctccagttgagtatttccggctatggcctagcctaccagccatggtggagtgcactggcacgtacacatatgaaggcagtggtttcaaggccacggccgctcaacagtatgacagctctcccttccttggtggactgaagtcaatttcttctaagcccttccatcaagtctgctcacatttcatccgaacagtagctggattccagttatgttatgcagcaaagacatggtttggtgggtttgtgggcatgatgatatttggggcaagtgaagtcagccggaatgttgatttgggtgatgagaccaccacaatgatctgcaaattcgtcatgcgtgcgtctaatgaatccatcacgagagagattgaatctgatctccagggctggctggatgatatcaccgacggtgctgtggaatacatgcctgaggatgaggtgaagagcgcggccgctgagcggctgaagatctccatggagaggatctccctgctcaaggcagccaagccaaaggtcccacctgcgaagaccgagcaagaggaggaagaggagcgaaagcagagcgaggaactagatgggtttgggaaccccaagggcccctcgaccctctccaagctcactgcggaggaagccgagcaccgagctctccaggctgccgtgctgcaggagtggcaccagctgtgcaaggagaaagctatgaaagcacagtgaggtcgatttggaccgcgtggatcttcgaaaatctctcttaggcttcgtaaaattcacttcttaaatcatcatttagttttttatatcttttcatcttccaacatttttatatatgttttacactccagagagtcattcttatttttatccttgatagcgagaaatttaaaatagaagatgcatatattttgatggctacttatatgttgtttagaatctctagagctaatacttaaacagctaataaattattaactaagttgagtcatctaatgtactaattgttagctgagaggtagctaacaattagttacggtattaactgagtgtatttggaatccaataactaattttttgtaactaactgttagttctagaggttcccaatggtgctttgtaaaagctgttaaagaagttggagaagctatttaagggtaagtgtattatttaaatatctattcctgttaattaggaatgatagttttctggagttgcgcgcctgtatgattttgtattttttttttgtcttccatcttttttgcgtaactatcctgctgatttcactcactgtataccgtcgcagatattgtgtcgcgaacaaactttttgtaacagtagcatttttaagatctggcgtgaagatcaattatgcctcggctgatgctccagaggttaagaagaaaaggaagctccagtgttcgttggacatgcagccgatgtctacccaagctaagctagacatcagcgatgatgtggtggatgctggtttggtggatgatgtggaaggtggaggcatggtgaagacagtcaggtatgttggggaggaaatggaggaagatgatgatgatgatgagggagttcttgcattagtcggctatgccgccgatccagtcctgaccctagagggcgctccagcccccgagggtgctctagccctcgagggtgtcgtgcttggttctccttctgctgcttcaatggaagttcaggttgggtcgctaatgcctccgattgacgatgctgtggcaacaagttctaccctgcccatcagatctcgtccagacgatccaaccacttttggagaggccaccccgagtcaagttcctgaagatgctacaacaacttcgaccagcgttgggatcccaatgggtgttgcacttcgtctgggggatttggagcctttggcgcttgttcctacttcctttgtggcttctacggatgttgctacttctgggctatcttggcttcaccagctttggatcttccagtgtttctattga

SEQ ID NO: 203999 - DNA, 2427 bp, Zea Mays
atcctaagttgacgctgatgtcaggtgtatgtcgcggaccagcaataaatacccgtgcctggaggagattacatcaattgatcagcgtggcaggcatcaaaaacagtcgaggccgctgcgaggcagcagccaggaacaacaagctaggccccctcacgcagaccgcacgaccgagcgcgcggcattgaccgacccatcgccgccgccgccgcctcgatcgaccatgacgcttgcgagcacggacaaggtggtgctgggatgcatcgcgttcagcatcttctgggtgctggccgtcttcccctcggtgccgttcatgccggtgggccgcaccgcgggctcgctcctgggcgccatgctcatggtgctcttccgcgtgatgaccccggaggaggcctacaaggccatcgacctcccgatcctgggcctgctcttcggcaccatggtggtcagcatcttcctggagcgcgccgacatgttcaagtacctcggcagcgcgctggcgtggcggagccggggcagcaaggacctgctgttccgcgtctgcctcgtgtccgccgtggccagcgcgctcttcaccaacgacacctgctgcgtggtgctcaccgagttcatcctcaagctggcgcggcagaacaacctgcccccgcagccgttcctgctggccctcgcctccagctccaacatcggctcctccgccacgcccatcggcaacccgcagaacctcgtcatcgccgtgcagagcggcatcaccttcggccagttcctcgtcggcgtcttcccggccatgatcgtcggcgtcgccgccaacacctgcatcctgctctgctacttctggatgtcgcgcgcctcgtccgtcaacgggggcggcgccgacgccgactgcgtcggcgagctcatccgccggagcgatagcctcagccgggccgacactacgctaggcatgagcatgaggagccggagctacaactcggagggcggcgacatccaggtcgccatcaggtccatgcgcgcgtccagcatgtcgcaggagatggtggaggtgtccaccgtctgcgacaggcgcgacgacggcggtgccgggcccagaaaggtcaccaggaccaccagccaccagcgcagcgtcatcatcgaggacgcgcccgaggctgacgccgccgacgacgacgacgatggccacaagggcaaggacggtgacagcgtcaccaacaaggagaagaggtggaaggtgctcgtgtggaagactgccgtgtatctcaccacccttgggatgctggccgcgctcctcatggggctcaacatgtcctggtccgccatcactgctgctcttgtccttctcgcgcttgatttcactgacgcacaggcgtgcctggagaaggtgtcatactctttgctgatcttcttctgcggcatgttcataacggtcgacggcttcaacaggaccggcatacccaatgcgctctgggagctggtcgaaccgcactcgagaatcgacagcgccaaaggcacggcgcttctcgcagtcgtgatcctagtcctttcaaatgtggcctcaaacgttccaactgttcttctgctgggcacaagggtggcagcgtcagcaggcacaatctccccagagtcagagaagaaagcctggctcatactagcatgggtgagcacggtggccggcaacctgaccctcttgggctcggcggcgaacctgatcgtctgcgagcaggcgcggcgggcacagttcttcgggtacaacctcaccttctggagccacctccgcttcggcttgccgtcgacgatcatcatcacggcgatcggcctgctcatcgtcgccagttactgaaccccacacaagctagggtctcggcctcgcacaaacggcggggtgtgtagccagatggcaggcagaacgctgcagaaaacagcatgcagcactgcctgacatcgaaggagatgttgtactgattggcctttgtttgtacgttgtaacagtttttatgtcgttcgtgtaagtctgtacgtttcgcgcaaccgatgccgcaaggcgccgggttgcccatctgctaaggcaaataatgcgcaagactagtagatggcatggagtatagaaggccggcaccactgttctaggaaggcaaaaacttgctctagctagttcaggtaggagagccggcgaaaatgtatggtgtgcttctcgatttggtaatgtcaagggacttgtccttatgtttggagcaaagaaacatggttgtacgattgtgccactagtacacagaagctctataataacggttctagagctatttgtggtgacgtttttcagtaccgtcagtgctaggggttagtggaaatcgatatttccaatggtggctattttggatctgcaagtgaaaatgctattttgactggcagttcttttaaagcatccgtcagtgg

SEQ ID NO: 204000 - DNA, 2745 bp, Zea Mays
cagcgccagcgcggcagagagtcgagaccttctagctaggccgctgccacgtcaaaactagctcctccagacaaccaatcagctagccgaagccggtcgattagcatgcagcagcgctagtagacgtcgtctccgggtctccactctccacacagaaacccatacaaaatccgcatccagaatcaccggagatacgagtccgcgcgtacgttgcagttgaattgtgaagagaggctgtgcgcagtgctgctgctgcttcttcttcttcgacgcatgcacgcacatggatggtgctgctgagtgctgacctccggccgtacgtgatcttcgatctccacacggcggcaagcgatcgagaggcgtggttcccgtggcgtcaaccgacacctagcagctgctagctcatctgcttgatctctagctgagactccgagcaaaatgcagcagccaggaacaacaagctaggccccctcacgcagaccgcacgaccgagcgcgcggcattgaccgacccatcgccgccgccgccgcctcgatcgaccatgacgcttgcgagcacggacaaggtggtgctgggatgcatcgcgttcagcatcttctgggtgctggccgtcttcccctcggtgccgttcatgccggtgggccgcaccgcgggctcgctcctgggcgccatgctcatggtgctcttccgcgtgatgaccccggaggaggcctacaaggccatcgacctcccgatcctgggcctgctcttcggcaccatggtggtcagcatcttcctggagcgcgccgacatgttcaagtacctcggcagcgcgctggcgtggcggagccggggcagcaaggacctgctgttccgcgtctgcctcgtgtccgccgtggccagcgcgctcttcaccaacgacacctgctgcgtggtgctcaccgagttcatcctcaagctggcgcggcagaacaacctgcccccgcagccgttcctgctggccctcgcctccagctccaacatcggctcctccgccacgcccatcggcaacccgcagaacctcgtcatcgccgtgcagagcggcatcaccttcggccagttcctcgtcggcgtcttcccggccatgatcgtcggcgtcgccgccaacacctgcatcctgctctgctacttctggatgtcgcgcgcctcgtccgtcaacgggggcggcgccgacgccgactgcgtcggcgagctcatccgccggagcgatagcctcagccgggccgacactacgctaggcatgagcatgaggagccggagctacaactcggagggcggcgacatccaggtcgccatcaggtccatgcgcgcgtccagcatgtcgcaggagatggtggaggtgtccaccgtctgcgacaggcgcgacgacggcggtgccgggcccagaaaggtcaccaggaccaccagccaccagcgcagcgtcatcatcgaggacgcgcccgaggctgacgccgccgacgacgacgacgatggccacaagggcaaggacggtgacagcgtcaccaacaaggagaagaggtggaaggtgctcgtgtggaagactgccgtgtatctcaccacccttgggatgctggccgcgctcctcatggggctcaacatgtcctggtccgccatcactgctgctcttgtccttctcgcgcttgatttcactgacgcacaggcgtgcctggagaaggtgtcatactctttgctgatcttcttctgcggcatgttcataacggtcgacggcttcaacaggaccggcatacccaatgcgctctgggagctggtcgaaccgcactcgagaatcgacagcgccaaaggcacggcgcttctcgcagtcgtgatcctagtcctttcaaatgtggcctcaaacgttccaactgttcttctgctgggcacaagggtggcagcgtcagcaggcacaatctccccagagtcagagaagaaagcctggctcatactagcatgggtgagcacggtggccggcaacctgaccctcttgggctcggcggcgaacctgatcgtctgcgagcaggcgcggcgggcacagttcttcgggtacaacctcaccttctggagccacctccgcttcggcttgccgtcgacgatcatcatcacggcgatcggcctgctcatcgtcgccagttactgaaccccacacaagctagggtctcggcctcgcacaaacggcggggtgtgtagccagatggcaggcagaacgctgcagaaaacagcatgcagcactgcctgacatcgaaggagatgttgtactgattggcctttgtttgtacgttgtaacagtttttatgtcgttcgtgtaagtctgtacgtttcgcgcaaccgatgccgcaaggcgccgggttgcccatctgctaaggcaaataatgcgcaagactagtagatggcatggagtatagaaggccggcaccactgttctaggaaggcaaaaacttgctctagctagttcaggtaggagagccggcgaaaatgtatggtgtgcttctcgatttggtaatgtcaagggacttgtccttatgtttggagcaaagaaacatggttgtacgattgtgccactagtacacagaagctctataataacggttctagagctatttgtggtgacgtttttcagtaccgtcagtgctaggggttagtggaaatcgatatttccaatggtggctattttggatctgcaagtgaaaatgctattttgactggcagttcttttaaagcatccgtcagtgg

SEQ ID NO: 204001 - DNA, 2038 bp, Zea Mays
agctggcattgtcccgtcccctgtcgacttcctctccatttcatttccgttccaggtctcctgtttccatcctcttccacggttccacttccacccccatctcctcgccctcggcaagcccagcaaccccaatccccaatcccgtccgcttctttccccgtccccgaccttgccgaggaacctcccgctcccaaatcctagcctctcctccctcgccgctcccctccccatggaggacgaggacgccggcctcggcgacgggggcgaggcctcccctccgcaccatgccgcggcgtcgggcgaccgggcgcgggacttggcggcgtccccgaccagctcgcgctccgtgacgcagacggtgaacgggtcccaccgcttcgtgatccagggctactcgctcgccaagggcatgggcgtggggaagcacatcgccagcgacaccttcaccgtcggcggctaccagtgggcgatctacttttacccagacgggaagaaccccgaggacaactccggctacgtctcggtcttcatcgcgctcgcgtccgacggcaccgacgtgcgcgcgctcttcgagctcacgcttctagaccagagtggcaagggcaagcacaaggtgcactcgcactttgaccgctccctagagtccggaccgtacactctcaagtaccgcggatccatgtggggctataaaaggttctttcggcgtaatgctcttgagcaatcagattttcttaaagatgattgcttgaagataaactgtactgtgggtgttgtagtatcaactatggattattccaggccacattcaatagaggttccagagtctgacataggctatcattttggaactcttttggacactctggaaggtgtagatgtcatttttagtgtagcaggagagaagtttcatgcccataagttggtattggctgcccgatcttccttttttagatctgaatttttcgaccatgaatctgatgaagagaagaacgaaactggtacaggggatgaaatcaaggagatcgttattgatgatatggatcctgtagtgttcaaggcggtgcttcactttatgtacagggacaatcttgttaatgatgatgagttgatggcatcaagctctgactgctctatatttgatagtttagctgggaagttaatggctgctgcagacaaatatgagttgccaaggctaagattgttgtgtgaatcttacttgtgcaagcatgtttctgtaaactccgtggcaactactctagcattggctgatcgataccatgctatcgagcttaaatctgtttgcctaaaatttgctgctgaaaacctttcggctgtgatccggaccgaggggttcgactatctcaaagacaactgcccatccctgcagtcagagatactgcggacagttgccggatgtgaggaacaatgtagcagcggcgtgaaaagccagagcgtatgggcgcagctctctgacggcggcgacaccagcggtcgcagggtgaggccaagggtctgagacgcgatcctgcaagcactaacctttgtaatcaaactgtggcggacgcgatgaactcacagaagggcgacccgagttgacggtggtttaaacagacacaatgaagctaatcgttcacaacttcagtacaaaactacacaggcaagacactgcctgatacagtgcgatagccgctgccatcctctcttcgcttcgcgggtggcaacccaatgccttgaggttttgctcaaccaaatgtcgccaccaggaactccttgtaaacgctcatgaacttggccacgaaagctgtagagtggaatgggggaataagttaagtatatatggcttctgtattaataatcattatgcaaatctaagacacgcagatactaaaagcaaataagaacaatcgtgggcattcatatacatgtaccaactgattttgttccagattaatgataagaccaactcatataaacgtaagcaagtaccttctagatgaaaaatagcctttgatccgaggcgcatcttgtgttcctgcaa

SEQ ID NO: 204002 - DNA, 1979 bp, Zea Mays
agctggcattgtcccgtcccctgtcgacttcctctccatttcatttccgttccaggtctcctgtttccatcctcttccacggttccacttccacccccatctcctcgccctcggcaagcccagcaaccccaatccccaatcccgtccgcttctttccccgtccccgaccttgccgaggaacctcccgctcccaaatcctagcctctcctccctcgccgctcccctccccatggaggacgaggacgccggcctcggcgacgggggcgaggcctcccctccgcaccatgccgcggcgtcgggcgaccgggcgcgggacttggcggcgtccccgaccagctcgcgctccgtgacgcagacggtgaacgggtcccaccgcttcgtgatccagggctactcgctcgccaagggcatgggcgtggggaagcacatcgccagcgacaccttcaccgtcggcggctaccagtgggcgatctacttttacccagacgggaagaaccccgaggacaactccggctacgtctcggtcttcatcgcgctcgcgtccgacggcaccgacgtgcgcgcgctcttcgagctcacgcttctagaccagagtggcaagggcaagcacaaggtgcactcgcactttgaccgctccctagagtccggaccgtacactctcaagtaccgcggatccatgtggggctataaaaggttctttcggcgtaatgctcttgagcaatcagattttcttaaagatgattgcttgaagataaactgtactgtgggtgttgtagtatcaactatggattattccaggccacattcaatagaggttccagagtctgacataggctatcattttggaactcttttggacactctggaaggtgtagatgtcatttttagtgtagcaggagagaagtttcatgcccataagttggtattggctgcccgatcttccttttttagatctgaatttttcgaccatgaatctgatgaagagaagaacgaaactggtacaggggatgaaatcaaggagatcgttattgatgatatggatcctgtagtgttcaaggcggtgcttcactttatgtacagggacaatcttgttaatgatgatgagttgatggcatcaagctctgactgctctatatttgatagtttagctgggaagttaatggctgctgcagacaaatatgagttgccaaggctaagattgttgtgtgaatcttacttgtgcaagcatgtttctgtaaactccgtggcaactactctagcattggctgatcgataccatgctatcgagcttaaatctgtttgcctaaaatttgctgctgaaaacctttcggctgtgatccggaccgaggggttcgactatctcaaagacaactgcccatccctgcagtcagagatactgcggacagttgccggatgtgaggaacaatgtagcagcggcgtgaaaagccagagcgtatgggcgcagctctctgacggcggcgacaccagcggtcgcagggcggacgcgatgaactcacagaagggcgacccgagttgacggtggtttaaacagacacaatgaagctaatcgttcacaacttcagtacaaaactacacaggcaagacactgcctgatacagtgcgatagccgctgccatcctctcttcgcttcgcgggtggcaacccaatgccttgaggttttgctcaaccaaatgtcgccaccaggaactccttgtaaacgctcatgaacttggccacgaaagctgtagagtggaatgggggaataagttaagtatatatggcttctgtattaataatcattatgcaaatctaagacacgcagatactaaaagcaaataagaacaatcgtgggcattcatatacatgtaccaactgattttgttccagattaatgataagaccaactcatataaacgtaagcaagtaccttctagatgaaaaatagcctttgatccgaggcgcatcttgtgttcctgcaa

SEQ ID NO: 204003 - DNA, 4167 bp, Zea Mays
cagatcacgactcgatctgtttctgatagacggtgattttgcaaaatcgacccggaggacggagacggagtagaaccgcgcagcgaagcagcagcggcaccaaaagccctcgcgttggtcgcggctgccgcccgccgcccaccgccggtcgccactgccggtcgagtcccatcgagccgactccgcagcgctctccgatccgggtggctgcggcgccggcatggcgcggttcgaggtgaacggcaagtcggtgcaaggcgtggacctgctgcggcggcgccactgggcgtcgcgtctcgacttctggcccttcctcgcgctctatgcgctttggctgctgctcgccgtcccggcgctcgacttcaccgatgctctcatagtcctggccgcgctctccgctgctcacatcctcgccttcctcttcacggcctggttcgtcgatttccgggccttcatcgggtactccaaggtcaagaatatctgtgccgctaacgtgtgtaaggtgactccggctaagtttttggggtcaaaggagattgtacccctgcacatacagagaaatgtggcctcaacttcggttgcaggtgagacagcggagatttactttgattttcggaagcagaggttcatctactctgcggagaaagataactttttaaaactccggtacccaacaaaggagttgatcagtcattatgccaagggcactggttatggaactgaggccaagattagcactgctgtggataagtggggtagaaatgtatttgagtatccacagcccacatttcagaaattaatgaaagagcaaataatggaaccattttttgttttccaggttttttgtgttgttctttggtgcctggatgagtattggtactacagtttgtttacacttttcatgcttttcctgtttgagtctactatggcaaagaataggctgaagacattgactgagctaagacgtgtgaaagttgatagccagattgtgttgacctatagatgtggaaaatgggttaaaattcctgggactgaactactaccaggagatattgtgtcaataggccgctcaactagtggtgaagatagatctgtaccagcagatatgctattgttagctgggtctgcaatagtaaatgaagctattcttacaggagaatctactccacagtggaaggtctcaattgctggacgtagtcctgatgatatgctatctataaagcgggataagaaccatatcctatttggtggcactaaagtattgcaacacactgcagataagtctgtaaatcttcgagcacctgatggtggctgtctagcttttgtattgaggactggatttgagactagccaagggaaattgatgaggactatcttattttcaactgagagggttactgcaaataacaaggaaagtggcctgtttatactctttttgctcttctttgcaattattgcgtctggttatgtgcttgtgaagggactagaggacccaacaaggagtagatataaacttttattgagttgttcattgattattacttctgtgatacccccggaattgccaatggaactttccatagcagtcaacacatctttaattgcattggctcggcgtggtattttctgcacagagccattcagaataccgttcgctgggaaggttgacatatgctgctttgataagacagggactctgacatcagatgatatggagttccaaggtattgttactttggaagatgacactgagttaatatctgatgcaaataagctgcccctccgaactcaagaagtactttccagttgtcatgcattggtatttgtcgacaacaagctggttggtgatcccctcgaaaaggctgctataaagggcatagactggatctacacatctgatgagaaggccatgtctaaaaggcctggtggtcaacctgtacagattgtgcacaggtaccattttgcttctcacttgaagagaatgtctgttattgtccgtattcaggaaaggttttacgctttcattaagggtgcacctgagactatccaagagagattagttgatttacctgctgcatatgtggagacatataagaaatacacacggcaaggttctcgggtcttggctcttgcatacaaattgcttcctgagatgcctgttagcgaagctagaagtttggaaagggatcaagtagagagcgacctaacgtttgctggctttgcggtcttcaactgccctataaggggtgactctggtgctgttttacaagaactcggacaatcttcccatgacttggtcatgatcaccggagaccaagcgttgactgcctgtcatgttgctagccaagtacatatatcttccaaacctgttttgatcttgacacggataaagactggcggttttgagtgggtttcgccagatgaaactgatagagctccatatagtgctgtggaggttgcagtgttatcagaatctcatgacctttgtattaatggggactgttttgaaatgctacaaagtactgaggctgttctccaggttatcccttatgtgaaggttttttcacgtgttgctccagaacaaaaagaacttgtactaactacattcaaaagtgttgggagggtgacactgatgtgtggagatggaaccaatgatgttggtgcactgaagcaggcacatgttggcattgctcttttgaatgctgaaccagttcagaaagtcaactcaaaatccaaagctgaaaataaatctgggaaattgaaaaaacagaagcctggtaatgaagcatcatcacgagtgactccggcaaccaatagttctgctaaagcatcgagcagccgccccttgactgctgctgagagacagcaagaaaagttgcagaaattgttggatgaaatgaatgatgaaagtgatggccgctcagcaccaattgttaagcttggtgatgcttctatggcttcacctttcacagcaaagcatgcctctgttgcccctactcttgacatcatccgtcaggggagaagcaccctagtcactacacttcaaatgttcaagattcttgggctcaattgccttgcaacggcttatgttctcagtgtcatgtacctggatggtgtcaaactgggcgatgttcaggctacaattagtggtgtctttactgcagccttcttcctcttcatctcccatgcccggccactccaaacgctgtctgcagagcggccgcaccctaacatattctgtgcatacgttctgctctccattcttggccagttcgccatgcacatactcttccttatcacagctgtcaatgaagcatccaagcatatgccagaggaatgcatcgaacccgactcagacttccatccaaaccttgtgaatacagtctcgtacatggtgaacatgatgatccaggtggcaacctttgctgtaaactacatgggccacccatttaatcagagcatatcggagaacaagcccttcaagtacgcattgtatggagcggttgctttcttcacagtgatcacatcagatatgttcagggatttgaatgactacatgaagcttgagcctttgccggagggaatgcgtggcaagttgatgttgtgggctattctaatgttttgtggttgctacggatgggagtggctcctccgatgggtgttcccagggaagatgccggcgtgggagaagcgtcagaaacaggcagttgcaaacttggagaaaaagcgcgactagaatccttttttattatttgcactttattctttaccttttgctgctgcccattggttacttggcagtacatactgatcatgttttgtcatagttgcattctaatctgtagcctaggggaattttttggagtgtaggccctaaatgataggaggatacacagggtcggcactttgcatactggtcagcaggattattaaaactttcagttacaatatgaaatcttatatttagatggcaatgatatcggatgatgtacaatgcaaaatacagaagctatcttaggctttcattcttttgctgttatgatcttagtggccctttggaggtacattgtaatgtcgatcattgaaaactcgagtttctgggttgtttcgaagaagatctgtttcagtgtatcattagttgatttggtgaaagctctgcttgataac

SEQ ID NO: 204004 - DNA, 560 bp, Zea Mays
atgtcagcctggccacgtcctaaatcagcatgtcaggtataagagggaaccttgcataaaacccctcacgttatcgcgcacatctcctgatcctcgttcctctccgccccgcttgcgccgcgcctccgcccccgtctcctgtgagatcagctccggcggcacgcggatatgactacttcaaggcgtcttgctgacaggaagagtgcaaagttccagaagaacatcacaaagaggggttctgtgcctgagaccacggtgaaaaagagcaatgactaccctgttggacctatagttcttggattcttcatttttgtggtcattggatcatccttgttccagataatcaggacagcgacaagcggtgggctggcctgaattcactgagctaaaaccagaaatttatctgtccgtgagctgggaggcagtatctgtgttgtgtagcaaacttgttcatggatatgtagtgcgaatgtcactactgttctgtttgcagtatcaaaagagtttaaactgatgttgtaaccatgcaaaggctgaaaattttaaagagtaaaaagaaa

SEQ ID NO: 204005 - DNA, 1998 bp, Zea Mays
gaccagatgcccagttgcccaccacggcgtccagtcatgtccagcaccaccgccgctgctttccgcctgggccagcgcgtgcacgccgccggcgacccccgccgcctaggcacggtgcgctacctgggccccgtagagggccacggcggagtctgggtcggcgtcgactgggatgatggcgctggcggccggcacgatggctcgctcgccggccgccgatactttgttgccgtgggagagtgctcggccaccttcgcgcgccccacggcgctcagcggagggatctcgctcccggacgcgctccgcctacgttaccgcgttcaggacttcaccaaggaggaacaggatgagatgtatgtcttctcgacaagccagaagcgggtctcggttgaatttgttggcacagacaaagttcaggagaagctcaacaacttcaatgagttggccagtgcatccgtttcttacatgggagtgagctcaattggagcgcccaatgaactaaacagtttggttccaaatctcaaacttcttgacttaactggaaatctgttctcacagtggcaagatatattctctctttgtcaagcactggcatccctggaagttcttaatttgacaaataataccatggagaatgatgttgtagaaactccaatgctcgagaatatccgaattcttgttctcaataactgtggtgtaacatgggaactggttgaaaagattaaagtttccttttcatgtatcagtgaactccacctgatgtcaaacaggcttaatatgatcatgaccctagatggaaagttcgtacaaggtttcaacacactgcggctcctaaatctagaagataatcatattgattcatgggatgaaattgtgaaactttcttacttaagaagtttggaacaactccatttgaacaaaaacaggttaaagcatgtgaaatatccatctaatctttcaccagatggacctattgatgatgcagctgctgtgccatttgaaaatttgcaagttcttttgttagtggattcacttaacctgttcccaagtttaagggatgtcaggctttctgacaatcctgtagctgatcctgccaagggtggtgctcctcgttttgtgcttgttgctcgacttggaaaagttggaatactaaatggcagtgagataagtccacgtgaacggagggaatctgaaatacgatatgtccgccttgttatgggaaaaatagaatcaaatgaccaagaagagatcagacggcttcaccctagattcgctgaactgaagtcctttcatggtattgaagatgagaagccaacttcaagcatatcagggccacagaagatggcttctggccttataagtattacgttgaaatgtgtgggtccatcaatgggtgagaagcaaccactgacaaagaaactgcctgcgacaacaactgtcgggaagttaaaatctttgtgcgaaagcttcttcaaactgaaggacataaaagtgaaactgttcgtcgaagaagagggatgccctctaccacaaccagtggaggaggacacggcctctctgatggagcttggaattggctcgggcgcaaccattgttgtggacgaagagagctagccagtcgtctttagagaagggccaactgtatggcgcaaactgacgcttcagctgttattaagttttcgaagagaagatagctgatgacgctcttcgttgcccttatatacttctttctgtgggaatatgcacgtgatgaatattggtgcgggtttgggcttcaaaatggactagcatagtaaaaacattgtgaggacggttgtttggttgggagaagttttctttttttattttcgtcaacgcaacgaactacgtcaaatttttttttgattactgtggtgtgtcgctgacgttttccacaactgaaaccactctgtcattgtgccacagataatttttctttttatttaataagcaaaagaaattagggcctccttccataca

SEQ ID NO: 204006 - DNA, 1626 bp, Zea Mays
gttagtgcagtactgcagtgcgtgccgaccgacgcctcctgaatttgctgcctccacagttcctttgatccgatgagatgtatgtcttctcgacaagccagaagcgggtctcggttgaatttgttggcacagacaaagttcaggagaagctcaacaacttcaatgagttggccagtgcatccgtttcttacatgggagtgagctcaattggagcgcccaatgaactaaacagtttggttccaaatctcaaacttcttgacttaactggaaatctgttctcacagtggcaagatatattctctctttgtcaagcactggcatccctggaagttcttaatttgacaaataataccatggagaatgatgttgtagaaactccaatgctcgagaatatccgaattcttgttctcaataactgtggtgtaacatgggaactggttgaaaagattaaagtttccttttcatgtatcagtgaactccacctgatgtcaaacaggcttaatatgatcatgaccctagatggaaagttcgtacaaggtttcaacacactgcggctcctaaatctagaagataatcatattgattcatgggatgaaattgtgaaactttcttacttaagaaggatctaatgacatagatgacttttcttcagtggattcacttaacctgttcccaagtttaagggatgtcaggctttctgacaatcctgtagctgatcctgccaagggtggtgctcctcgttttgtgcttgttgctcgacttggaaaagttggaatactaaatggcagtgagataagtccacgtgaacggagggaatctgaaatacgatatgtccgccttgttatgggaaaaatagaatcaaatgaccaagaagagatcagacggcttcaccctagattcgctgaactgaagtcctttcatggtattgaagatgagaagccaacttcaagcatatcagggccacagaagatggcttctggccttataagtattacgttgaaatgtgtgggtccatcaatgggtgagaagcaaccactgacaaagaaactgcctgcgacaacaactgtcgggaagttaaaatctttgtgcgaaagcttcttcaaactgaaggacataaaagtgaaactgttcgtcgaagaagagggatgccctctaccacaaccagtggaggaggacacggcctctctgatggagcttggaattggctcgggcgcaaccattgttgtggacgaagagagctagccagtcgtctttagagaagggccaactgtatggcgcaaactgacgcttcagctgttattaagttttcgaagagaagatagctgatgacgctcttcgttgcccttatatacttctttctgtgggaatatgcacgtgatgaatattggtgcgggtttgggcttcaaaatggactagcatagtaaaaacattgtgaggacggttgtttggttgggagaagttttctttttttattttcgtcaacgcaacgaactacgtcaaatttttttttgattactgtggtgtgtcgctgacgttttccacaactgaaaccactctgtcattgtgccacagataatttttctttttatttaataagcaaaagaaattagggcctccttccataca

SEQ ID NO: 204007 - DNA, 718 bp, Zea Mays
atgtacttgataaatcactagtgatgagaagccaacttcaagcatatcagggccacagaagatggcttctggccttataagtattacgttgaaatgtgtgggtccatcaatgggtgagaagcaaccactgacaaagaaactgcctgcgacaacaactgtcgggaagttaaaatctttgtgcgaaagcttcttcaaactgaaggacataaaagtgaaactgttcgtcgaagaagagggatgccctctaccacaaccagtggaggaggacacggcctctctgatggagcttggaattggctcgggcgcaaccattgttgtggacgaagagagctagccagtcgtctttagagaagggccaactgtatggcgcaaactgacgcttcagctgttattaagttttcgaagagaagatagctgatgacgctcttcgttgcccttatatacttctttctgtgggaatatgcacgtgatgaatattggtgcgggtttgggcttcaaaatggactagcatagtaaaaacattgtgaggacggttgtttggttgggagaagttttctttttttattttcgtcaacgcaacgaactacgtcaaatttttttttgattactgtggtgtgtcgctgacgttttccacaactgaaaccactctgtcattgtgccacagataatttttctttttatttaataagcaaaagaaattagggcctccttccataca

SEQ ID NO: 204008 - DNA, 1847 bp, Zea Mays
acgtcggtgcacgcgcaataagcgtagcgaactcgctcacacacaccggaccggaaggcgcgcgctataaaaaaaactcgtggtcgtcgtgggatgggggtgtgggtgtcgggcgggccagcagctggacaagcaagcaagcaagcaagccaataatggcgtctcactctcatcggtcccggtctcccacggcgccctgtcccagctgggggcacgcccacgcgccgcggtgccggcggcggctcgtccgggcactgctgctcgtagcggcgctggcgctggcggcggcaggtggtggtggtcgtggctccgcggccgccgccgccgccgccacccagcagaggatcccggccatcttcatgttcggcgactccatcgtggacccgggcaacaacaacaaccggctgacggaggccaaggccaacttcccgccgtacgggcaggacttccccggcggcgtcgccacggggaggttctccaacggcttggtccccggggacctcctagcttccaagctgggcatcaaggagctgctgccgccgttcatcggcaccgacctgcagctcgaggacctgctcaccggcgtggccttcgcctgcggcggcagtggctacgatccgctcacgtccaagctcgcggtaactttacacgtcgtccggaagctagctgcattaacacactcactcctacgtactgactactgaagatgttatctgagactgagaagaataaaaccgttactactactacgtacgtaacaattgagaccgttggtgccgcggccggtgcagacgaccctgtcgagcgccgaccagctccagctgttccaggactacaaggataagctggcggccctggccggggaggaggagatggagcgggtcgtctcgcaggccgtctacttcacggtgatgggggcaaacgacatcgtaaacaactacttcatcctccccatcagacgccaccagtacgacctctcgtcctacgtcgacttcctcgtctcctcggcgatcaacttcacaaggactctgaacgacatgggagctcagaggatagcgttcctcggcgtgccgccactaggatgctgcccgtcacagatcacgctcgcggggagcccgtcgcgccagtgcgatcctgctaggaaccaggcgtcggagctgtacaactccagggtctccaaggagatagagcgcctcaacgcggagcgaagcggttcaggctccaagttcgtctacgtcgacatatactacaacttgctcgacctcatccagaatccagcttcgtttcaaggacgtgagcgagggttgctgcggcagcacggtgctgaacgccgccatcttcatcgcgtaccacagcgcgtgccccaacgcgcccgactacatattctgggacggattccaccccacgcagaaggcatacgacatcgtggtggacaagctcatccagcagaactccaagtacctgatgatgtgaagacagacacttgctgctgcatggcacgagggctctacctttccccgtacaaacacacggcctgacgtcgaccattattcatggacgactccccacatggcagtggcatttgccaaatgtatgatacatattaacatataaatatactatacatgcctgtgcgccaatatcatacataatgattcattagttctagtttgtatgtttttagctccaagtccatcatccttacgacgattattatatgttgtacagaaccaccacagatatgtaactagttgtgacactgacagcaaccagccaaccagaacgcctttacatttgtagaaccgtgtcggtcgggaagtacctcacggtgtgtaaccatatatata

SEQ ID NO: 204009 - DNA, 827 bp, Zea Mays
gagatcaattgcaatatttcaaacaaagtaatgcttggtatgccgtcacaaaagccttttgcattgcctttgtcatgaccttcttctctgtattcgacgttcctgtcttttggccaatacttctctgttattggattgtgctttttgtcctgacaatgaagcgacaaattgtgcatatgatcaagtacaagtatgtcccattcagcataggaaagcagaggtatggcggaaagaaaggccctgccgccagtgcatctaaggagtaaagacggagggagggtgtgggacctcgagagcagtgcatgtgctatctttgaggcatcctgctggcatggtggtattttgagtaccagggctactgatagtgaacgcacaccatattcgctagtggagagtggagattgcagagaagctgaccagacttttgcattggttgatgatttctgttttacgtgtcggtagtttatgtacaatggcatggagcatagctagtagatcaaatttccggatcctctgttgtactgtccctttgtggacaagttgtggacctgttggatccttgcaaacgcattgtgatccaggacctagaggacaaaatcaaactgtccagcgattgttacttggaccttccaacattgactgcatactagtaccagcgattcgtagctgctactgcctttctcatggttaccggcgaacgtttcagccattgtttatttgcatctagcaggcagttgtaagggagttattcgctattatattactcgtttgaagtggcttcttcgtaatagtattaacaactaaggctaactgtaacttgttttgtc

SEQ ID NO: 204010 - DNA, 1594 bp, Zea Mays
ctgatagtcgcgttgaagctaaagcgatagctggcatgtataagattgtttatgtttgccacgagacaatattaagattaatggattcgttgaagaaacttgcaaaaaagctagggattgcactttttgccattgatgaggtccattgtgtttctaaatagggccatgattttcgacctgactataggtccactcttgtgtttggtactcaaggaatggtgaggtttaacaaactgcaaagaaggggaagaaaggaggtacatggaaggtttcaatatatctgtcaacctgtatcagcatggtcactaggaataaacttataaagaaggggaagaaacatgaaggaaatctaaaataagtcgtgagataacttaaggtgcttttgcagagaagtctgctcgctggcgattgcgattcccaccagtcccccagccccaggcacgaaacctaacccacccaagcggcaaccatggagccctcccccgtcggcgccagcggctcggcggagcggtggcgcgcggaggcggcgcgggcgttccagcactacctggaccgctcggcgccgcacacggcggggcggtgggcgggcacgctcgtggccgcggcggtgtacgcgctgcgggtctactacgtgcggggcttctacgtcgtcacctacgggctgggcatctacctgatcaacctcctcatcggcttcctctcccccatggtcgaaccggagctcgaggccgggcccgggctcccaaccagcggctccgacgagttcaagcccttcatccgtcgcctccccgagttcaagttctggtatgccgtcacaaaagccttttgcattgcctttgtcatgaccttcttctctgtattcgacgttcctgtcttttggccaatacttctctgttattggattgtgctttttgtcctgacaatgaagcgacaaattgtgcatatgatcaagtacaagtatgtcccattcagcataggaaagcagaggtatggcggaaagaaaggccctgccgccagtgcatctaaggagtaaagacggagggagggtgtgggacctcgagagcagtgcatgtgctatctttgaggcatcctgctggcatggtggtattttgagtaccagggctactgatagtgaacgcacaccatattcgctagtggagagtggagattgcagagaagctgaccagacttttgcattggttgatgatttctgttttacgtgtcggtagtttatgtacaatggcatggagcatagctagtagatcaaatttccggatcctctgttgtactgtccctttgtggacaagttgtggacctgttggatccttgcaaacgcattgtgatccaggacctagaggacaaaatcaaactgtccagcgattgttacttggaccttccaacattgactgcatactagtaccagcgattcgtagctgctactgcctttctcatggttaccggcgaacgtttcagccattgtttatttgcatctagcaggcagttgtaagggagttattcgctattatattactcgtttgaagtggcttcttcgtaatagtattaacaactaaggctaactgtaacttgttttgtc

SEQ ID NO: 204011 - DNA, 800 bp, Zea Mays
aagttcaaaggtatgccgtcacaaaagccttttgcattgcctttgtcatgaccttcttctctgtattcgacgttcctgtcttttggccaatacttctctgttattggattgtgctttttgtcctgacaatgaagcgacaaattgtgcatatgatcaagtacaagtatgtcccattcagcataggaaagcagaggtatggcggaaagaaaggccctgccgccagtgcatctaaggagtaaagacggagggagggtgtgggacctcgagagcagtgcatgtgctatctttgaggcatcctgctggcatggtggtattttgagtaccagggctactgatagtgaacgcacaccatattcgctagtggagagtggagattgcagagaagctgaccagacttttgcattggttgatgatttctgttttacgtgtcggtagtttatgtacaatggcatggagcatagctagtagatcaaatttccggatcctctgttgtactgtccctttgtggacaagttgtggacctgttggatccttgcaaacgcattgtgatccaggacctagaggacaaaatcaaactgtccagcgattgttacttggaccttccaacattgactgcatactagtaccagcgattcgtagctgctactgcctttctcatggttaccggcgaacgtttcagccattgtttatttgcatctagcaggcagttgtaagggagttattcgctattatattactcgtttgaagtggcttcttcgtaatagtattaacaactaaggctaactgtaacttgttttgtc

SEQ ID NO: 204012 - DNA, 2183 bp, Zea Mays
tcaacaacacatgagagtgagtttttctaccactggtcacagccaccgtctccctccttccccaacctcgccgctatcaggtggtggatgcagcagcgcggccgctccttcaacagccgctctcggagcttctcccgcgcccgcgtcgccatcgagggatcttaatctcacagccatccctcggtcatttcgtttgaactcggttctgaaattctgactgacgaacgcacgcaacgacctaccgtgatggacgccgccgccgccgccgccgttgtttctcttaacgggaagatgggggccgaggagaggaaggcgcagaagagctactgggaggagcattccaagaacctcaccgtcgaggccatgatgctggactcccgcgccgctgatctcgacaaggaggagcgccctgaggtcctgtctttgcttccttcatatgaaggaaaatctgtactagagcttggtgctggaataggccgtttcactggagaactcgctaaaacagctgggaatgttcttgctctggattttattgaaagtgcaattaaaaagaatgaaagcattaatggtcactacaagaatgcatcctttatgtgtgctgatgtgacatcccaggacctagtgcttcaagctaactccatcgatctgatattttcaaattggttattgatgtatctttcagatgaagaggtaatggatgagacatgatttgaataagtaacaaattctaattccatagtattccttgatcttctcgctgaggttgctcttgtaaaatggatctgtgtcataaaaagttctgaatggcgccttttttctaaatgagttaaaattggtgttcaaatgttgaacagctagttcagagaatggtaaaatggttgaaggttggtggctatatcttctttagggaatcttgcttccatcaatctggagattcaaaaaggaaagttaatccgacacactatagggaaccaagtttttatactaaggttttcaaagaatgccatacctttgatcaagatgggaattctttcgaactttctctggttacttgcaagtgtattggtgcttatgttaaaaacaagaaaaaccaaaaccagatatgttggctatggcaaaaggtccattctacagaagataaaggatttcaaagatttttggacaatgtgcagtacaaagccagtggaatattacgttacgagcgcatttttggagaaggttatgtgagcactggtggagttgagactacaaaagaatttgtggacaagctggatctcaaacctggacataaggtgcttgatgttggatgtggaattgggggaggtgacttttatatggccgaaaaatatgatgctcatgttgttggtattgatctttccataaacatggtatcatttgcacttgagcgtgccattgggcgcagttgctcagtggagtttgaagttgctgattgcactacgaagacatacccagacaacacatttgatgtcatatacagccgtgatactatccttcacatacatgacaaaccctctttgttcaaaagttttttcaagtggctgaagcctgggggcaaggtccttatcagtgactactgcaggagtcctgggaaaccatcagaggaatttgcagcgtacattaagcagagaggttatgacctacatgctgtggaggcttatggacagatgttgaagagtgctggttttcgtgatgtcattgctgaggatcgaactgatcagttccttggtgttttagataaggagttagctgaatttgaaaagaacaaggacgatttcctgtctgacttcacccaggaggactacgatgatatcgtgaacggttggaaggcaaaactgcagaggagttctgctggtgaacagaggtgggggctgttcatcgccaccaaatgatgatgcagatgtgagatgtgcgtggacgtgaaaataaagcatccttttactataattgatgtcgcattagttattctgaacccaggtagcctgggtcagtacctactaccctgtttatcataggacgtggagagaactcgtccagttttacattcccgtcactgctttgccggagtgctgtggcaatccataaaatctaataaagtaacaataagctgtctgcaactgcaaagtatgtgcccatgtggtcttaattgctatggttgtgtgatg

SEQ ID NO: 204013 - DNA, 612 bp, Zea Mays
cgcattttaatttatacccaaagtatctaccttcacctcacaaatatgtgtgtctaccactttctgggtctggagatagtatggtacacacacttctatttgacatggtgttagagtgttaaagcaaccataagagacataagagactagacaaatcattttgtaaaggatggggctggggacctggactactcggcgtcgtgctcggcgtcggcgtcgggaggctccacctccaacttctccgggccgtccagcggcagcggcagcgggtctgccaacaaggtggactctccgattctcggcctcgtcaccgaggccgacagcatcacaagaacagcccggccgcagcacagccatacggcaacgggacaataacagtgtgacactcacgaatatacttgctcgcccgtcttacaccattgtttgacagtttttacaatgcttaactttttaggtgagtggttgtttgctgggaatgtacagtatttggctcaaaattcaaaatgtttcagaagctcaatccaatgaaacaggccttgtttttttagtttccagttggttgggtctatatttcatactcctgtttaaaagtcaaacgcttgatgtgacccg

SEQ ID NO: 204014 - DNA, 922 bp, Zea Mays
gccggatactcctgggacaccttcccgatacctgtgcgatacgttccaaccctaggcttcatatacgcacgtactcctgtatcgcatagccgctgccccgaagccacctctttgtgcctccacttgcgtgccgctagccacagccgctcgtcgatctgagctgccgccgccgccgtcgttcgccgattggagccaccaccgtcacccagtcagtggccgattggagccgcctccgcgaggcctgtggtcgtcagcccgtcagccgccgattggagccgccgctgcgagatgcatagggcagcatttgttctcccgacctttgcaaggagagagctagaagcatattgcgtttccactgaaacagagcaagcggaggaaacaccggcggcaccactgaagttgactcttgcatccaggagtgaaattttcgctacatcctagctagaccaggactcgcgatgtaccacaagatatcaagaaaccattccttccttcctggtgccgtacctccagtatcgccattggttcatagtcttactatcacatgctatgagacgcataatgaggcatcatgtcagtaattcagtatccaaacaatgagatgagattggcatgctaagaaaggacgagctgatattacaatgtactcccttcaccatgtcagtaatttattgtccaaacaattagatacattgcgttatatgaaggagtttcttaggtgtatctagtgctcggagaaccgaaacgtagtatctaggttgtacatgttcacccttgtacttctacttattaagtgatgtaataaatgcagagatagtcttgctcaatacaaaatgttagaaatcctgatcttgggttggctggcacacaaacacaagtgtgacaatgatagtcttgctcaataaaaaatgttagaaatcct

SEQ ID NO: 204015 - DNA, 882 bp, Zea Mays
cttctctcccgtcccttctctctcttcgtgatgtgttgttatttagtaagctgttaagctaaagccagggccgctcctctgctgttaagctaaagcgcgctggcctgctcccaccgccgcccaccccccccgtcttcttcctcacccatctccgccagtccccttcctcactgcatttcttggttttctccctccaccggaaccaagcgatgtctccggcgccgagttcgcatcattcgcaaaccaattcgaggaaggagaagcggatgcggaaggtggacaccttcgcgccgcacaacgatggccaccaatggaggaagtacggcgagaagaagatcaacaacaccaacttccccaggtattactacagatgcacgtacaaggacaacatgagctgcccggccacgaagcaggtgcagcagaaggaccacagcgacccgccattgtacgcggtcactactacagcgaccactcgtgcaacagcgccttcctcccgctctccccctccgagttccagctgcggacaccgtccgggaaggccgtctccatctgcttcgactcctcgtccggggcggcggcggccgtggcgtcggtcgccaccaatgctagcggcggctcgccctcttccagcgccgcggcggcgcggcgaggcacgccgccggatatcagttacccgtccgacctgcggcggtctgacacttacccgtggggcgccggcgccgtggagcagaagctggcgtcctgcgccaccgagtgccacgacgccttctcggccggcgccgtgccggaggaggtggtagatgcaggcagatttgggtctatcagaggagaggaggaagtctatcttagtaaccaccggagtatgagagcacttcatagccc

SEQ ID NO: 204016 - DNA, 3380 bp, Zea Mays
accacaactacccccatccaccggaaaagaaaagaaaaaaaaaagtgcagtccgaacccacattctaataatccgcacattagctgtggcgcggcggttggatcagcgaggcccgaacgccatccgcgtccggcagtacagatcaaggagaccggttctcttgagctggggactgcaaaggatacgtggcttcagtcattgtgctctggatttttagatcaagggaccaatgcctccaggataatggcggggaaggacggagtttctctgaaatctgtgtcatacggggcaaggctgcgcaggagttgtgatgcatcactgagagaggcagggtccatgagagacccattcttgaaacacagagtaaagaaatttgatctatctagcctagattggattgatgagattccagattgccctgtattttctccatcaacccaggagtttgaggatcctctggtttatctcagcaaaattgcccctgtggctgcaaaatatggtatatgcaagatcatttcacctgtctctgcttcagtacctgcgggcactgtactaatgaaggaactaggtgggattaagtttacgaccagagttcagcctctccgtcttgctgaatggaccaaggatgacaagtttgccttctttatgagtggaagaaagtacacatttcgggagttcgagaagatggcaaataaagaatttgtacggagatactctagtgctgcttgtcttccatcaaggtatatggaagaggagttttggcatgaaatagcttttggcaagatggagtctgttgagtatgcatgtgatatcgatggtagcgcattttcttcttcttctcatgaccaacttgggagaagcaaatggaacttgaagagattctcacggttgccgaactctacgctgcgtcttctcagagctgcagttccaggaataacagatccaatgctgtatattgggatgctctttagtatgtttgcctggcatgtggaagatcattacctgtacagtattaactatcaccactgtggagcccccaaaacatggtgaaggggaaagtgcagcatttgatgttctgttgggaaagactacaatcttcccacctaatattttactggatcatcatgttccagtctatagagccatacagaaacctggagagtttgttgtaacgtttccccgagcttatcattctggtttcagccatggtttcaattgtggtgaggcagtaaattttgctacgggcgaatggtttcctctaggagcagttgccagtcaacattatgcacttcttaagaggataccagtattaccttatgaggagcttctttgtaaagaagcaacattttgtgctaatgagttttccttgtttgaacacggaaatgtaacattaactggaggcacacatatacagagctatatgaagggtccctttgtgcagttgatgcggttccaacaccgtgttcgttggttgcttgtgaaaatgggtgcccgtacatgctataaagcagacattgatgccacagttctctgtgggatatgcaaacgtgactgctatgtagctcacattatgtgtaactgcagagcagatgcaatttgcctttgtcatgaggaagagattagtaagtgttcttgcaactgcgaccgtgttgtttttgtgaggaaagacatctttgaattggaggaaatatcaaagaagtttgaggaaattggaatactggatgaagtaggaaaacaaatgtctcaaaatgatggctataacatgcatccttacttgtccaatggcattgaccacaatgctaaatactttccatactgcaagatcctaattgatacatcccctgaacttcgtaccttttcagaggtagatgttcttggatatgatctgaataagccatatcctacattatcaacaataacttctgcacatggaccccatgagtattctacacaaagtgatgagtgtactagttctaagcaaagaacatactctagctcatgtccagagaatggaacgcttagtgtttatcctttatgtacatctgatcaagcattctcaactgacaaattggctgctcaggatactgatgattctgactgtgaggtatttagagttaagagacgatctagcatagttatggagaaaagatgttcagaagatctaacaataactttaactgagaatcaggctttaagacggttaaagaaagcctgttcagatgacagacaagagaacgcaactgaatcacattgccttgacttcatttctggaaatacagataatttcatcaatcgaagcaaacaaaaaatgaatgtagatcagctagatgcaaaaaatgtggaagatgaagttgctttcggccagaaatctatcggttgcagttacctgtctccatctgtagatcttgggccgaaacgcttgaaaattcgtggcccatccttcccaagcactgtttctgaagtggaaatatcttataggttccaggaggacattgacttggctagtcagcatactcaatgaagtatgctgctcttggtgctaactgctaacatcaatcgtaacttctggaagatgaaagctcttttttcattggatggttcagaactgattctatctacaggtctccaatggaggcactgttatggctggattttatgattctattgccaggtcataggcgatttttctgatgatccgtagctgcacatcacttatttcctttctttgtaggttttccactgtgaataggttagtctactacttttaacaatttggttcattctttttccaccacagatacacctgtacctagaatgctttaatagatcctcatacgaaatggacattgtacattttttttaacaagtcagtcttttgctcattataatctggaaccatttgcaattcttattcttgttcagttgttggcaccggtacatttgtcctcagatgtgttgataactttgatatgttaataaatcgtttgatgctgacaggaattcacttccactgactgtcatgttgcatatgcaacaaagtagatgctttgtgataatgttgaagcgcatgcaaatgctcgaatcaatcatgttctatagaaagtggatacaacagaaggaataaaggagcaacttcttgctgttagatcctggtctactgaaatctgtcacataagatttactttctcttttaagttcaggatataatatttggttagacaattattttaatttgatcatatgtctggttggttagcaaagtaggcaatttgatttgtcccctaagtagcttctatttgtagaatgaattcgtccattataattctccataatgctttaggtagtctatgcagaaattacttgatgttccttgtctcgac

SEQ ID NO: 204017 - DNA, 3621 bp, Zea Mays
cttttttcccttcctctcctttcatcctccgcctctttttcctcctcctgccgctcgccggagcaccgccgcgggcgctccctccttcgccttggtttggttccgacgcctacgcgggatccgtagtctgcgccgttccggagttctggagccacctccgtgcgctcgggagcgcggcgttaccggagcaggggcgggcgcggatcggagcgcgctggggacgccggtagcggccgcctcaggggaatgtgggtccccgtttgaggaggcctcgggccgggaggccgcgccgagatgatacgatcaaggagaccggttctcttgagctggggactgcaaaggatacgtggcttcagtcattgtgctctggatttttagatcaagggaccaatgcctccaggataatggcggggaaggacggagtttctctgaaatctgtgtcatacggggcaaggctgcgcaggagttgtgatgcatcactgagagaggcagggtccatgagagacccattcttgaaacacagagtaaagaaatttgatctatctagcctagattggattgatgagattccagattgccctgtattttctccatcaacccaggagtttgaggatcctctggtttatctcagcaaaattgcccctgtggctgcaaaatatggtatatgcaagatcatttcacctgtctctgcttcagtacctgcgggcactgtactaatgaaggaactaggtgggattaagtttacgaccagagttcagcctctccgtcttgctgaatggaccaaggatgacaagtttgccttctttatgagtggaagaaagtacacatttcgggagttcgagaagatggcaaataaagaatttgtacggagatactctagtgctgcttgtcttccatcaaggtatatggaagaggagttttggcatgaaatagcttttggcaagatggagtctgttgagtatgcatgtgatatcgatggtagcgcattttcttcttcttctcatgaccaacttgggagaagcaaatggaacttgaagagattctcacggttgccgaactctacgctgcgtcttctcagagctgcagttccaggaataacagatccaatgctgtatattgggatgctctttagtatgtttgcctggcatgtggaagatcattacctgtacagtattaactatcaccactgtggagcccccaaaacatggtatggtattccaggaagtgctgcttctgattttgagaaagtggtacgtgagcatgtatatgatcacgaaattttatcaggtgaaggggaaagtgcagcatttgatgttctgttgggaaagactacaatcttcccacctaatattttactggatcatcatgttccagtctatagagccatacagaaacctggagagtttgttgtaacgtttccccgagcttatcattctggtttcagccatggtttcaattgtggtgaggcagtaaattttgctacgggcgaatggtttcctctaggagcagttgccagtcaacattatgcacttcttaagaggataccagtattaccttatgaggagcttctttgtaaagaagcaacattttgtgctaatgagttttccttgtttgaacacggaaatgtaacattaactggaggcacacatatacagagctatatgaagggtccctttgtgcagttgatgcggttccaacaccgtgttcgttggttgcttgtgaaaatgggtgcccgtacatgctataaagcagacattgatgccacagttctctgtgggatatgcaaacgtgactgctatgtagctcacattatgtgtaactgcagagcagatgcaatttgcctttgtcatgaggaagagattagtaagtgttcttgcaactgcgaccgtgttgtttttgtgaggaaagacatctttgaattggaggaaatatcaaagaagtttgaggaaattggaatactggatgaagtaggaaaacaaatgtctcaaaatgatggctataacatgcatccttacttgtccaatggcattgaccacaatgctaaatactttccatactgcaagatcctaattgatacatcccctgaacttcgtaccttttcagaggtagatgttcttggatatgatctgaataagccatatcctacattatcaacaataacttctgcacatggaccccatgagtattctacacaaagtgatgagtgtactagttctaagcaaagaacatactctagctcatgtccagagaatggaacgcttagtgtttatcctttatgtacatctgatcaagcattctcaactgacaaattggctgctcaggatactgatgattctgactgtgaggtatttagagttaagagacgatctagcatagttatggagaaaagatgttcagaagatctaacaataactttaactgagaatcaggctttaagacggttaaagaaagcctgttcagatgacagacaagagaacgcaactgaatcacattgccttgacttcatttctggaaatacagataatttcatcaatcgaagcaaacaaaaaatgaatgtagatcagctagatgcaaaaaatgtggaagatgaagttgctttcggccagaaatctatcggttgcagttacctgtctccatctgtagatcttgggccgaaacgcttgaaaattcgtggcccatccttcccaagcactgtttctgaagtggaaatatcttataggttccaggaggacattgacttggctagtcagcatactcaatgaagtatgctgctcttggtgctaactgctaacatcaatcgtaacttctggaagatgaaagctcttttttcattggatggttcagaactgattctatctacaggtctccaatggaggcactgttatggctggattttatgattctattgccaggtcataggcgatttttctgatgatccgtagctgcacatcacttatttcctttctttgtaggttttccactgtgaataggttagtctactacttttaacaatttggttcattctttttccaccacagatacacctgtacctagaatgctttaatagatcctcatacgaaatggacattgtacattttttttaacaagtcagtcttttgctcattataatctggaaccatttgcaattcttattcttgttcagttgttggcaccggtacatttgtcctcagatgtgttgataactttgatatgttaataaatcgtttgatgctgacaggaattcacttccactgactgtcatgttgcatatgcaacaaagtagatgctttgtgataatgttgaagcgcatgcaaatgctcgaatcaatcatgttctatagaaagtggatacaacagaaggaataaaggagcaacttcttgctgttagatcctggtctactgaaatctgtcacataagatttactttctcttttaagttcaggatataatatttggttagacaattattttaatttgatcatatgtctggttggttagcaaagtaggcaatttgatttgtcccctaagtagcttctatttgtagaatgaattcgtccattataattctccataatgctttaggtagtctatgcagaaattacttgatgttccttgtctcgac

SEQ ID NO: 204018 - DNA, 3354 bp, Zea Mays
tttcatcctccgcctctttttcctcctcctgccgctcgccggagcaccgccgcgggcgctccctccttcgccttggtttggttccgacgcctacgcgggatccgtagtctgcgccgttccggagttctggagccacctccgtgcgctcgggagcgcggcgttaccggagcaggggcgggcgcggatcggagcgcgctggggacgccggtagcggccgcctcaggggaatgtgggtccccgtttgaggaggcctcgggccgggaggccgcgccgagatgatacgatcaaggagaccggttctcttgagctggggactgcaaaggatacgtggcttcagtcattgtgctctggatttttagatcaagggaccaatgcctccaggataatggcggggaaggacggagtttctctgaaatctgtgtcatacggggcaaggctgcgcaggagttgtgatgcatcactgagagaggcagggtccatgagagacccattcttgaaacacagagtaaagaaatttgatctatctagcctagattggattgatgagattccagattgccctgtattttctccatcaacccaggagtttgaggatcctctggtttatctcagcaaaattgcccctgtggctgcaaaatatggtatatgcaagatcatttcacctgtctctgcttcagtacctgcgggcactgtactaatgaaggaactaggtgggattaagtttacgaccagagttcagcctctccgtcttgctgaatggaccaaggatgacaagtttgccttctttatgagtggaagaaagtacacatttcgggagttcgagaagatggcaaataaagaatttgtacggagatactctagtgctgcttgtcttccatcaaggtatatggaagaggagttttggcatgaaatagcttttggcaagatggagtctgttgagtatgcatgtgatatcgatggtagcgcattttcttcttcttctcatgaccaacttgggagaagcaaatggaacttgaagagattctcacggttgccgaactctacgctgcgtcttctcagagctgcagttccaggaataacagatccaatgctgtatattgggatgctctttagtatgtttgcctggcatgtggaagatcattacctgtacagtattaactatcaccactgtggagcccccaaaacatggtatggtattccaggaagtgctgcttctgattttgagaaagtggtacgtgagcatgtatatgatcacgaaattttatcaggtgaaggggaaagtgcagcatttgatgttctgttgggaaagactacaatcttcccacctaatattttactggatcatcatgttccagtctatagagccatacagaaacctggagagtttgttgtaacgtttccccgagcttatcattctggtttcagccatggtttcaattgtggtgaggcagtaaattttgctacgggcgaatggtttcctctaggagcagttgccagtcaacattatgcacttcttaagaggataccagtattaccttatgaggagcttctttgtaaagaagcaacattttgtgctaatgagttttccttgtttgaacacggaaatgtaacattaactggaggcacacatatacagagctatatgaagggtccctttgtgcagttgatgcggttccaacaccgtgttcgttggttgcttgtgaaaatgggtgcccgtacatgctataaagcagacattgatgccacagttctctgtgggatatgcaaacgtgactgctatgtagctcacattatgtgtaactgcagagcagatgcaatttgcctttgtcatgaggaagagattagtaagtgttcttgcaactgcgaccgtgttgtttttgtgaggaaagacatctttgaattggaggaaatatcaaagaagtttgaggaaattggaatactggatgaagtaggaaaacaaatgtctcaaaatgatggctataacatgcatccttacttgtccaatggcattgaccacaatgctaaatactttccatactgcaagatcctaattgatacatcccctgaacttcgtaccttttcagaggtagatgttcttggatatgatctgaataagccatatcctacattatcaacaataacttctgcacatggaccccatgagtattctacacaaagtgatgagtgtactagttctaagcaaagaacatactctagctcatgtccagagaatggaacgcttagtgtttatcctttatgtacatctgatcaagcattctcaactgacaaattggctgctcaggatactgatgattctgactgtgaggtatttagagttaagagacgatctagcatagttatggagaaaagatgttcagaagatctaacaataactttaactgagaatcaggctttaagacggttaaagaaagcctgttcagatgacagacaagagaacgcaactgaatcacattgccttgacttcatttctggaaatacagataatttcatcaatcgaagcaaacaaaaaatgaatgtagatcagctagatgcaaaaaatgtggaagatgaagttgctttcggccagaaatctatcggttgcagttacctgtctccatctgtagatcttgggccgaaacgcttgaaaattcgtggcccatccttcccaagcactgtttctgaagtggaaatatcttataggttccaggaggacattgacttggctagtcagcatactcaatgaagtatgctgctcttggtgctaactgctaacatcaatcgtaacttctggaagatgaaagctcttttttcattggatggttcagaactgattctatctacaggtctccaatggaggcactgttatggctggattttatgattctattgccaggtcataggcgatttttctgatgatccgtagctgcacatcacttatttcctttctttgtaggttttccactgtgaataggaattcacttccactgactgtcatgttgcatatgcaacaaagtagatgctttgtgataatgttgaagcgcatgcaaatgctcgaatcaatcatgttctatagaaagtggatacaacagaaggaataaaggagcaacttcttgctgttagatcctggtctactgaaatctgtcacataagatttactttctcttttaagttcaggatataatatttggttagacaattattttaatttgatcatatgtctggttggttagcaaagtaggcaatttgatttgtcccctaagtagcttctatttgtagaatgaattcgtccattataattctccataatgctttaggtagtctatgcagaaattacttgatgttccttgtctcgac

SEQ ID NO: 204019 - DNA, 1352 bp, Zea Mays
gtgaaggacaggtaccacaggatgaggcgcatggaggatgttgtgatgagttcgtgagaggtctagatcgtcacctcccagtcaactttgggttgctggatcgttgtctacttatgatataaaaggacaaatggtatccagatcgataattacaagccgggttgttcatccatgcaaatattgttgcggtgtggagccaaaccagccgaaaagaagggcgataaagatgtagcacgcgaagagcatttatgtacctactcgcacctcctcctccgtcagttctgatctgcttctccagtctccacacaacacaacagagcagaaggcagcacgggcgctgatggcgatgggggaggcgctgcgggcggctgccgctgacgcggtggtgacattcctgtgggtgctgtgcgtctccacgctgggggcctcgacgacggcggtgacgtcctacctgaggctgcagggcgtccacttcgcgctcctggtcaccgtctccctcctctccgtcctcctcttcgtcttcaatatcctttgcgacgcactcggcggcgctagcttcaaccccaccggcgtcgccgccttctacgccgccggagtcaccagcccctctctcttctccatcgcgctccgattaccggcacaggctgccggcgctgtgggcggtgctcttgccatctcggagctgatgccggcgcagtacaggcacatgcttggggggccctcgctcaaggtggatccccacacaggcgccggcgccgaattagtgcttacttttgtcatcaccctggccgtgctcttgatcatagtcaaggggccccgcaaccccatcatcaagacatggatgatctccatctgcactctgtgcctcgtcctctctggtgcagcatacaccggcccttccatgaacccagccaatgcatttggctgggcatatgttaacaaccgccataatacgtgggagcagttctatgtgtactggatatgtcccttcattggtgccattcttgctgcgtggatcttcagggctatgttcctaacaccgccacctaagcccaaggccaagaaagcatgatgaacatcatttggtcatggatgctggatttgataagtcaacatgaattgctagaataagaggaacgccaataagttcctggttcccagcatgttgaattaaattgattaatgtgatactctattactcgtaccatttatcataaggttctttatgcgaatatgaaatatctacctgtgtatatacacatgtactttactgttggttgttgcgtcctgacctgtggaccaaaaaggttcaatatgaatggtcaaaaaggatataatgatcccaacacttg

SEQ ID NO: 204020 - DNA, 1697 bp, Zea Mays
ctagagatttccatcgcacacctctctagtctccatctgccgggacgccgcatcttgcttcgtctcgctttgttcctctccacgtcacttgggtttcgtcggcgtcaaggactccgcttccgcccgaagacttcgccttctcttggcttgctcaccggctgcgtctctttgcataaggttgtctcaggtcggagatttccgattgtgctcattgcaaccaagacgaagaagacgacgacgatccgtccacggcggtcatctcctccacgggcgtattgacgccacagcccgctatgggtaccttgagttggccatcgagcagatggcaaagactgcagacgccagcaacgcactcaaccacgggcttcactaccttcggtcgaccggcaatgcatgtgcggcgagggtgttgttatggtggggatgggagaactccgatgctcacgctgggcgtcatgacaacagctccccaagcgatgcaagccgcctgttcgacgaaatgtgtgagaagcaaaatagagacatcaacggtgttttcatgtgtctaatacaaatttattttttaaaacatagccagatagcattttcgacatgaacaaaggattcgtaatgcgctcggctacagggcgtcatgacagcagctccccaagcgatgcaagccgcctgttcgacgaaatatgtgagaatcaaaatgaacatgctcgcgtgttaggtcctttatgtgacccaaataactgaatttcagctaatcaccagagctaatatatcgaatccttcgagcttccatgggtgaggcaattaacacttactccaatttgttcttccttcacggtgctacttaattcaacatgttcttcattgcaatgattatagttacacttggtttatcaccattgctttcagcttgacaaagccttatctttgctacatacttaattaatgcttcaaagcactgacaattccaaatgacaggtacaagctcaacttcattgtcactgatggaacatgtgaagcagagttcttttgttttgatagcatagccagaaaaatagtaggaaaaccttgtcacaaccttgttacagcagttacaacttctcaaggtcctccagcagacctagccgctgttatgtgactgaaacttacccttgcatttgccatcaatatgtcagcctactctgtcacaaacagtcttctctattctgtctattttaacaaatcatgtaagacatgccttcatgccatctaacatgcctaaccattctcaagagttgtatacacaagatgaagtacctagccttccagtcacacaaaactctccaacaacatcttgggtgaaactatctacctgtagcaacgaaagaaacgaggtacgaaacttcttgttttcttgccatgtacaacctattagaaacatcttattttttcatgcatacaacttgataaagtctattcaattggcgctacacgttctaacatatttagatatgctacagtacataaaggtacctttagtactactaaattctaaacttccatacactcacatagttatgtatcttttgcattctaataccgcaaatataaattaatacaaacaaaactcactagcaacaaatttttagtttataaaataaatgaatgaagacaaaatggacttccactttgtcatagcaaactagattcacagatttcatgca

SEQ ID NO: 204021 - DNA, 1740 bp, Zea Mays
ctagagatttccatcgcacacctctctagtctccatctgccgggacgccgcatcttgcttcgtctcgctttgttcctctccacgtcacttgggtttcgtcggcgtcaaggactccgcttccgcccgaagacttcgccttctcttggcttgctcaccggctgcgtctctttgcataaggttgtctcaggtcggagatttccgattgtgctcattgcaaccaagacgaagaagacgacgacgatccgtccacggcggtcatctcctccacgggcgtattgacgccacagcccgctatgggtaccttgagttggccatcgagcagatggcaaagactgcagacgccagcaacgcactcaaccacgggcttcactaccttcggtcgaccggcaatgcatgtgcggcgagggtgttgttatggtggggatgggagaactccgatgctcacgctgggcgtcatgacaacagctccccaagcgatgcaagccgcctgttcgacgaaatgtgtgagaagcaaaatagagacatcaacggtgttttcatgtgtctaatacaaatttattttttaaaacatagccagatagcattttcgacatgaacaaaggattcgtaatgcgctcggctacagggcgtcatgacagcagctccccaagcgatgcaagccgcctgttcgacgaaatatgtgagaatcaaaatgaacatgctcgcgtgttaggtcctttatgtgacccaaataactgaatttcagctaatcaccagagctaatatatcgaatccttcgagcttccatgggtacaagctcaacttcattgtcactgatggaacatgtgaagcagagttcttttgttttgatagcatagccagaaaaatagtaggaaaaccttgtcacaaccttgttacagcagttacaacttctcaaggtcctccagcagacctagccgctgttatgtgactgaaacttacccttgcatttgccatcaatatgtcagcctactctgtcacaaacagtcttctctattctgtctattttaacaaatcatgtaagacatgccttcatgccatctaacatgcctaaccattctcaagagttgtatacacaagatgaagtacctagccttccagtcacacaaaactctccaacaacatcttgggtgaaactatctacctgtagcaacgaaagaaacgagggtgatgaccaacgtacaagtgaactcaacaagcaatagttatcatcaccaccgaaaaggtatttgctttttgtgcacctatcaggatcaccatcacttttggaccatgaatgcttccctttagatatgaaccagtcgttagcctatttgtggatctatacatatggacttaacacctgcaagtctgcaagcacactgttgctaggtcttgatgtacggtggttaaatgctacttactatacattttttattgtagtctaaattaactctacgactgatatcaactattagagaaaaacaatgttatatgcttatatttggttctgtgcctgcgtattctatacttatattctgttcaaatttgttttcatacctgggtacaacaactagatgtggtcacgcgcggctggccgcgcgccatacactagtataaataagaccgtaatggatctttttcgagggaattaaaaaaaagagccggtagtatgggcggatctagaaaaaaaacgtgtagaagatctgaccgagaaaaagaagatgagaagacagcacagcg

SEQ ID NO: 204022 - DNA, 1456 bp, Zea Mays
ctagagatttccatcgcacacctctctagtctccatctgccgggacgccgcatcttgcttcgtctcgctttgttcctctccacgtcacttgggtttcgtcggcgtcaaggactccgcttccgcccgaagacttcgccttctcttggcttgctcaccggctgcgtctctttggttagatacgtttttctccattgtctttcgtcgtccctttcgattcggtcgatacctggatccagatccgttcgtcgatcatatccagcctcctctacttgagatcctctcgctttttggagatcatgttgcttcggtgcgtggagattgagatctaaacgacaagtatttttcttttggttaactggttcgcaagaagtgtagatggacatctggttccaaatttgttcttcgatcatatctagctgccagcttggtcgtcgacacgtttatttccacagttgtgctcccattcttgcttcgtcgattgtttcgttttggtgcacagctgatcttgtttgtgtcaaatgcataaggttgtctcaggtcggagatttccgattgtgctcattgcaaccaagacgaagaagacgacgacgatccgtccacggcggtcatctcctccacgggcgtattgacgccacagcccgctatgggtaccttgagttggccatcgagcagatggcaaagactgcagacgccagcaacgcactcaaccacgggcttcactaccttcggtcgaccggcaatgcatgtgcggcgagggtgttgttatggtggggatgggagaactccgatgctcacgctgagttgtatacacaagatgaagtacctagccttccagtcacacaaaactctccaacaacatcttgggtgaaactatctacctgtagcaacgaaagaaacgagggtgatgaccaacgtacaagtgaactcaacaagcaatagttatcatcaccaccgaaaaggtatttgctttttgtgcacctatcaggatcaccatcacttttggaccatgaatgcttccctttagatatgaaccagtcgttagcctatttgtggatctatacatatggacttaacacctgcaagtctgcaagcacactgttgctaggtcttgatgtacggtggttaaatgctacttactatacattttttattgtagtctaaattaactctacgactgatatcaactattagagaaaaacaatgttatatgcttatatttggttctgtgcctgcgtattctatacttatattctgttcaaatttgttttcatacctgggtacaacaactagatgtggtcacgcgcggctggccgcgcgccatacactagtataaataagaccgtaatggatctttttcgagggaattaaaaaaaagagccggtagtatgggcggatctagaaaaaaaacgtgtagaagatctgaccgagaaaaagaagatgagaagacagcacagcg

SEQ ID NO: 204023 - DNA, 2198 bp, Zea Mays
aaccggacgaggaagaggagaatgggagtgttgccaacgttgtaccccctgctcctgctgagaatgggaccccagtaaaggaacactcttccagttcgtccaagaagtcgaagaaggcatcaaaatcacagcttgagtctgatgcctctgttggactcaatggaaaggcgtccactgaggaaggtgagagcgaggtcagcaaaccggcaagccgagttggccgacggcggaaatcaaatgccaacccacagagtggaacagaagatgctgggcttgataacccagaccttggtccatttcttcttaaacatgcaagagacttgattgcctcagaaaacccacggcgggcattgaaatatgctctccgtgccacaaagtcgtttgagaagtgtgctggtggaaagccaagcttgaacttagtgatgagtttgcatgttgttgcagcaatctactgcaacttgggaaaatatgaagaggctgtacctgtgctgcatcgatccattgagatccctgtaatcgaggaaggccaggaacatgctctcgcaaagttttctggttgcatgcagttgggggacacctatggcatgctaggtcaaactgcacactcactgcaatggtatgcttctgggcttgaaatacaaaagcaaacattgggagagcaagacccaagggttggagagacttgtcggtacttagctgaggcccatgtgcaggcactacaactcgatgaagcacaaagattgtgtcagatagcccttgacatccacagggagcatcgcgagacggcctcactagaagaaacagctgataggaggctgatgggtctaatttgtgacactaagggtgatcacgaagctgccctggagcatctagtgatggccagcatgtccatggtagccaatggtcaggagacagaggtggcctcagtggattgcagcattggtgatatctacctctccctgggccggtatgatgaggctgtgtttgcttaccagaaagctctcactgtattcaagaccagcaaaggggagaaccatgcaactgtggcttctgttttcgtgcgcctagcagatctgtacaataagacggggaagctgagggagtcaaaatcctactgtgaaaacgccctaaaaatctaccaaaagcctattccagggacttctctggaagaaatcgccactggtctaactgacgtctcagccatatatgagacgatgaatgagcacgagcaagcgctcaagctacttcagaaggccttaaaaatgtacaacaactctgccggccagcagagcacgattgctggcattgaggctcagatgggcgtgctgcactacattttgggcaactatggcgagtcctacgactccttcaagagcgcaattgcaaagctccgcacttgtggcgagaagaagtctgccttcttcgggattgccctgaaccagatggggctggcatgtgttcagaggtattcgataaacgaagcagcagaattgttcgaggaagctagaactgttctggaacaagaatacgggccataccatccggatactttaggagtctacagtaatcttgctggaacttatgacgcgatgggaaggctggatgaggccatcgagatcttggaatatgtggttggaatgcgcgaggagaagctaggtacggcaaacccagacgttgacgacgagaagcggaggcttggggagctattgaaggaggctggccgggtgcgaagcagaaaggcgaaatccctggagaatctgctcgagaccaacccgtatatcgccaccaagagaaatgccgttgctgcatgagtcactctgtcctcagatgacacggtattgtgatggaaggcgaggattgttactaaggtattcgtattcatttggtttgttcagatggggggtaacgggagtagtggtgtttacatatttggaaatatgaaaatgcttaaattgattgttgtaaagtttcaaatgctactgtttctccttttctactacctctctgaggtgcgagtttgcattcgtcagttgtacctgggtttttattacatacatgaaaaaaaaaatcaatgacacagcaaattcgatccctacttaattgaaaattaaatttgccagcgagaatcggctgttggacaagttgaagatgacaaaagcaataataatcgaacgcggtcccccatctcaggcctagat

SEQ ID NO: 204024 - DNA, 2275 bp, Zea Mays
  misc_feature (1224)..(1228): n is a, c, g, or t
gaaaatccggttatggctataatgttatgggccagggaaaaacgtgcagaatttgtacttcttaagtgcaccttcgttcggagggcatcagaatttttaaggaattactttcctagtttgattgattctatgctaaatgacaaaggaaacttctctcagcgaggtcatctgcagaggcctgatcacactgatatgaggtacaaatttaggacttatgcacgacttttacaacacatcaagagtttggacaagagttgtatgatgcctttgcggaaagcttactgccattcgctgaacatgataattcgacgtgagtctcgtgacttttctaatgaactccgtaatagttcaaaagcatcaaagagcagcacaccattgtttgagggtcctgcaggtgcaaaccagcctgcaagtattacagatagtcctgcagatgcatactccaagatgattactgttttcgttccacttcttgttgatgagagtgcattccttgcacattttatgtgctttgaagtttctgcacttcctcaatctgatgcttcaagtagcaatcctaatgctgaatcaactattacttcttcagttgcattagaagcttctgcaagcattggcaaaacaagtaacaatccagccgagatgggagcgctaaatgaatgcattcaggagttgcttgatggtattcaggaggacttttatgctttggttgactgggcattcaagctagatccattgagttgcatatcaatgcatggactaacagatcggtatctttctggtcagaaagcagaggtctccggatatgtacaagtgttgcttgatgacttggagacaagaataacaattttattcagcaggtttgttgatgatgcctgctaccagattgagaaatatgagcgtaatgtgcgtcaaattggagttgtgccctatattcccaggttctcacaacttgcagcacgtatggagcagtatatcaatggatccagggatctagttgaccaggcatatactaaaattgttaccattatgtttgtcattctggagaaaattgctcaagtggaacctaaatatgttgatattgtacttttggaaaactatgcagctttccagcacagcttgtatgatttagcaaatgttgtgccaacacttgctaaatattattcatcaagctagtgaagcctatgaacaagctttgctcacgccatatcaatttggtcataatannnnnaaaagaaaagctattccaattcgctcggaaaattgaggaattaatgtacaacatgagccctgaggagatacccttccaagttggaatgtcaaaggtagattttcgcaagatgttgaagtctagcttaactggacttgacaagacaatcaatgcaatgtatagaaaactacagaagaatatgactgccgaggaattgctgccttcgctatgggaaaaatgcaagaaagagtttcttgataaatacgcaacattcctcaagttgatttcgaaaatatatcctgacgagaaggtgatatctgtgaacgaaatgagagatactctagcttcactgtagctatttcgttagaaggttcgcatgtccgttggtttgcttgcgcatataagttgacctgattcagcatcatcttaggttcttgatcctcactgaaccaactatctgatatgtgatcccttaccaattatctgattcatggtctgttgtggaacctttaagggcttgttcaatccatgtggattgggtgggattgagtgacaatctcacccaatccacgtgggataggaataaccaaacaatgcctaaataaattctggatgacatggatgttaaacaatttgtttatttctgtttttactagcaataatgtgcattagtcaagcttaaatatggtccattaccttcatggattggtggtgatggcacgagagggccttaattccattaccttcctcggtgtctggactatgtggaaacgtaggaattgttgtgtttttgataggatgtggctggacatgaactagagctttggaggttggctggtgcttggagtctctctctcctcatcggttctataccgggttgcggaatctttagttggtagttgccctgttgttttagttatgaatccttttgttattgtgtatgcttgcttcttgtaacggtcataatagaccgaaacttccttctacttaatttaatgatacatagtttttctacacgtccgagagaaaaaatataaaacatggtgacataggcaaagacgacacata

SEQ ID NO: 204025 - DNA, 2240 bp, Zea Mays
  misc_feature (1189)..(1193): n is a, c, g, or t
gccagggaaaaacgtgcagaatttgtacttcttaagtgcaccttcgttcggagggcatcagaatttttaaggaattactttcctagtttgattgattctatgctaaatgacaaaggaaacttctctcagcgaggtcatctgcagaggcctgatcacactgatatgaggtacaaatttaggacttatgcacgacttttacaacacatcaagagtttggacaagagttgtatgatgcctttgcggaaagcttactgccattcgctgaacatgataattcgactctcgtgacttttctaatgaactccgtaatagttcaaaagcatcaaagagcagcacaccattgtttgagggtcctgcaggtgcaaaccagcctgcaagtattacagatagtcctgcagatgcatactccaagatgattactgttttcgttccacttcttgttgatgagagtgcattccttgcacattttatgtgctttgaagtttctgcacttcctcaatctgatgcttcaagtagcaatcctaatgctgaatcaactattacttcttcagttgcattagaagcttctgcaagcattggcaaaacaagtaacaatccagccgagatgggagcgctaaatgaatgcattcaggagttgcttgatggtattcaggaggacttttatgctttggttgactgggcattcaagctagatccattgagttgcatatcaatgcatggactaacagatcggtatctttctggtcagaaagcagaggtctccggatatgtacaagtgttgcttgatgacttggagacaagaataacaattttattcagcaggtttgttgatgatgcctgctaccagattgagaaatatgagcgtaatgtgcgtcaaattggagttgtgccctatattcccaggttctcacaacttgcagcacgtatggagcagtatatcaatggatccagggatctagttgaccaggcatatactaaaattgttaccattatgtttgtcattctggagaaaattgctcaagtggaacctaaatatgttgatattgtacttttggaaaactatgcagctttccagcacagcttgtatgatttagcaaatgttgtgccaacacttgctaaatattattcatcaagctagtgaagcctatgaacaagctttgctcacgccatatcaatttggtcataatannnnnaaaagaaaagctattccaattcgctcggaaaattgaggaattaatgtacaacatgagccctgaggagatacccttccaagttggaatgtcaaaggtagattttcgcaagatgttgaagtctagcttaactggacttgacaagacaatcaatgcaatgtatagaaaactacagaagaatatgactgccgaggaattgctgccttcgctatgggaaaaatgcaagaaagagtttcttgataaatacgcaacattcctcaagttgatttcgaaaatatatcctgacgagaaggtgatatctgtgaacgaaatgagagatactctagcttcactgtagctatttcgttagaaggttcgcatgtccgttggtttgcttgcgcatataagttgacctgattcagcatcatcttaggttcttgatcctcactgaaccaactatctgatatgtgatcccttaccaattatctgattcatggtctgttgtggaacctttaagggcttgttcaatccatgtggattgggtgggattgagtgacaatctcacccaatccacgtgggataggaataaccaaacaatgcctaaataaattctggatgacatggatgttaaacaatttgtttatttctgtttttactagcaataatgtgcattagtcaagcttaaatatggtccattaccttcatggattggtggtgatggcacgagagggccttaattccattaccttcctcggtgtctggactatgtggaaacgtaggaattgttgtgtttttgataggatgtggctggacatgaactagagctttggaggttggctggtgcttggagtctctctctcctcatcggttctataccgggttgcggaatctttagttggtagttgccctgttgttttagttatgaatccttttgttattgtgtatgcttgcttcttgtaacggtcataatagaccgaaacttccttctacttaatttaatgatacatagtttttctacacgtccgagagaaaaaatataaaacatggtgacataggcaaagacgacacata

SEQ ID NO: 204026 - DNA, 1952 bp, Zea Mays
ctctctcttcgcctagcgtgtatgtagccaagctacgctagcgtctgaagcggtggaaggaaagacgaacgaagctacagctgccgaggtccccgttcccgcccaccgaggcgtcgcgcatgcggccacccgcacccaggcactggcccgggggagcgaggcgtggaggcggagcaatggcgggcggtctggaccgatccgtgcaactgtaggcgcggcgcggggggtgttggctggtgcgtgatgggatctgggagcagcaaggcaaccacctcctccacgtcgcccacggcggcggaggcgggcggcgagggtaagaggccaaatggtagcgagaaggcgaggagggggaggagcctgctgccgctgccgagttcctcctgcttccgtggctccacgacgccttgcgattgcgacgtttccgcagtggcggtggacgtcgagtgtaacaagggaggggagactgcaagcctaccttcactcactcacactacaaaatctgatgaagatgttcttgcaacgcctaagtctcatcccggtgaagagataacactaccttcatcagatagggaaagagatcaagatgatggcgtgctacagaatgctgctgccactaacactttaacagcagccagtcaattgacagatccttctgggaggtcaaggccacgttttggtgtcaactttgggttgagtagagctgtcagcttgggatcatcagtagcctgctctattctgtcatctggcctcccgacttctgctaacccaggtgaaggtcggggtgatgtggatgactcttctgatacagtcatctcccagcagggtagtgcaccaactgctgggattgattcgactctagacatgcttagagatagtgtcacggcacaagctagagcagctcgtcaggctagaagaaatctgcaagaatctgaagatgctatcttgaggaactcctacagaaggatgggatctcaggaaccttttgaaggcagtgttcggtttagccgaacattaagtgttgggcggcttcgggacagagtcctcaaacggcctccattctcagatgggttattcacccctgcccttctttacgatagggcggtatggttgtctggaaatgctagtgctaggcaagattcagcagtaatgcaaaggactaattcagacaggagttcagaatcgcgctctgatccttcaaccaatggtctgtacaacttgagctctgagaggcaggccagtaatagtgacctactggagcgtagatcagtttttcttgagaggaggcggaggatacggtctcaggtcagagctctgcaaaggttgggcagcaggtttgaaaatttatctggtcatgagaggtcctgcatactatctggtcagcatagaacaggaacttgcaactgcagaacaggtagtcgacaaggcaatcctgatgaagaaactagcacaagggctagcatatcaagaattgttatgttagcagaagcactatttgaggttctggatgaaattcaccaccaatctgctgcgttatcgtcatcaagaccagcgttttcttcaattggatctgttcctgctccaagggagattgttgagcgtcttcctgcaaaagtgtataggagaccattgaaataccacagtgaggaagctgcacaggtttgtccactttgtcgtggcgatgtctgcagatctgatgcactgattggaaaggtcagctgattctgtctcttgagaatgcagcttcctacagagaaaagtggagctctttccatggttctaattccgatacaacctacaaaactattgcacaggatgctcctgtattgtatggaaaattcgcattgaaactggtcacacgctattgtgaatttaagactcttgtatggtggggcgagtttgttgatattggattgttgccttccgtttccttataccgatgtgacgtttgatca

SEQ ID NO: 204027 - DNA, 1101 bp, Zea Mays
ggtctttgcacctttctacgaatctatgatggccgttgcattggaccaactgttgcaaatgaaccagagcctcctttatgtcagaactcaattacaagaaaggcaggtggtaaaaaggcgcccgagaaggagatgcaggttattgtagacatgagagagttcatgagcagccttccgaatgtattacatcaaaaaggtatccgaatcgtaccggtcacccttgaagttggtgactatgtgctctctcctttgatctgtgttgaacggaaaagtattgcggacttgttccaaagctttgcttctggtcgtctgtacaatcaggttgagacaatggcacgttactacaagatcccggttctcctcatcgagttctcacaagataagagcttttcctttcagtctgcaaatgagattggtgatgatgtctctccgaccaacattatctcgaagctttctctgctagtgctgcattttcctcggcttcgcataatctggtcacgcagcttgcatgctacagcagaaatatttatgtcactgaaaacaaaccaggatgaacctgatgagaaaaaagcaacaagagttggcgtgccatccgaggatggtatcgtggaggatgatgtgaggtctgaaaattacaacacatcagccattgagttcttaagaaggcttcctggggtgacggattctaactaccgagcaatcatggatggatgcaatagcttggccgagctggccctgcttccagtggaaaggttggcggagctaatgggtggtcagaaagctgcgcggacgctcaaggagtttctcgatgccaagtgcccaaccatgttgtagccagagtgacgctctagcaggagtcaagggtctctcctatttaggagctcccttgctggtcgtctaaagactcctctttctcatggatttgtttctttatgtttatttctgcactccgtaaggagcgttttttttatttgtatttcggtcttctatggaccttttttctctgtaaaaggttccatttcacatgtttcacataatctttcagatatactgcattactactatcttgatgcttttgtcttctgtgctagtccaacaaag

SEQ ID NO: 204028 - DNA, 3196 bp, Zea Mays
agagaaactgctggaatatacttacaccgggaagaaggcgaaggccgtcgcgctctcggcggcggcggcggcggcggcagcggcgatgcttgcgttcgagcagcaggtgttggcggatctggtggaagatccgaacggaggtctggtggtgctctcctcgggtctccctctcgcttccctagccgctaccctcctcctccatctccaccagacccccggcaacgcggctggaggaggatgtctcctcgtcctctccgccaccgataccctcaaggcccggatccggcgccgcctccaagacaagctgcaggttcacgacgtgccccctgacctcgccgcgcagcagcgcgccaccctttacgcctctggcgctgctctcttcctctctccccgcgccctcgccgccgacctcctcacctcccgcctcctcccctcccgcgtccaagccctactcctcctctccgcccaccgctccaccgatacctcctccgatgccttcatctgccgcctcctccgtcaacgcaatcttctccccgtttacgccttctccgattgcccccatgccatggtcgccggtttctccaaggccgagcgtaccatgaagagcctctacgtccgccgtctccacctctggccccgcttccacgttctcgccgcagccgacctggaacgcgccccgcctgacgtcgtagacgtgcgcgttcccatgacgccgcccatgaggggtatccaggctgctgtcctcgctaccatggacgcttgtctcaaggaacttaggcgcaccaacaaggtggatgttgaggacctcaccgtcgacaagggcctcttcaagtccttcgatgagatcgtccggaggcagctcgaccccatctggcacactcttgggaagaagacaaagcagcttgtggctgacctcaggacgctacgcaagctgcttgattacctcgtcaggtatgacgccgttacatacttgaagtaccttgacacattgagagtatcagaaggtgtcagatcagtttggatacttgctgactcaagccataggatatttgagcttgcaaaaaggcgcgtttaccaggcagtgagaacagatggtgttaatgttagcatagataataagggcacaccaacaaagaagaggaaagtggcacataattctaccaagaaaggaaaagtaactggtagctgctcttggccccttcatttgcaggtcccaacactcagaaggctaatactgatgtgggcattgtattggaagaggttttggaggaggcaccgaaatggaaagtgttatgggaattgttgcaagagatagcagaacaacggatgaagagcagtgccgggaatgtgcatgatgaggacaaaaatgatgaaagtggcatagttttggtatcatgtaaagatgaacgcacatgcttgcagctgcaggaatgcatattaaaaggcccctgtcaggttatgcgagaagagtgggagaagtatctgattggaaaagctgagctgcatggattgaataaggacaagagaaaatctgagcaaccaaaaggtgttggtgtcctggatggtgaagttcaaatgggatctagtgagagtgtgtgtccagttagcattagcaaactcgaaactaatgccttacttgccgctgcctctgaattaagaaatatatcaaatgaagcagatgtcaagagtagctcaaatagcagctgcagcaaggctgggggagcaaaggggaaaccaaagaaaaccacttcaaagagacaaggcagcaatcgaaaaaataaaagtaaggagggaaatgacaatagccaaggtactggtctggattctgaaggtcaatcaggaaaagcagatgtacaggctgagattgttgcttctaagatgtccgcatatgatgcttccatgtcagcctctacttctaatgttaaatttaaccattcatctgctttcggaaacttggcaaacgccaagccactacctcctgtgcagtttcatgctctagacagtgaccaccaggttcttgatgtatggaagccatctgtcattattgtttatcatccagatattacctttgtaagagaaattgaagtatacaaggcagaaaactcatcaaggaagttaaaagtttacttccttttttatgaagattccactgaggtgcaaaaatatgagtccagcattcgacgggaaaatgaagcatttgaatctttgatcagacagaagtccctgatgatgatacctgttgatcaggatggccgttgcattggaccaactgttgcaaatgaaccagagcctcctttatgtcagaactcaattacaagaaaggcaggtggtaaaaaggcgcccgagaaggagatgcaggttattgtagacatgagagagttcatgagcagccttccgaatgtattacatcaaaaaggttgagacaatggcacgttactacaagatcccggttctcctcatcgagttctcacaagataagagcttttcctttcagtctgcaaatgagattggtgatgatgtctctccgaccaacattatctcgaagctttctctgctagtgctgcattttcctcggcttcgcataatctggtcacgcagcttgcatgctacagcagaaatatttatgtcactgaaaacaaaccaggatgaacctgatgagaaaaaagcaacaagagttggcgtgccatccgaggatggtatcgtggaggatgatgtgaggtctgaaaattacaacacatcagccattgagttcttaagaaggcttcctggggtgacggattctaactaccgagcaatcatggatggatgcaatagcttggccgagctggccctgcttccagtggaaaggttggcggagctaatgggtggtcagaaagctgcgcggacgctcaaggagtttctcgatgccaagtgcccaaccatgttgtagccagagtgacgctctagcaggagtcaagggtctctcctatttaggagctcccttgctggtcgtctaaagactcctctttctcatggatttgtttctttatgtttatttctgcactccgtaaggagcgttttttttatttgtatttcggtcttctatggaccttttttctctgtaaaaggttccatttcacatgtttcacataatctttcagatatactgcattactactatcttgatgcttttgtcttctgtgctagtccaacaaag

SEQ ID NO: 204029 - DNA, 3063 bp, Zea Mays
gcggaatagagaaactgctggaatatacttacaccgggaagaaggcgaaggccgtcgcgctctcggcggcggcggcggcggcggcagcggcgatgcttgcgttcgagcagcaggtgttggcggatctggtggaagatccgaacggaggtctggtggtgctctcctcgggtctccctctcgcttccctagccgctaccctcctcctccatctccaccagacccccggcaacgcggctggaggaggatgtctcctcgtcctctccgccaccgataccctcaaggcccggatccggcgccgcctccaagacaagctgcaggttcacgacgtgccccctgacctcgccgcgcagcagcgcgccaccctttacgcctctggcgctgctctcttcctctctccccgcgccctcgccgccgacctcctcacctcccgcctcctcccctcccgcgtccaagccctactcctcctctccgcccaccgctccaccgatacctcctccgatgccttcatctgccgcctcctccgtcaacgcaatcttctccccgtttacgccttctccgattgcccccatgccatggtcgccggtttctccaaggccgagcgtaccatgaagagcctctacgtccgccgtctccacctctggccccgcttccacgttctcgccgcagccgacctggaacgcgccccgcctgacgtcgtagacgtgcgcgttcccatgacgccgcccatgaggggtatccaggctgctgtcctcgctaccatggacgcttgtctcaaggaacttaggcgcaccaacaaggtggatgttgaggacctcaccgtcgacaagggcctcttcaagtccttcgatgagatcgtccggaggcagctcgaccccatctggcacactcttgggaagaagacaaagcagcttgtggctgacctcaggacgctacgcaagctgcttgattacctcgtcaggtatgacgccgttacatacttgaagtaccttgacacattgagagtatcagaaggtgtcagatcagtttggatacttgctgactcaagccataggatatttgagcttgcaaaaaggcgcgtttaccaggcagtgagaacagatggtgttaatgttagcatagataataagggcacaccaacaaagaagaggaaagtggcacataattctaccaagaaaggaaaagtaactgaaaatgaagattccactgtaggtcccaacactcagaaggctaatactgatgtgggcattgtattggaagaggttttggaggaggcaccgaaatggaaagtgttatgggaattgttgcaagagatagcagaacaacggatgaagagcagtgccgggaatgtgcatgatgaggacaaaaatgatgaaagtggcatagttttggtatcatgtaaagatgaacgcacatgcttgcagctgcaggaatgcatattaaaaggcccctgtcaggttatgcgagaagagtgggagaagtatctgattggaaaagctgagctgcatggattgaataaggacaagagaaaatctgagcaaccaaaagatgtcaagagtagctcaaatagcagctgcagcaaggctgggggagcaaaggggaaaccaaagaaaaccacttcaaagagacaaggcagcaatcgaaaaaataaaagtaaggagggaaatgacaatagccaaggtactggtctggattctgaaggtcaatcaggaaaagcagatgtacaggctgagattgttgcttctaagatgtccgcatatgatgcttccatgtcagcctctacttctaatgttaaatttaaccattcatctgctttcggaaacttggcaaacgccaagccactacctcctgtgcagtttcatgctctagacagtgaccaccaggttcttgatgtatggaagccatctgtcattattgtttatcatccagatattacctttgtaagagaaattgaagtatacaaggcagaaaactcatcaaggaagttaaaagtttacttccttttttatgaagattccactgaggtgcaaaaatatgagtccagcattcgacgggaaaatgaagcatttgaatctttgatcagacagaagtccctgatgatgatacctgttgatcaggatggccgttgcattggaccaactgttgcaaatgaaccagagcctcctttatgtcagaactcaattacaagaaaggcaggtggtaaaaaggcgcccgagaaggagatgcaggttattgtagacatgagagagttcatgagcagccttccgaatgtattacatcaaaaaggttgagacaatggcacgttactacaagatcccggttctcctcatcgagttctcacaagataagagcttttcctttcagtctgcaaatgagattggtgatgatgtctctccgaccaacattatctcgaagctttctctgctagtgctgcattttcctcggcttcgcataatctggtcacgcagcttgcatgctacagcagaaatatttatgtcactgaaaacaaaccaggatgaacctgatgagaaaaaagcaacaagagttggcgtgccatccgaggatggtatcgtggaggatgatgtgaggtctgaaaattacaacacatcagccattgagttcttaagaaggcttcctggggtgacggattctaactaccgagcaatcatggatggatgcaatagcttggccgagctggccctgcttccagtggaaaggttggcggagctaatgggtggtcagaaagctgcgcggacgctcaaggagtttctcgatgccaagtgcccaaccatgttgtagccagagtgacgctctagcaggagtcaagggtctctcctatttaggagctcccttgctggtcgtctaaagactcctctttctcatggatttgtttctttatgtttatttctgcactccgtaaggagcgttttttttatttgtatttcggtcttctatggaccttttttctctgtaaaaggttccatttcacatgtttcacataatctttcagatatactgcattactactatcttgatgcttttgtcttctgtgctagtccaacaaag

SEQ ID NO: 204030 - DNA, 4221 bp, Zea Mays
aaactgctggaatatacttacaccgggaagaaggcgaaggccgtcgcgctctcggcggcggcggcggcggcggcagcggcgatgcttgcgttcgagcagcaggtgttggcggatctggtggaagatccgaacggaggtctggtggtgctctcctcgggtctccctctcgcttccctagccgctaccctcctcctccatctccaccagacccccggcaacgcggctggaggaggatgtctcctcgtcctctccgccaccgataccctcaaggcccggatccggcgccgcctccaagacaagctgcaggttcacgacgtgccccctgacctcgccgcgcagcagcgcgccaccctttacgcctctggcgctgctctcttcctctctccccgcgccctcgccgccgacctcctcacctcccgcctcctcccctcccgcgtccaagccctactcctcctctccgcccaccgctccaccgatacctcctccgatgccttcatctgccgcctcctccgtcaacgcaatcttctccccgtttacgccttctccgattgcccccatgccatggtcgccggtttctccaaggccgagcgtaccatgaagagcctctacgtccgccgtctccacctctggccccgcttccacgttctcgccgcagccgacctggaacgcgccccgcctgacgtcgtagacgtgcgcgttcccatgacgccgcccatgaggggtatccaggctgctgtcctcgctaccatggacgcttgtctcaaggaacttaggcgcaccaacaaggtggatgttgaggacctcaccgtcgacaagggcctcttcaagtccttcgatgagatcgtccggaggcagctcgaccccatctggcacactcttgggaagaagacaaagcagcttgtggctgacctcaggacgctacgcaagctgcttgattacctcgtcaggtatgacgccgttacatacttgaagtaccttgacacattgagagtatcagaaggtgtcagatcagtttggatacttgctgactcaagccataggatatttgagcttgcaaaaaggcgcgtttaccaggcagtgagaacagatggtgttaatgttagcatagataataagggcacaccaacaaagaagaggaaagtggcacataattctaccaagaaaggaaaagtaactggtagctgctcttggccccttcatttgcaggaattgttgcaagagatagcagaacaacggatgaagagcagtgccgggaatgtgcatgatgaggacaaaaatgatgaaagtggcatagttttggtatcatgtaaagatgaacgcacatgcttgcagctgcaggaatgcatattaaaaggcccctgtcaggttatgcgagaagagtgggagaagtatctgattggaaaagctgagctgcatggattgaataaggacaagagaaaatctgagcaaccaaaaggtgttggtgtcctggatggtgaagttcaaatgggatctagtgagagtgtgtgtccagttagcattagcaaactcgaaactaatgccttacttgccgctgcctctgaattaagaaatatatcaaatgaagcagatgtcaagagtagctcaaatagcagctgcagcaaggctgggggagcaaaggggaaaccaaagaaaaccacttcaaagagacaaggcagcaatcgaaaaaataaaagtaaggagggaaatgacaatagccaaggtactggtctggattctgaaggtcaatcaggaaaagcagatgtacaggctgagattgttgcttctaagatgtccgcatatgatgcttccatgtcagcctctacttctaatgttaaatttaaccattcatctgctttcggaaacttggcaaacgccaagccactacctcctgtgcagtttcatgctctagacagtgaccaccaggttcttgatgtatggaagccatctgtcattattgtttatcatccagatattacctttgtaagagaaattgaagtatacaaggcagaaaactcatcaaggaagttaaaagtttacttccttttttatgaagattccactgaggtgcaaaaatatgagtccagcattcgacgggaaaatgaagcatttgaatctttgatcagacagaagtccctgatgatgatacctgttgatcaggatggccgttgcattggaccaactgttgcaaatgaaccagagcctcctttatgtcagaactcaattacaagaaaggcaggtggtaaaaaggcgcccgagaaggagatgcaggttattgtagacatgagagagttcatgagcagccttccgaatgtattacatcaaaaaggtatccgaatcgtaccggtcacccttgaagttggtgactatgtgctctctcctttgatctgtgttgaacggaaaagtattgcggacttgttccaaagctttgcttctggtcgtctgtacaatcaggttgagacaatggcacgttactacaagatcccggttctcctcatcgagttctcacaagataagagcttttcctttcagtctgcaaatgagattggtgatgatgtctctccgaccaacattatctcgaagctttctctgctagtgctgcattttcctcggcttcgcataatctggtcacgcagcttgcatgctacagcagaaatatttatgtcactgaaaacaaaccaggatgaacctgatgagaaaaaagcaacaagagttggcgtgccatccgaggatggtatcgtggaggatgatgtgaggtctgaaaattacaacacatcagccattgagttcttaagaaggcttcctggggtgacggattctaactaccgagcaatcatggatggatgcaatagcttggccgagctggccctgcttccagtggaaagcaaacatgcagaaaatgagcagcagattatgggctgggcaggctctaacccagcccaggaactccccctctcccccacgttcttctttgttgttgttgggcaagtagtgcggctgtttgagtctacgctacagaatgactatctaaatcacacctcctgtggagcctttcatgctcagatggaatcttgggaaagaattttgtactggatggcagttttgtgggagcgtgggttcagtcatgagaatcctcaagtgagatgcctggttatgcaatcctttttggatattgcatgggaacgctacaaggattgcactcagataattccaaggggttttgtgcttggtcctctgatacgtggtttgaatgatgtggttcatcataaggattttgttatgaatagacagcttgttaacttgaagtctagtgcagtttgtgaacaggttataaaagttgcaacatcactgataaatgccactgaaattccacttaacccgcttctgcatttcattgccacaattcctcgagagttctctgattatattggaccattgagagtagtagttcaaaaatggtttgttcagaaggaagaatgttctcctggtgacactttgttgagtaagctgattgatttctctgccaccttcgtaagtcaaaaacggaatgaaggttcgaatgtttttgatgacgaggatgtggatgcatgggaagctgaagcaaggtgggctagaacccttcttgtaacctcggaggaggaacatttgaaacgaatcttcaggtttttggaggcatatggctacaagctctctgagcaatgtcccagtggagatttcatacccataaaaaattttatcattgttttaagcttcattgaggaacttgaggtgagacagagagagcttgtttgccggagtataatacaatcttaagaggttcagatacagtaaatttattggtgctcgatgatctcaacaaaatgttcacagaatcacttttgctaattttggaaaatatggtggccttcagcaaactgtcttgccccgtattctggttttgagatgtggacgaacaggatttacccccaaagcttggaggaccaagccagcgtcgtttggctacctccattacttcttcagtattacagggtgtatgttccgtccttcttggagtggtggaagagggctgcagagacagtgcagggaatggtcaagaaagctggattctctcgtcattttgggagcctggaagatttggaaccactacaatagatatgtgtttgatggagagaccccagcctttctcgaaccctgaagcactctgaagcagactgatgatgagag

SEQ ID NO: 204031 - DNA, 4834 bp, Zea Mays
aaactgctggaatatacttacaccgggaagaaggcgaaggccgtcgcgctctcggcggcggcggcggcggcggcagcggcgatgcttgcgttcgagcagcaggtgttggcggatctggtggaagatccgaacggaggtctggtggtgctctcctcgggtctccctctcgcttccctagccgctaccctcctcctccatctccaccagacccccggcaacgcggctggaggaggatgtctcctcgtcctctccgccaccgataccctcaaggcccggatccggcgccgcctccaagacaagctgcaggttcacgacgtgccccctgacctcgccgcgcagcagcgcgccaccctttacgcctctggcgctgctctcttcctctctccccgcgccctcgccgccgacctcctcacctcccgcctcctcccctcccgcgtccaagccctactcctcctctccgcccaccgctccaccgatacctcctccgatgccttcatctgccgcctcctccgtcaacgcaatcttctccccgtttacgccttctccgattgcccccatgccatggtcgccggtttctccaaggccgagcgtaccatgaagagcctctacgtccgccgtctccacctctggccccgcttccacgttctcgccgcagccgacctggaacgcgccccgcctgacgtcgtagacgtgcgcgttcccatgacgccgcccatgaggggtatccaggctgctgtcctcgctaccatggacgcttgtctcaaggaacttaggcgcaccaacaaggtggatgttgaggacctcaccgtcgacaagggcctcttcaagtccttcgatgagatcgtccggaggcagctcgaccccatctggcacactcttgggaagaagacaaagcagcttgtggctgacctcaggacgctacgcaagctgcttgattacctcgtcaggtatgacgccgttacatacttgaagtaccttgacacattgagagtatcagaaggtgtcagatcagtttggatacttgctgactcaagccataggatatttgagcttgcaaaaaggcgcgtttaccaggcagtgagaacagatggtgttaatgttagcatagataataagggcacaccaacaaagaagaggaaagtggcacataattctaccaagaaaggaaaagtaactgaaaatgaagattccactgtaggtcccaacactcagaaggctaatactgatgtgggcattgtattggaagaggttttggaggaggcaccgaaatggaaagtgttatgggggggaagtggcaatggcgcagacgccggcccctggcttcgcaggtggtgtgggcaatcggctgggcgccgatctgtgctgggcagcaaggagggagaccggagtagcagggaagaaagacggtttagagataattcattgcttgctttatttcataactttccattacataaataggccggctattggcctggccgcagccttctaactgcttgactctatctccttaaactctcctaaaaaatctcaacaacttctaatctgttattatccctagatattctcaactaatatctctagataaactcaactaggcctcttatccttaggcctgtgcctgtacgtggcgccccacataacatggtgtgtatagcatgttgaactattgtttgttgtgctaaatgctaattcttaactatctctgttttttctattcttgtagcaaactagcaacctcatccctaactatcagataatatgagtattaatcataaaaaatgtttttgctttgagttgactgctttgaagtttgcaggaattgttgcaagagatagcagaacaacggatgaagagcagtgccgggaatgtgcatgatgaggacaaaaatgatgaaagtggcatagttttggtatcatgtaaagatgaacgcacatgcttgcagctgcaggaatgcatattaaaaggcccctgtcaggttatgcgagaagagtgggagaagtatctgattggaaaagctgagctgcatggattgaataaggacaagagaaaatctgagcaaccaaaaggtgttggtgtcctggatggtgaagttcaaatgggatctagtgagagtgtgtgtccagttagcattagcaaactcgaaactaatgccttacttgccgctgcctctgaattaagaaatatatcaaatgaagcagatgtcaagagtagctcaaatagcagctgcagcaaggctgggggagcaaaggggaaaccaaagaaaaccacttcaaagagacaaggcagcaatcgaaaaaataaaagtaaggagggaaatgacaatagccaaggtactggtctggattctgaaggtcaatcaggaaaagcagatgtacaggctgagattgttgcttctaagatgtccgcatatgatgcttccatgtcagcctctacttctaatgttaaatttaaccattcatctgctttcggaaacttggcaaacgccaagccactacctcctgtgcagtttcatgctctagacagtgaccaccaggttcttgatgtatggaagccatctgtcattattgtttatcatccagatattacctttgtaagagaaattgaagtatacaaggcagaaaactcatcaaggaagttaaaagtttacttccttttttatgaagattccactgaggtgcaaaaatatgagtccagcattcgacgggaaaatgaagcatttgaatctttgatcagacagaagtccctgatgatgatacctgttgatcaggatggccgttgcattggaccaactgttgcaaatgaaccagagcctcctttatgtcagaactcaattacaagaaaggcaggtggtaaaaaggcgcccgagaaggagatgcaggttattgtagacatgagagagttcatgagcagccttccgaatgtattacatcaaaaaggtatccgaatcgtaccggtcacccttgaagttggtgactatgtgctctctcctttgatctgtgttgaacggaaaagtattgcggacttgttccaaagctttgcttctggtcgtctgtacaatcaggttgagacaatggcacgttactacaagatcccggttctcctcatcgagttctcacaagataagagcttttcctttcagtctgcaaatgagattggtgatgatgtctctccgaccaacattatctcgaagctttctctgctagtgctgcattttcctcggcttcgcataatctggtcacgcagcttgcatgctacagcagaaatatttatgtcactgaaaacaaaccaggatgaacctgatgagaaaaaagcaacaagagttggcgtgccatccgaggatggtatcgtggaggatgatgtgaggtctgaaaattacaacacatcagccattgagttcttaagaaggcttcctggggtgacggattctaactaccgagcaatcatggatggatgcaatagcttggccgagctggccctgcttccagtggaaagcaaacatgcagaaaatgagcagcagattatgggctgggcaggctctaacccagcccaggaactccccctctcccccacgttcttctttgttgttgttgggcaagtagtgcggctgtttgagtctacgctacagaatgactatctaaatcacacctcctgtggagcctttcatgctcagatggaatcttgggaaagaattttgtactggatggcagttttgtgggagcgtgggttcagtcatgagaatcctcaagtgagatgcctggttatgcaatcctttttggatattgcatgggaacgctacaaggattgcactcagataattccaaggggttttgtgcttggtcctctgatacgtggtttgaatgatgtggttcatcataaggattttgttatgaatagacagcttgttaacttgaagtctagtgcagtttgtgaacaggttataaaagttgcaacatcactgataaatgccactgaaattccacttaacccgcttctgcatttcattgccacaattcctcgagagttctctgattatattggaccattgagagtagtagttcaaaaatggtttgttcagaaggaagaatgttctcctggtgacactttgttgagtaagctgattgatttctctgccaccttcgtaagtcaaaaacggaatgaaggttcgaatgtttttgatgacgaggatgtggatgcatgggaagctgaagcaaggtgggctagaacccttcttgtaacctcggaggaggaacatttgaaacgaatcttcaggtttttggaggcatatggctacaagctctctgagcaatgtcccagtggagatttcatacccataaaaaattttatcattgttttaagcttcattgaggaacttgaggtgagacagagagagcttgtttgccggagtataatacaatcttaagaggttcagatacagtaaatttattggtgctcgatgatctcaacaaaatgttcacagaatcacttttgctaattttggaaaatatggtggccttcagcaaactgtcttgccccgtattctggttttgagatgtggacgaacaggatttacccccaaagcttggaggaccaagccagcgtcgtttggctacctccattacttcttcagtattacagggtgtatgttccgtccttcttggagtggtggaagagggctgcagagacagtgcagggaatggtcaagaaagctggattctctcgtcattttgggagcctggaagatttggaaccactacaatagatatgtgtttgatggagagaccccagcctttctcgaaccctgaagcactctgaagcagactgatgatgagag

SEQ ID NO: 204032 - DNA, 3782 bp, Zea Mays
caaccagccagcgaacgcctcctaggccacgtccgcgcggccgaacaaccactccggcacgcatccaccggcacgcggggccacattgacgggcacgcacgcgcaggccaggcaggcagaggccacaggcggtggccttgtggcgcggcgcaggagcaggccttgccgcgccggcgctgccttgctcgcgaagacgccagttcccaactatttgcggagccgagagccggaggcggaggcgttaagcgtaaggcagcgagcataaagcgccctggcgcccgcccgcccgccgcagccgcaccaaagcctagccaccctcctctgccctcgagtccacgtctcgtctcctcgctccactcgccagtcgccacccaagccggagcgaacccgctgcccgaatagagtaatccgaggagccagccaaatggtggtggccgcgtgagtgtagggtccgggggatatagagagagagagactaggggccggccgcgatgcgggcgtgggagatgcacccgctctgctgcctcgccggtgagtggccggcctcgggcggcgggctcgcgcccggcgaccgctccccgccggcggaggacgcgggggcggcgccggcggtggcgggggtcctgtacaagtggaccaacatcggcaaggggtggcgcccgcgctggttcgcgatccgcggcggcgtgctcgcctactccaagatccggcgccgcgtcgcggcggagccgcgtcccgaggccgcgggcggcgtccggctgatcggggtggcgcgcggcgccgcgggcgccgctgagcgccccatcggattcgtgcctctcaagatatcatcatttagtgaaagtaaatcagatgataaacggttttatataattactccgaccaaaacacttcaactgaggactggttgtgctaatgaccgggcgacttggattgaagcgcttgtcactgcaagaagcgaatattcttttaatggggatttatcaggtgatcagaatgatgcatcattttccacagaaaagctcagaaatcgcttgaatgctgaaggcgttggcgaggccgttattaaagactgtgagcagattattcattcagaattttcgcagtaccaaacacagatgaagcaacgttgtgaagagtatttaagctttattggcactcttccacaggatgttgaggtagttaattcagtagattcaactgtccctgagaagccacggctagagctgttcaagcatgactgctccagctctggaaaatgtagtgaatatagcaacacagaatcttctgatgatgttggcaagcaagagattagtgaactatcagacggagatgaatttcatttctatgacacaaggcaaagtttcagtgaatttgcttctagtcctgctgacccgagaaagggatgtttaaacaacggaaatgaagatcataaatctgttgaatcattgacggttgacaaggctgagaaatatatgctatcacattcaaaaaggcgcttacagttgcctgaaccaatagaaaaggagaaaggagttagcctttggtcaatgatcaaagacaatgttggaaaggatctaacaagagtttgtcttcctgtttactttaatgagcctttatcttctctccagaagtgctttgaagagttggagtattcttatttgttggatcgtgcatatgaatgtggtttaagggtatgtctgtttctctaccttcctgttttccttgacccatacattttcttttgaatgcgaatctggtccaaacatctacattgaattacttaaatctgctggaaactactgttgggggaattatccaatagtagggaataaacgacccatgaagagaaactggttaacacaatggccggcatgaaatacatttttttcaacccaatgacataggataatattttaaattaggaaatttgcactttcagtctttaaaaaacagcactggatattggactcaatttttgactgatggagttatacttcatttaagtcagtgtttttttctaaaaaacaaatcaaccatgtggcattcccttagctttgttttgaaatagttactggaacttaagtggtcagaaagatcgctgaaccagttcacaaggaggtaggcaggtagctacattttgtgagcacctaggtttcaaggtttgagcctgggtgggtggcctcgatgggagactctaccgaccaagttatcactcagttctcagactaatggtgtttcttatttatctataaattgatttaacaataccataataattttgcttctgcattcaggggaatggtctgatgagaattctttatgttgctgcatttgcggtctctggatatgcatccacagattcccggccttgcaaacctttcaatccattgcttggggaaacctatgaagctgattaccctgaaaaggggatccgttttttctctgaaaaggtcagtttggcacccaacacatataagtttagctaattatcaattattgtttggtcacttaacaaatcattctgaatataggcctgaaagaggaatcactaaaaacatcacgtacaaggatccaccactggagtattactaaaattttattatatatgagaacacacttgactaaatgtttttgtttattcttgcaccaggtcagtcatcatcctatggtcatggcatgtcactgtgaggggaaaggttggaaattttggggagacagcaatctgaagagcaaattctggggacaatccattcaattggatcctaatggtgtgctaactttagagtttgatgatggagaaattttccaatggagcaaggttacaacaacaattaacaaccttatccttggtcgagtatattgccatcaccatggcacaatgaacataagtgggaatagacgatattcatgcaagctgacttttaaggagcagtctttccttgatcggaatcctcgccaggttcaaggagtcgtcaaggatgctggtggaagcaaggttgcaacattgacggggaagtgggatgaaagtgtgcattgtgtcatcaacaatgatgcctctaaggtgaactctcatggtccacatcagagttctggttccactttgctatgggagaaaaatgagcctccagtcaatcctacccgctacaacttgtccgcatttgcaataacactaaatgagttaacaccagagctcgaggagaagctgccaccgacggattcaaggctgagaccagatcaacggcacctggagaatggggagtacgagaaggccaatgctgaaaaactgcgcctcgagacacagcaacggatggcaaggaagatgcaggagagtggctggaaaccaagatggttccaaagggacagcgaggatggaacgtaccgctacgtcggaggttactgggaggcaagggagcagagaacatgggtcggctgcaatgacatatttggtaacttgtctagcagccagaagctcccaccatccgctctctacacgagctgaagtatataggggtgggtaaggccggaagggcatgttcagtagttgttgacatcgcattaaccagagggtttttctctcgtttctgttgtgttaagctgtgagctaacatgtttttcttgtcaattgtcacattgaagccaaggacatccaagcataacccaaccttttgtcgatactaggatacttatgagagatcttgtggacattattgcgaaaagaattgtcgatgatactattttcttctttgcattccgcaaggacgtgtctgcatttggccctt

SEQ ID NO: 204033 - DNA, 2973 bp, Zea Mays
caaccagccagcgaacgcctcctaggccacgtccgcgcggccgaacaaccactccggcacgcatccaccggcacgcggggccacattgacgggcacgcacgcgcaggccaggcaggcagaggccacaggcggtggccttgtggcgcggcgcaggagcaggccttgccgcgccggcgctgccttgctcgcgaagacgccagttcccaactatttgcggagccgagagccggaggcggaggcgttaagcgtaaggcagcgagcataaagcgccctggcgcccgcccgcccgccgcagccgcaccaaagcctagccaccctcctctgccctcgagtccacgtctcgtctcctcgctccactcgccagtcgccacccaagccggagcgaacccgctgcccgaatagagtaatccgaggagccagccaaatggtggtggccgcgtgagtgtagggtccgggggatatagagagagagagactaggggccggccgcgatgcgggcgtgggagatgcacccgctctgctgcctcgccggtgagtggccggcctcgggcggcgggctcgcgcccggcgaccgctccccgccggcggaggacgcgggggcggcgccggcggtggcgggggtcctgtacaagtggaccaacatcggcaaggggtggcgcccgcgctggttcgcgatccgcggcggcgtgctcgcctactccaagatccggcgccgcgtcgcggcggagccgcgtcccgaggccgcgggcggcgtccggctgatcggggtggcgcgcggcgccgcgggcgccgctgagcgccccatcggattcgtgcctctcaagatatcatcatttagtgaaagtaaatcagatgataaacggttttatataattactccgaccaaaacacttcaactgaggactggttgtgctaatgaccgggcgacttggattgaagcgcttgtcactgcaagaagcgaatattcttttaatggggatttatcaggtgatcagaatgatgcatcattttccacagaaaagctcagaaatcgcttgaatgctgaaggcgttggcgaggccgttattaaagactgtgagcagattattcattcagaattttcgcagtaccaaacacagatgaagcaacgttgtgaagagtatttaagctttattggcactcttccacaggatgttgaggtagttaattcagtagattcaactgtccctgagaagccacggctagagctgttcaagcatgactgctccagctctggaaaatgtagtgaatatagcaacacagaatcttctgatgatgttggcaagcaagagattagtgaactatcagacggagatgaatttcatttctatgacacaaggcaaagtttcagtgaatttgcttctagtcctgctgacccgagaaagggatgtttaaacaacggaaatgaagatcataaatctgttgaatcattgacggttgacaaggctgagaaatatatgctatcacattcaaaaaggcgcttacagttgcctgaaccaatagaaaaggagaaaggagttagcctttggtcaatgatcaaagacaatgttggaaaggatctaacaagagtttgtcttcctgtttactttaatgagcctttatcttctctccagaagtgctttgaagagttggagtattcttatttgttggatcgtgcatatgaatgtggtttaagggggaatggtctgatgagaattctttatgttgctgcatttgcggtctctggatatgcatccacagattcccggccttgcaaacctttcaatccattgcttggggaaacctatgaagctgattaccctgaaaaggggatccgttttttctctgaaaaggtcagtcatcatcctatggtcatggcatgtcactgtgaggggaaaggttggaaattttggggagacagcaatctgaagagcaaattctggggacaatccattcaattggatcctaatggtgtgctaactttagagtttgatgatggagaaattttccaatggagcaaggttacaacaacaattaacaaccttatccttggtcgagtatattgccatcaccatggcacaatgaacataagtgggaatagacgatattcatgcaagctgacttttaaggagcagtctttccttgatcggaatcctcgccaggttcaaggagtcgtcaaggatgctggtggaagcaaggttgcaacattgacggggaagtgggatgaaagtgtgcattgtgtcatcaacaatgatgcctctaaggtgaactctcatggtccacatcagagttctggttccactttgctatgggagaaaaatgagcctccagtcaatcctacccgctacaacttgtccgcatttgcaataacactaaatgagttaacaccagagctcgagctgccaccgacggattcaaggctgagaccagatcaacggcacctggagaatggggagtacgagaaggccaatgctgaaaaactgcgcctcgagacacagcaacggatggcaaggaagatgcaggagagtggctggaaaccaagatggttccaaagggacagcgaggatggaacgtaccgctacgtcggaggttactgggaggcaagggagcagagaacatgggtcggctgcaatgacatatttggtaacttgtctagcagccagaagctcccaccatccgctctctacacgagctgaagtatataggggtgggtaaggccggaagggcatgttcagtagttgttgacatcgcattaaccagagggtttttctctcgtttctgttgtgttaagctgtgagctaacatgtttttcttgtcaattgtcacattgaagccaaggacatccaagcataacccaaccttttgtcgatactaggatacttatgagagatcttgtggacattattgcgaaaagaattgtcgatgatactattttcttctttgcattccgcaaggacgtgtctgcatttggccctt

SEQ ID NO: 204034 - DNA, 2261 bp, Zea Mays
ccctggtgtcttggcgcctccgttttgtgtcgcattggcattttggaagtgcatgggttagtgggaatgtgaggagatatcatcatttagtgaaagtaaatcagatgataaacggttttatataattactccgaccaaaacacttcaactgaggactggttgtgctaatgaccgggcgacttggattgaagcgcttgtcactgcaagaagcgaatattcttttaatggggatttatcaggtgatcagaatgatgcatcattttccacagaaaagctcagaaatcgcttgaatgctgaaggcgttggcgaggccgttattaaagactgtgagcagattattcattcagaattttcgcagtaccaaacacagatgaagcaacgttgtgaagagtatttaagctttattggcactcttccacaggatgttgaggtagttaattcagtagattcaactgtccctgagaagccacggctagagctgttcaagcatgactgctccagctctggaaaatgtagtgaatatagcaacacagaatcttctgatgatgttggcaagcaagagattagtgaactatcagacggagatgaatttcatttctatgacacaaggcaaagtttcagtgaatttgcttctagtcctgctgacccgagaaagggatgtttaaacaacggaaatgaagatcataaatctgttgaatcattgacggttgacaaggctgagaaatatatgctatcacattcaaaaaggcgcttacagttgcctgaaccaatagaaaaggagaaaggagttagcctttggtcaatgatcaaagacaatgttggaaaggatctaacaagagtttgtcttcctgtttactttaatgagcctttatcttctctccagaagtgctttgaagagttggagtattcttatttgttggatcgtgcatatgaatgtggtttaagggggaatggtctgatgagaattctttatgttgctgcatttgcggtctctggatatgcatccacagattcccggccttgcaaacctttcaatccattgcttggggaaacctatgaagctgattaccctgaaaaggggatccgttttttctctgaaaaggcctgaaagaggaatcactaaaaacatcacgtcagtcatcatcctatggtcatggcatgtcactgtgaggggaaaggttggaaattttggggagacagcaatctgaagagcaaattctggggacaatccattcaattggatcctaatggtgtgctaactttagagtttgatgatggagaaattttccaatggagcaaggttacaacaacaattaacaaccttatccttggtcgagtatattgccatcaccatggcacaatgaacataagtgggaatagacgatattcatgcaagctgacttttaaggagcagtctttccttgatcggaatcctcgccaggttcaaggagtcgtcaaggatgctggtggaagcaaggttgcaacattgacggggaagtgggatgaaagtgtgcattgtgtcatcaacaatgatgcctctaaggtgaactctcatggtccacatcagagttctggttccactttgctatgggagaaaaatgagcctccagtcaatcctacccgctacaacttgtccgcatttgcaataacactaaatgagttaacaccagagctcgaggagaagctgccaccgacggattcaaggctgagaccagatcaacggcacctggagaatggggagtacgagaaggccaatgctgaaaaactgcgcctcgagacacagcaacggatggcaaggaagatgcaggagagtggctggaaaccaagatggttccaaagggacagcgaggatggaacgtaccgctacgtcggaggttactgggaggcaagggagcagagaacatgggtcggctgcaatgacatatttggtaacttgtctagcagccagaagctcccaccatccgctctctacacgagctgaagtatataggggtgggtaaggccggaagggcatgttcagtagttgttgacatcgcattaaccagagggtttttctctcgtttctgttgtgttaagctgtgagctaacatgtttttcttgtcaattgtcacattgaagccaaggacatccaagcataacccaaccttttgtcgatactaggatacttatgagagatcttgtggacattattgcgaaaagaattgtcgatgatactattttcttctttgcattccgcaaggacgtgtctgcatttggccctt

SEQ ID NO: 204035 - DNA, 1821 bp, Zea Mays
cagcaggttacaatcatgctatatgtttttttggtagttaattcagtagattcaactgtccctgagaagccacggctagagctgttcaagcatgactgctccagctctggaaaataatatagcaacacagaatcttctgatgatgttggcaagcaagagattagtgaactatcagacggagatgaatttcatttctatgacacaaggcaaagtttcagtgaatttgcttctagtcctgctgacccgagaaagggatgtttaaacaacggaaatgaagatcataaatctgttgaatcattgacggttgacaaggctgagaaatatatgctatcacattcaaaaaggcgcttacagttgcctgaaccaatagaaaaggagaaaggagttagcctttggtcaatgatcaaagacaatgttggaaaggatctaacaagagtttgtcttcctgtttactttaatgagcctttatcttctctccagaagtgctttgaagagttggagtattcttatttgttggatcgtgcatatgaatgtggtttaagggggaatggtctgatgagaattctttatgttgctgcatttgcggtctctggatatgcatccacagattcccggccttgcaaacctttcaatccattgcttggggaaacctatgaagctgattaccctgaaaaggggatccgttttttctctgaaaaggtcagtcatcatcctatggtcatggcatgtcactgtgaggggaaaggttggaaattttggggagacagcaatctgaagagcaaattctggggacaatccattcaattggatcctaatggtgtgctaactttagagtttgatgatggagaaattttccaatggagcaaggttacaacaacaattaacaaccttatccttggtcgagtatattgccatcaccatggcacaatgaacataagtgggaatagacgatattcatgcaagctgacttttaaggagcagtctttccttgatcggaatcctcgccaggagtcgtcaaggatgctggtggaagcaaggttgcaacattgacggggaagtgggatgaaagtgtgcattgtgtcatcaacaatgatgcctctaaggtgaactctcatggtccacatcagagttctggttccactttgctatgggagaaaaatgagcctccagtcaatcctacccgctacaacttgtccgcatttgcaataacactaaatgagttaacaccagagctcgaggagaagctgccaccgacggattcaaggctgagaccagatcaacggcacctggagaatggggagtacgagaaggccaatgctgaaaaactgcgcctcgagacacagcaacggatggcaaggaagatgcaggagagtggctggaaaccaagatggttccaaagggacagcgaggatggaacgtaccgctacgtcggaggttactgggaggcaagggagcagagaacatgggtcggctgcaatgacatatttggtaacttgtctagcagccagaagctcccaccatccgctctctacacgagctgaagtatataggggtgggtaaggccggaagggcatgttcagtagttgttgacatcgcattaaccagagggtttttctctcgtttctgttgtgttaagctgtgagctaacatgtttttcttgtcaattgtcacattgaagccaaggacatccaagcataacccaaccttttgtcgatactaggatacttatgagagatcttgtggacattattgcgaaaagaattgtcgatgatactattttcttctttgcattccgcaaggacgtgtctgcatttggccctt

SEQ ID NO: 204036 - DNA, 992 bp, Zea Mays
caagcggattggtcttgggcatcattttcaggttacaacaacaattaacaaccttatccttggtcgagtatattgccatcaccatggcacaatgaacataagtgggaatagacgatattcatgcaagctgacttttaaggagcagtctttccttgatcggaatcctcgccaggttcaaggagtcgtcaaggatgctggtggaagcaaggttgcaacattgacggggaagtgggatgaaagtgtgcattgtgtcatcaacaatgatgcctctaaggtgaactctcatggtccacatcagagttctggttccactttgctatgggagaaaaatgagcctccagtcaatcctacccgctacaacttgtccgcatttgcaataacactaaatgagttaacaccagagctcgaggagaagctgccaccgacggattcaaggctgagaccagatcaacggcacctggagaatggggagtacgagaaggccaatgctgaaaaactgcgcctcgagacacagcaacggatggcaaggaagatgcaggagagtggctggaaaccaagatggttccaaagggacagcgaggatggaacgtaccgctacgtcggaggttactgggaggcaagggagcagagaacatgggtcggctgcaatgacatatttggtaacttgtctagcagccagaagctcccaccatccgctctctacacgagctgaagtatataggggtgggtaaggccggaagggcatgttcagtagttgttgacatcgcattaaccagagggtttttctctcgtttctgttgtgttaagctgtgagctaacatgtttttcttgtcaattgtcacattgaagccaaggacatccaagcataacccaaccttttgtcgatactaggatacttatgagagatcttgtggacattattgcgaaaagaattgtcgatgatactattttcttctttgcattccgcaaggacgtgtctgcatttggccctt

SEQ ID NO: 204037 - DNA, 1350 bp, Zea Mays
gcgagcaacagccaacagccaagaactacgactacggtacggccgtccaccgctctaggactacgacaacaagtcctaaccctagccccggtagccgccaccgccaggctctacgactacggcccggccgtccaccgctcggccgtccaccggtccaccgctctacgcgacggctccatcgctcggctgctccaggctccagcgccctccaggctccagcagatcccggaagcaccgaccacggtccacggcgagtcggcgagcagacagcacaggcgcacagcctccgcgcatccgcggtccgcgtccggccgtgcagccgcgcagtatactggcttcctaaaggatcaatgtcggctatctctgatcagaagaaacgcaccttggaagcccttcagcaacagtatactgctgcaaaagctaagaaattgcaagatgaacaggttaagagtcagaagaagagcaattttaatacccctaagcctaaatgtgatgcaccaaggggaagcaaaggtccagaaatcactcctcgacgaacatatgcccaaccttctcataaaggtgtagcattttctagttctaattgtcaacaaaagccttccacgtcctcaggtgaagaaatcaatcctgtgtatgctgaactttcttgtgcttttcatgacactttgtccaaaggtgttgtctcggatttggatggcacagaggttgttcacaatgttatatatgacataattcagaaaggtggagatgctgggaaaattacaaagggtgccaaaaagttgaaactggaaaaagggatccttttggataattatgttcagaggggttctagattagtggattcccaagcaagatctttgttgattcattcaaagcgatcaaaaaggcacatgtctctaaaacaacataagaaatgtggttcatttgatttagatggtacattccacaagtacgacctctataagccaatgcatgagatgtggaaggactatatcagagagcttatggatctgagcccgaaaaagaaatttactgagaaccttctttcagcagatcttcatggggcccttctaatagtggcagaatgcaaagctgcttcatataaaggtgtaaacggcatcatgattcgggatactgcagagacgtttggaattatatccgaggacaaccgcttccgagttgtaccaaaagctggttcagtgttcgtacttcaagcagatcgctggaagttcacactgattggcgacaagctctcgcccagggagaagttgaaggaggatcagcgtcaacaacgtgcacaatcgctaatcagatagtttccaatggtctgattggtttactgcgtccaca

SEQ ID NO: 204038 - DNA, 2001 bp, Zea Mays
cgagcaacagccaacagccaagaactacgactacggtacggccgtccaccgctctaggactacgacaacaagtcctaaccctagccccggtagccgccaccgccaggctctacgactacggcccggccgtccaccgctcggccgtccaccggtccaccgctctacgcgacggctccatcgctcggctgctccaggctccagcgccctccaggctccagcagatcccggaagcaccgaccacggtccacggcgagtcggcgagcagacagcacaggcgcacaacagtgacggcgagcagacagcacaggcgcacagcctccgcgcatccgcggtccgcgtccggccgtgcagccgcgcagatttgccgagtatcaatccgggtccccatttgttggtggttgaagctcgatttctccatggcgcttcgtgcagcttcatgaatccaggttctcaagtgtatttgatcatgattctataaacaaccatcttatattactaatctgtatgagtttttttacatgttggtggttcaagctgaaaaaattaacttaggacaaagctagattgtcttttacatttgtgattggaaggagtaaccgttttcagtatccagtggcagttataaacagttgttgcgcttgtgcagcttcaaatattttgggatgttgccatgttaaggtattagctttttgttgtttcagtatactggcttcctaaaggatcaatgtcggctatctctgatcagaagaaacgcaccttggaagcccttcagcaacagtatactgctgcaaaagctaagaaattgcaagatgaacaggttaagagtcagaagaagagcaattttaatacccctaagcctaaatgtgatgcaccaaggggaagcaaaggtccagaaatcactcctcgacgaacatatgcccaaccttctcataaaggtgtagcattttctagttctaattgtcaacaaaagccttccacgtcctcaggtgaagaaatcaatcctgtgtatgctgaactttcttgtgcttttcatgacactttgtccaaaggtgttgtctcggatttggatggcacagaggttgttcacaatgttatatatgacataattcagaaaggtggagatgctgggaaaattacaaagggtgccaaaaagttgaaactggaaaaagggatccttttggataattatgttcagaggggttctagattagtggattcccaagcaagatctttgttgattcattcaaagcgatcaaaaaggcacatgtctctaaaacaacataagaaatgtggttcatttgatttagatggtacattccacaagtacgacctctataagccaatgcatgagatgtggaaggactatatcagagagcttatggatctgagcccgaaaaagaaatttactgagaaccttctttcagcagatcttcatggggcccttctaatagtggcagaatgcaaagctgcttcatataaaggtgtaaacggcatcatgattcgggatactgcagagacgtttggaattatatccgaggacaaccgcttccgagttgtaccaaaagctggttcagtgttcgtacttcaagcagatcgctggaagttcacactgattggcgacaagctctcgcccagggagaagttgaaggaggatcagcgtcaacaacgtgcacaatcgctaatcagatagtttccaatgtgccagctgttctctcaaaatttttgctccacgaaatacttgcttttgtttagctgttttaccctttttagtttgcctctaacattgaaggtagataatgggtgtctgtttttgcaactattgattttattttacacagcaagatgtaactgcaacggccacgccgtcattgtttaactgtcattcatgctctccatgataaatatatagagttaataggaatgggaatgaggttgacctactaatttgtcactacagaatctgccttcagcggtccactaaaactttagtattgtacatat

SEQ ID NO: 204039 - DNA, 1584 bp, Zea Mays
gagcaacagccaacagccaagaactacgactacggtacggccgtccaccgctctaggactacgacaacaagtcctaaccctagccccggtagccgccaccgccaggctctacgactacggcccggccgtccaccgctcggccgtccaccggtccaccgctctacgcgacggctccatcgctcggctgctccaggctccagcgccctccaggctccagcagatcccggaagcaccgaccacggtccacggcgagtcggcgagcagacagcacaggcgcacaacagtgacggcgagcagacagcacaggcgcacagcctccgcgcatccgcggtccgcgtccggccgtgcagccgcgcagtatactggcttcctaaaggatcaatgtcggctatctctgatcagaagaaacgcaccttggaagcccttcagcaacagtatactgctgcaaaagctaagaaattgcaagatgaacaggttaagagtcagaagaagagcaattttaatacccctaagcctaaatgtgatgcaccaaggggaagcaaaggtccagaaatcactcctcgacgaacatatgcccaaccttctcataaaggtgtagcattttctagttctaattgtcaacaaaagccttccacgtcctcaggatttggatggcacagaggttgttcacaatgttatatatgacataattcagaaaggtggagatgctgggaaaattacaaagggtgccaaaaagttgaaactggaaaaagggatccttttggataattatgttcagaggggttctagattagtggattcccaagcaagatctttgttgattcattcaaagcgatcaaaaaggcacatgtctctaaaacaacataagaaatgtggttcatttgatttagatggtacattccacaagtacgacctctataagccaatgcatgagatgtggaaggactatatcagagagcttatggatctgagcccgaaaaagaaatttactgagaaccttctttcagcagatcttcatggggcccttctaatagtggcagaatgcaaagctgcttcatataaaggtgtaaacggcatcatgattcgggatactgcagagacgtttggaattatatccgaggacaaccgcttccgagttgtaccaaaagctggttcagtgttcgtacttcaagcagatcgctggaagttcacactgattggcgacaagctctcgcccagggagaagttgaaggaggatcagcgtcaacaacgtgcacaatcgctaatcagatagtttccaatgtgccagctgttctctcaaaatttttgctccacgaaatacttgcttttgtttagctgttttaccctttttagtttgcctctaacattgaaggtagataatgggtgtctgtttttgcaactattgattttattttacacagcaagatgtaactgcaacggccacgccgtcattgtttaactgtcattcatgctctccatgataaatatatagagttaataggaatgggaatgaggttgacctactaatttgtcactacagaatctgccttcagcggtccactaaaactttagtattgtacatat

SEQ ID NO: 204040 - DNA, 1089 bp, Zea Mays
caccgctctaggactacgacaacaagtcctaaccctagccccggtagccgccaccgccaggctctacgactacggcccggccgtccaccgctcggccgtccaccggtccaccgctctacgcgacggctccatcgctcggctgctccaggctccagcgccctccaggctccagcagatcccggaagcaccgaccacggtccacggcgagtcggcgagcagacagcacaggcgcacaacagtgacggcgagcagacagcacaggcgcacagcctccgcgcatccgcggtccgcgtccggccgtgcagccgcgcagtatactggcttcctaaaggatcaatgtcggctatctctgatcagaagaaacgcaccttggaagcccttcagcaacagtatactgctgcaaaagctaagaaattgcaagatgaacaggttaagagtcagaagaagagcaattttaatacccctaagcctaaatgtgatgcaccaaggggaagcaaaggtccagaaatcactcctcgacgaacatatgcccaaccttctcataaaggtgtagcattttctagttctaattgtcaacaaaagccttccacgtcctcaggtgaagaaatcaatcctgtgtatgctgaactttcttgtgcttttcatgacactttgtccaaaggtgttgtctcggatttggatggcacagaggttgttcacaatgttatatatgacataattcagaaaggtggagatgctgggaaaattacaaagggtgccaaaaagttgaaactggaaaaagggatccttttggataattatgttcagaggggttctagattagtggattcccaagcaagatctttgttgattcattcaaagcgatcaaaaaggcacatgtctctaaaacaacataagaaatgtggttcatttgatttagatggtacattccacaagtacgacctctataagccaatgcatgagatgtggaaggactatatcagagagcttatggatctgagcccgaaaaagaaatttactgagaaccttctttcagcagatcttcatggggcccttctaatagggtctgattggtttactgcgtccaca

SEQ ID NO: 204041 - DNA, 1329 bp, Zea Mays
ccggcctccctcaacacttcaacaactaacacttgagcaagtatactggcttcctaaaggatcaatgtcggctatctctgatcagaagaaacgcaccttggaagcccttcagcaacagtatactgctgcaaaagctaagaaattgcaagatgaacaggttaagagtcagaagaagagcaattttaatacccctaagcctaaatgtgatgcaccaaggggaagcaaaggtccagaaatcactcctcgacgaacatatgcccaaccttctcataaaggtgtagcattttctagttctaattgtcaacaaaagccttccacgtcctcaggtgaagaaatcaatcctgtgtatgctgaactttcttgtgcttttcatgacactttgtccaaaggtgttgtctcggatttggatggcacagaggttgttcacaatgttatatatgacataattcagaaaggtggagatgctgggaaaattacaaagggtgccaaaaagttgaaactggaaaaagggatccttttggataattatgttcagaggggttctagattagtggattcccaagcaagatctttgttgattcattcaaagcgatcaaaaaggcacatgtctctaaaacaacataagaaatgtggttcatttgatttagatggtacattccacaagtacgacctctataagccaatgcatgagatgtggaaggactatatcagagagcttatggatctgagcccgaaaaagaaatttactgagaaccttctttcagcagatcttcatggggcccttctaatagtggcagaatgcaaagctgcttcatataaaggtgtaaacggcatcatgattcgggatactgcagagacgtttggaattatatccgaggacaaccgcttccgagctggttcagtgttcgtacttcaagcagatcgctggaagttcacactgattggcgacaagctctcgcccagggagaagttgaaggaggatcagcgtcaacaacgtgcacaatcgctaatcagatagtttccaatgtgccagctgttctctcaaaatttttgctccacgaaatacttgcttttgtttagctgttttaccctttttagtttgcctctaacattgaaggtagataatgggtgtctgtttttgcaactattgattttattttacacagcaagatgtaactgcaacggccacgccgtcattgtttaactgtcattcatgctctccatgataaatatatagagttaataggaatgggaatgaggttgacctactaatttgtcactacagaatctgccttcagcggtccactaaaactttagtattgtacatat

SEQ ID NO: 204042 - DNA, 1303 bp, Zea Mays
gcctccctcaacacttcaacaactaacacttgagcaagtatactggcttcctaaaggatcaatgtcggctatctctgatcagaagaaacgcaccttggaagcccttcagcaacagtatactgctgcaaaagctaagaaattgcaagatgaacaggttaagagtcagaagaagagcaattttaatacccctaagcctaaatgtgatgcaccaaggggaagcaaaggtccagaaatcactcctcgacgaacatatgcccaaccttctcataaaggtgtagcattttctagttctaattgtcaacaaaagccttccacgtcctcaggtgaagaaatcaatcctgtgtatgctgaactttcttgtgcttttcatgacactttgtccaaaggtgttgtctcggatttggatggcacagaggttgttcacaatgttatatatgacataattcagaaaggtggagatgctgggaaaattacaaagggtgccaaaaagttgaaactggaaaaagggatccttttggataattatgttcagaggggttctagattagtggattcccaagcaagatctttgttgattcattcaaagcgatcaaaaaggcacatgtctctaaaacaacataagaaatgtggttcatttgatttagatggtacattccacaagtacgacctctataagccaatgcatgagatgtggaaggactatatcagagagcttatggatctgagcccatcttcatggggcccttctaatagtggcagaatgcaaagctgcttcatataaaggtgtaaacggcatcatgattcgggatactgcagagacgtttggaattatatccgaggacaaccgcttccgagttgtaccaaaagctggttcagtgttcgtacttcaagcagatcgctggaagttcacactgattggcgacaagctctcgcccagggagaagttgaaggaggatcagcgtcaacaacgtgcacaatcgctaatcagatagtttccaatgtgccagctgttctctcaaaatttttgctccacgaaatacttgcttttgtttagctgttttaccctttttagtttgcctctaacattgaaggtagataatgggtgtctgtttttgcaactattgattttattttacacagcaagatgtaactgcaacggccacgccgtcattgtttaactgtcattcatgctctccatgataaatatatagagttaataggaatgggaatgaggttgacctactaatttgtcactacagaatctgccttcagcggtccactaaaactttagtattgtacatat

SEQ ID NO: 204043 - DNA, 1336 bp, Zea Mays
ctccctcaacacttcaacaactaacacttgagcaagtatactggcttcctaaaggatcaatgtcggctatctctgatcagaagaaacgcaccttggaagcccttcagcaacagtatactgctgcaaaagctaagaaattgcaagatgaacaggttaagagtcagaagaagagcaattttaatacccctaagcctaaatgtgatgcaccaaggggaagcaaaggtccagaaatcactcctcgacgaacatatgcccaaccttctcataaaggtgtagcattttctagttctaattgtcaacaaaagccttccacgtcctcaggtgaagaaatcaatcctgtgtatgctgaactttcttgtgcttttcatgacactttgtccaaaggtgttgtctcggatttggatggcacagaggttgttcacaatgttatatatgacataattcagaaaggtggagatgctgggaaaattacaaagggtgccaaaaagttgaaactggaaaaagggatccttttggataattatgttcagaggggttctagattagtggattcccaagcaagatctttgttgattcattcaaagcgatcaaaaaggcacatgtctctaaaacaacataagaaatgtggttcatttgatttagatggtacattccacaagtacgacctctataagccaatgcatgagatgtggaaggactatatcagagagcttatggatctgagcccgaaaaagaaatttactgagaaccttctttcagcagatcttcatggggcccttctaatagtggcagaatgcaaagctgcttcatataaaggtgtaaacggcatcatgattcgggatactgcagagacgtttggaattatatccgaggacaaccgcttccgagttgtaccaaaagctggttcagtgttcgtacttcaagcagatcgctggaagttcacactgattggcgacaagctctcgcccagggagaagttgaaggaggatcagcgtcaacaacgtgcacaatcgctaatcagatagtttccaatgtgccagctgttctctcaaaatttttgctccacgaaatacttgcttttgtttagctgttttaccctttttagtttgcctctaacattgaaggtagataatgggtgtctgtttttgcaactattgattttattttacacagcaagatgtaactgcaacggccacgccgtcattgtttaactgtcattcatgctctccatgataaatatatagagttaataggaatgggaatgaggttgacctactaatttgtcactacagaatctgccttcagcggtccactaaaactttagtattgtacatat

SEQ ID NO: 204044 - DNA, 1330 bp, Zea Mays
ctccctcaacacttcaacaactaacacttgagcaagtatactggcttcctaaaggatcaatgtcggctatctctgatcagaagaaacgcaccttggaagcccttcagcaacagtatactgctgcaaaagctaagaaattgcaagatgaacaggttaagagtcagaagaagagcaattttaatacccctaagcctaaatgtgatgcaccaaggggaagcaaaggtccagaaatcactcctcgacgaacatatgcccaaccttctcataaaggtgtagcattttctagttctaattgtcaacaaaagccttccacgtcctcaggtgaagaaatcaatcctgtgtatgctgaactttcttgtgcttttcatgacactttgtccaaaggtgttgtctcggatttggatggcacagaggttgttcacaatgttatatatgacataattcagaaaggtggagatgctgggaaaattacaaagggtgccaaaaagttgaaactggaaaaagggatccttttggataattatgttcagaggggttctagattagtggattcccaagcaagatctttgttgattcattcaaagcgatcaaaaaggcacatgtctctaaaacaacataagaaatgtggttcatttgatttagatggtacattccacaagtacgacctctataagccaatgcatgagatgtggaaggactatatcagagagcttatggatctgagcccgaaaaagaaatttactgagaaccttctttcagcagatcttcatggggcccttctaatagaatgcaaagctgcttcatataaaggtgtaaacggcatcatgattcgggatactgcagagacgtttggaattatatccgaggacaaccgcttccgagttgtaccaaaagctggttcagtgttcgtacttcaagcagatcgctggaagttcacactgattggcgacaagctctcgcccagggagaagttgaaggaggatcagcgtcaacaacgtgcacaatcgctaatcagatagtttccaatgtgccagctgttctctcaaaatttttgctccacgaaatacttgcttttgtttagctgttttaccctttttagtttgcctctaacattgaaggtagataatgggtgtctgtttttgcaactattgattttattttacacagcaagatgtaactgcaacggccacgccgtcattgtttaactgtcattcatgctctccatgataaatatatagagttaataggaatgggaatgaggttgacctactaatttgtcactacagaatctgccttcagcggtccactaaaactttagtattgtacatat

SEQ ID NO: 204045 - DNA, 1423 bp, Zea Mays
ctccctcaacacttcaacaactaacacttgagcaagatttgccgagtatcaatccgggtccccatttgttggtggttgaagctcgatttctccatggcgcttcgtgcagcttcatgaatccagtatactggcttcctaaaggatcaatgtcggctatctctgatcagaagaaacgcaccttggaagcccttcagcaacagtatactgctgcaaaagctaagaaattgcaagatgaacaggttaagagtcagaagaagagcaattttaatacccctaagcctaaatgtgatgcaccaaggggaagcaaaggtccagaaatcactcctcgacgaacatatgcccaaccttctcataaaggtgtagcattttctagttctaattgtcaacaaaagccttccacgtcctcaggtgaagaaatcaatcctgtgtatgctgaactttcttgtgcttttcatgacactttgtccaaaggtgttgtctcggatttggatggcacagaggttgttcacaatgttatatatgacataattcagaaaggtggagatgctgggaaaattacaaagggtgccaaaaagttgaaactggaaaaagggatccttttggataattatgttcagaggggttctagattagtggattcccaagcaagatctttgttgattcattcaaagcgatcaaaaaggcacatgtctctaaaacaacataagaaatgtggttcatttgatttagatggtacattccacaagtacgacctctataagccaatgcatgagatgtggaaggactatatcagagagcttatggatctgagcccgaaaaagaaatttactgagaaccttctttcagcagatcttcatggggcccttctaatagtggcagaatgcaaagctgcttcatataaaggtgtaaacggcatcatgattcgggatactgcagagacgtttggaattatatccgaggacaaccgcttccgagttgtaccaaaagctggttcagtgttcgtacttcaagcagatcgctggaagttcacactgattggcgacaagctctcgcccagggagaagttgaaggaggatcagcgtcaacaacgtgcacaatcgctaatcagatagtttccaatgtgccagctgttctctcaaaatttttgctccacgaaatacttgcttttgtttagctgttttaccctttttagtttgcctctaacattgaaggtagataatgggtgtctgtttttgcaactattgattttattttacacagcaagatgtaactgcaacggccacgccgtcattgtttaactgtcattcatgctctccatgataaatatatagagttaataggaatgggaatgaggttgacctactaatttgtcactacagaatctgccttcagcggtccactaaaactttagtattgtacatat

SEQ ID NO: 204046 - DNA, 1574 bp, Zea Mays
cttcgctgtacctctatgaaggttgctgctaaaattgcagtgatcagagaagatggccggactcgacaccttcctcttcacctcggagtccgtgaacgagggacaccctgacaagctctgcgaccaggtctcagatgctgttctggacgcttgccttgctgaggaccctgacagcaaggttgcttgcgagacctgcaccaagaccaacatggtcatggtctttggtgagatcaccaccaaggccaatgtcgactacgagaagattgtcagggagacatgccgcaacattggtttcgtgtcgaacgatgtcgggcttgacgctgaccactgcaaggtgcttgtgaacattgagcagcagtcccctgatattgctcagggtgtgcacggccacttcaccaagcgccccgaggagattggagctggtgaccaggggcacatgtttgggtatgcgactgacgagacccctgagctgatgcccctcagccatgtccttgccaccaagcttggtgctcgtctcacggaggttcgcaagaatggaacctgcccctggctcaggcccgatgggaagacccaggtgacagtggagtaccgcaacgagggtggcgccatggttcccatccgtgtgcacacagtcctcatctctacccagcacgacgagacagtcaccaacgacgagattgctgctgacctgaaggagcacgtcatcaagccagtcatccccgagcagtacctcgacgagaagacaatcttccacctcaacccgtctggccgcttcgtcatcggcggacctcacggcgacgctggcctcactggccggaagatcatcatcgacacctacggtggctggggagcccacggcgggggcgccttctccggcaaggacccgaccaaggtggaccgcagcggggcctacgtcgcgaggcaggctgccaagagcatcgtcgccgccggcctcgcccgccgcgccattgtccaggtctcctacgccatcggcgtgcccgagcccctttcggtgttcgtggacacgtacggcaccggcgcgatccccgacaaggagatcctgaagatcgtgaaggagaacttcgacttcaggcccggcatgatcatcatcaacctcgacctcaagaaaggcggcaacgggcgctacctcaagacggcggcctacgggcactttgggagggacgaccccgacttcacctgggaggtggtgaagcccctcaaggcggagaagccgtcttctgcatgaggcgcctcctctgttttggaagaagcttttggtctggtctggtctggtctggtgtgcctgcgctctatcatgcttttttatggctcctacttgtgattcttgatctgccccttgcttatcatttgtactgtactgtcactgtcctaataagtggtacgtgtgcggggtcgtattgtgtctgcttattcacctactagaggattatttctggttttgctgcttatgtaatgcttttaaaaccatgaaagaagctacaggctcctacagctgctttgagaagtaacggaacctcgtgcattttggagatatgttgcagtgctgtgctgtc

SEQ ID NO: 204047 - DNA, 5314 bp, Zea Mays
tgtctaaattataattattaaaattgaattcaattctaactaagcaaacggggtctaaggaaatttttctttaaaaatcttgtcccaaaatgattcaagactggtatttggttgatttaatttatatcgtgtacattctctgtgaggggtacaactaagaatatccaaaatttattgttttcggagtagtggtgtgaccatttctgtatggttgcctgttcaactaattttagataccagaactgtatataattttgtacatagtgagctttaacgtgaagtgaccatttgcattagcgttttacgagctgctagaacctaagaactattgggtgggaaggttctcgtggatgtttgcttgtttttgggcttttggctggctttcatgttgtaggcggtttttaagttgcaacgttcatgttcattgtttagggcagctctacttaattgggatgtttgcttggtgaagtattagcgggcataggaaagctattatctccttgctaccagtccactgatgattcttggtgaaattgcttttgagaatattgtgaccataataatgattgttatggatctggaagcaaaccatccaattaggtattgtttgcttccggagccggttgggatgaagtggctctgttctagatattttggtggagccagatggttcaacatttatggataattttcctattttagatacacgaaaccaatccaaacaacaacaaattagaagtgtagcggctccgtcccacaatactacagaatcaaacactaccttaagagtttgcagtatttcgacaacgatgattatctccttgctaccaggtacccgctacccccaaagatcccaaattgatacacaatccctttagtcgaacatgtgtagggtagggtgcatccagccgtaacagccagacatttcgtgaccagttgcttgcacatatgttagtggttgcgtataagtttagtgcgcagttattagaaagtatattaataatcccatccatgagtgacaatgattgaccaaataaagcatctgcgctttatcatgtggacgcaccgttggctgctgctggtggtgctttgtagcgctgggaatcgttgtccgcatgcgcggcgctggtcaaaataatgcccgcatgattttttttttgatacagttggatgcttgatttgaattgatcgcggacatcgcctgtacttgctgtctggatttgataccactatttatagtcagtattattattcgcgaagggtcttggacatgatccaaaatagttgcggtgtttggactgttttgatcactgcgtcagtggtctcaactttgaaggagcgagaaagagactcgtatcttggtgaacgattcatttcggtcggttggatagttggtttgtatggggtatcatatatctcgctggatgtgaagatcagttttttctaggggagatgctgctcgacatctctgtatgttttggaccactcaactgctgtggctaaccgtattagtcgggcttagtttatcttggatcctggcttgtatggttcatcttattggtagaccatgcttttgtactcgtgtctgcacatgttagcagaacatgtttgtactgccgagtccacagatcgagatgccatctacttctcccctttgcctcagacgtggtatacgacggagaacaaattcaccttagactcttagagcgtactcgcatgttctggtcaaagccgggcaagaattcctgttgccgcaaagtgcaggataaacaaggacacttgccatgttattaaattgagcacaccaccatttgtatatgtataaaccagagatcgccggacatgttgccatggcgccgctcgatcggacattattattattattcttattattgtcgctggatccaacagcttcccggcctgctaatctacataaatcgcttagacagttgggtgtgtactgttttcagcatctctcacaaaaaaaagtctccggttcgacctcctgcctctgctgctcgcatggccagcctcgtgcaccaggcgtccatgccggcgatggcgccgccgccgccgccgtgcgacgacgagttagtcccgcagggcttcagctgcttcggccgctcgctgtcgcgggcgtcgtcgtcgagccgcctggagtacagggcgctgcagggcgaggagaagcgtaacgccgcgcaggacgcgcggtcggcgcgcgccaagctgcgctggaaggcggtggcgcacgagctcatggccaagggcggcggcggcggcggcggcggcgcgcggcggaggaagcagcagctgggggccttcagctacgactcccggagctacgcgctcaacttcgaccagggcgccgacgagtagcagcagcgtgctgagctcgctagctgctgcgggcggcgggcctgctcctgcttgcggccggctgaccctacgcgcggtgcggatcggagcccgaaacagcgggggttgcacgtgcgtgcggtgcgacccgaaggagcagccacgagtgaccgcccagcgagggaacaatggcgatctaatctactacccaaggaagaagcatgggttttactgtgtaaagatctactgctccgtagtagaaatcaagtccggtcattattgctcttttcttttcttttctttttttcattcagatggcacgaccatgtttgggcgattcgtcatggaatgttcgcctcctcagagcagtttcatcaaatgttcaaatgtgagccaggttgcttcaaggacaaaatgaacttgtttctatgaacaacacataaatattgaaatattaattaatcagacggaaattgagattaactaacgaggtcttcaaatatgcctagctgttacagcaccttggaaaatgagcatgcaacttgcgccttgaaaaaactaaccattcacatagccagtgacatccttcttaccagtcgaacatgtcagctttgccttaattattagtggttttttttctcagttttgcccttttgttctatagcactggaggggtaaaactgagaaaaaaaacacgactaaaggtaaaactgagcacacaaccaaaatcgagggcagcaccataaaaaacccaaaatttggcatcgatcttgatcaatgttaattgggtttaaatctagaattctgctcagtacaagcaaatcatctaaatggagagactcttgagctttggccacgagctttacgacatcagcaacaaaccaaacaaaaggacacttcgtgagagaacacgtcggtggctcggtgccagcatcgacggagccccaccagacaccgcagtaccgcaccgcactgcccatggacgcacacgcacgcctcccggcgcgcccaccccgcccgcgtgcgcgtgcgcgtgcccctgtccgcctcccgtttgccgcctccaccgcaacgcggcgcgcggggtggtggtgccctcgcgatcctcgtgtcgatcccagcggcaggggtgcctgtgcctttgcttctcctggccgttgcccgcgcctcgcggtcgcgcacctgaaccggagccccgcgtcaaatctagggttgcatccgcgccgccccctcctcccgagactcccagcggctggaaccagaacgagggtgacaggcgacgaaagctgcgagggacgccccctcgtcgaatgcactggcgaccgttccgtcgaggagcagccggagcacgcaggaggttagtttagttgagggaaaagctttgaaaatgtcatccaccgtgccgaagtcatcaaatatcttctggcatgattgtccagttggcaagactgatcgccagaagctactcaagcagaaaggttgtgttgtctggattacaggccttagtggttcaggtaaaagtaccttggcatgtacattaggccgtgagctccacacaagagggaagcttgcatatgtccttgacggtgataacttaagacatggtctgaacaaggatcttggcttcaaagctgaagaccgtgctgaaaatataaggagagttggtgaagtagcaaagttatttgcagatgcgggccttgtatgtattgcaagtttgatatctccatataggagagaccgtgaatcttgccgtgcattgttgtctgatagtagcttcattgaagttttcttgaacatgtccttggaattatgtgaagcaagagatccaaagggcctctataagcttgctcgtgcaggaaaaataaagggttttacaggaatagatgacccttatgaagcaccactgaattgtgagattgagatcaaagaggtagatggtgtatgccctccgcctgctgagatggcagggcaagttgttacttaccttgaggagaaaggcttcctgcacgagtaggctgaatccaagcaacatctggggaagatttcagtaagactagcgcagaataagtcaaaggcgctggcagttacggtatagcagttgcatagattggcctcaatgccttagtattttctttccgtacttcctctgccacaggctccatgcaatttcattcagatgagcctggatggttcctaatttctttgacctctagagtagattacttgtaatgcaactctgataaccacttggggcagtatcgatgtggcaatcgcaatcctcacggcagtcaccctcgcccgcacacataaaattcccgcgcccaggtgacaccgcgcgcggcaacgcgacacaacccgacgaagccaaaccgagcaagcaaattaaagcaagcatccgaccaacccgtgcgcgcggcgcgaggaagctcagccaacgtgatggtgttcagcgcctcgttcatggcggcggcggcgcgcgtgccggcggaactgtgccagcggcccccgcgcccggggcagcggcgggtgagcgcggacgacgtcctgcgcgctctgtacctgcccccggcgcggcccccggcgcgggagctcgggcgcctggggacttcctcttcggctttttctgcctgccgctgccggagtacggccgcggcggagggtgggtggcactggcacgggtgcccgacgcggtgctatacacctaccggaggtctctgtcggtcacctcgtcgtcctcatccttctcctcgtcgatgtcctcgtcggaggacgactgattgctgacaaggaacagtaaatacacgttgaggaatgcgccttgcttgtactgtattttttttcgtttgtgcaggagaatcgattagatgtgacttgtacgcccaattcctttgtgacctctgtatatgtccaattattgagtaaatttcagtggcggtcatcgaactcgtcacgagttctc

SEQ ID NO: 204048 - DNA, 2528 bp, Zea Mays
cttactccggtgccggtcggccgggtcgtgcgtgcccctgcccccctccggcctccggctcccagctttctcttcataaatacgcggccgtgcgtcccccgaacccccgcacctcctatccgctccccactcggcgtctgctgctgcattgccgtgccgccagtggagaggagatcagtgatcgttggccactgcactagctgcacgaaggtactgggtccgctctcgttcttgacgtgcctactactatcgtccccgtcgccggagttgctgcgtggtcgcaccggagggtttatcaacgaaggttaaacaaatcttgccggctcaacgcttcgttaggagaagacggaagactgcagaaactcctgaggaggaggacgcggggaataaaatcgagcgataaaaaaagtatcctgttagagatatgtagtgtgtactacgcatttcagagttcacatgcagtcgtaattaacagggctgatggatgctaccactgttgattccaaatggatctctcccgccactgaagatgggtccatggacaggcgaggaaacccagctgtcaagacaaccaccggaagatggagatctgccatcctgctgctagctaactatgggctcgcgacgtgcgccttcttcggcgtcggcgtgaacctcgtggtgttcctgcgccgggtgctccaccagggcaacgccgaggcggccaacagcatcagcaagtggactgggaccgtctacatcttctcgctcatcggcgccttcctcagcgactcctactggggccgatacgtcacgtgcgccgtcttccagatcatctacgtgatggggctggtggtcctgtcgctcgcgtcatggctcttgctggtgaagccgtccggctgcggcggcgtcaaggcgcactgcgacgggccgtcggcgcccggcgtcgcgctgttctacctgtccacctacatgatcgcgttcggcaacggagggtaccagccttccatcgcgacgttcgggtcggaccagttcgacgagacggaccccgaggaggcgcgctccaaggtggccttcttcagctacttctacctggcgctcaacgtcggctccctgctctccaacacggtgctggtgtactacgaggactcggggcggtgggtcatggggttctgggtctcggcggccgccgcggcgctggcgctcgtgctcttcctgctcggcacgcccggctaccgccacttcaagccgagcggcaacccgctcacccgcgtcgcgcaggtgttcgtcgccgcgctgcgcaagtggcgcgccgaggtcccgcgtggcgagctcctccacgaggtggtggaagcaggagaggaccctaaggtctcgggcatccgcaagatccttcacagcgacgggctcaggttcctcgacaaggcggcgacgatcacggaggaggaggaggaggagggtccgtggcggctctgcacggtgacgcaggtggaggaggtgaagtgcatcctgaggatgctgcccatctggctgtgcacgatcgtgtactcggtggtgttcacccagatggcgtcgctgttcgtggagcagggcgccaccatggacaccaacatcgggtcgttccacttccccgccgcgagcatgtcgctgttcgacgtcctcagcgtgctggcgttcatcgccatctaccggcgggtgctggtgcccgtcatggcgcggctgtcaggcaacccgcagggcctgaccgagctgcagcgcatgggcgtcgggctcgtgatcggcatggcggcgatggtggtggcgggcgtggtggaggtggagcggctgaagcgcgtggcggccccggaccagccgagctccctgagcgtgctgtggcaggtgccgcagtacgcgctgatcggggcgtcggaggtgttcatgtacgtggggcagctggagttcttcaacgggcaggcgcccgacggcgtcaagagcttcggcagcgcgctgtgcatggcgtccatctcgctggggaactacgtgagcatcatgctggtgagcgtagtcacgagcctcaccgccggtgagaagcgtccggggtggatccctgggaaccttaactcaggacacctcgacaggttctacttcctcctcgccgctctctcgctcgtggacctcgccgtctacgtcgcctgtgccatgtggtacaagggcatcaagcttgacggcggcgacggcgataacaggagaaaggtctctgcgcacgtctagctagccactgcatactggacctcgggccttcagttttcaggttcagagacgtgccgggctggcccctggccgtatgcccgtatagtcttatagagagaggagagagagagagaggaaataaaatgtcaaagaatatgtaaccatccgctcggcgttggatggcccatgttgttatgtatctttggtcagatgatccaagtaacctcatgtgaagtactaatgcaataattatatatggatagtacactatctgtgccttaggacggcacgtaattatatttaatgatgagtgattttag

SEQ ID NO: 204049 - DNA, 546 bp, Zea Mays
acgtgtgcactgtctcgctcgcacaggtcttccaagtctgcgccttctctcgcaatggctgctttggtggccacggctgcagtgctgcacggctgcaccacagtcctgctccgatccaagcgtacgcaaagacggcgagacgactttctttccatcagctgaccttgtcccggtcttgcggtacgtagtttccaagctccatcaggcagtcagagtcagtcaggcatggatggacggctataaatctctccagggtcgcgtcgtgaccggcatcgaagacgatggctgctcgaggcgtggctcccgtgctcgcagcagcaatggctgttacggcattcgccgccgttgcgacaaatgtgcttcggcgtgggctttgaagaggagccttacaagaattcaaaacactacgtcgtcacgaacctttggtgcacataatcctagcaaaatataccgcctgcattaattgcatcgcacgtggcaggagtgccggctacacagatgatgacgtattcccttgtttatattaattacctgtaaatcagaacc

SEQ ID NO: 204050 - DNA, 1292 bp, Zea Mays
attctaaccaacatttatgtttggaaaatttcaaccactgagaagtttcatcattgttatgcaatccttgttcgatgggatttgcaactggtgggaagactttcttcttgtggggtggctgtatgatgatgcatgctgatgattttaggcaagaccggtacggcattgtcagtggattaagagatggcggttactcagatgatatgacactcgctgcaatagcaggacagcacaaaaggctcatattttcaccacctgttgctgtgtttccacacccccttgccagtgatcttagcttctccagatactggaattacctcaggaaacaaacttttgttctcgagtcatatgtatcgaatgtaaactggatgatgaaccgtgcattatttacaagccattgctatctgtcatgggggtttgtctggccatacattatggctttggtccatgttttagctgctcttcgggcaccgtacagcaaagttgtaaaggaagcatccgattcatcttggggtttgttcctggtgggcctcttgttcacatgcactctgatcgagctcgtttcaatgtggaatttgactaaggtggaaattcaactgtgcaatatgctgtctcctgaaggaccgaaagtatctcttgattcatacaactgggggctcgtgttcatcgctgtgttggtagacaacttcctctatccagtatccgcaatccggtcgcatttctcccaatcaatcaactggtctggcatccggtactacttgagggacgggaaaataagcaagatcgagagagagaacagttcgaagtacactgatcttggagggaagcatctatacggcaagaggacataccctcctaacaaatcgttgctcggttacctgtcaagaactctagtgcaatggcatcagccaaagaaatatgacgtataggaaggtcgaccgggggagattcagccctcgattgtgtggggggcttcttgttgtacacctcttttggtttcaactttctttcatgcctctctctctctctctctcctctctgattgtttagtggttattaggttcattcatattaaattttgtggtgttcaatcggcgccaccactttgaaagggttgcattgcacctcatagttctttgtaacactagagatatgtaacgatttggctgaagaagtgaaatgttccatgttggtgagacggtctctttggttcatttgctgattcatcgactctttaagagttgacatctactcactattgtatcataggatcacatgccttgatatagcaa

SEQ ID NO: 204051 - DNA, 1429 bp, Zea Mays
gtttccatcctcgatgtctatttcatgatcggtgttgaaaagatgcacaaggataccaagtatgtattgtttcttgatgatgatgtgaggctgcatcctgggactatcggagctctcacaaaagaaatggagaagaatcctgagatatttatacaaactggatatccccttgacttaccttctggcagtttgggcagctattgcatatatgaataccacatgccttgttcgatgggatttgcaactggtgggaagactttcttcttgtggggtggctgtatgatggcaagaccggtacggcattgtcagtggattaagagatggcggttactcagatgatatgacactcgctgcaatagcaggacagcacaaaaggctcatattttcaccacctgttgctgtgtttccacacccccttgccagtgatcttagcttctccagatactggaattacctcaggaaacaaacttttgttctcgagtcatatgtatcgaatgtaaactggatgatgaaccgtgcattatttacaagccattgctatctgtcatgggggtttgtctggccatacattatggctttggtccatgttttagctgctcttcgggcaccgtacagcaaagttgtaaaggaagcatccgattcatcttggggtttgttcctggtgggcctcttgttcacatgcactctgatcgagctcgtttcaatgtggaatttgactaaggtggaaattcaactgtgcaatatgctgtctcctgaaggaccgaaagtatctcttgattcatacaactgggggctcgtgttcatcgctgtgttggtagacaacttcctctatccagtatccgcaatccggtcgcatttctcccaatcaatcaactggtctggcatccggtactacttgagggacgggaaaataagcaagatcgagagagagaacagttcgaagtacactgatcttggagggaagcatctatacggcaagaggacataccctcctaacaaatcgttgctcggttacctgtcaagaactctagtgcaatggcatcagccaaagaaatatgacgtataggaaggtcgaccgggggagattcagccctcgattgtgtggggggcttcttgttgtacacctcttttggtttcaactttctttcatgcctctctctctctctctctcctctctgattgtttagtggttattaggttcattcatattaaattttgtggtgttcaatcggcgccaccactttgaaagggttgcattgcacctcatagttctttgtaacactagagatatgtaacgatttggctgaagaagtgaaatgttccatgttggtgagacggtctctttggttcatttgctgattcatcgactctttaagagttgacatctactcactattgtatcataggatcacatgccttgatatagcaa

SEQ ID NO: 204052 - DNA, 1960 bp, Zea Mays
aaacccgtaacagctgttggtgcatatgcttggagatttgtcggtttcttcccgacaagtgttgtcgatctcagcttgtcccactccatgtgttacctgctactgcctactgctaagtgctccaattccaattgggtgcatgatctgtttagtccttgctctcgggtgggcggctgcttcaattgtcagaaaaggggttataaagaacatgaggcgcaacattgtagatggaaatagttttgcatttctttgtgacaacatagatgagcttgagcactctgttcaggagaatttacctagagtctctgtagtcatgcctttgaagggctttggcgaacataatttgcaaaattggcgaactcagattacatcactttatggtgggccactggaattcttgtttatcgtcgagagcaaagatgatcctgcttatcatgctgtttcccgtttgatcacagagtacaaggacaatctggaggcaaaggtggtcgttgctgggttgtcaacaacctgtagccagaaaattcacaatcaattgatcggtgttgaaaagatgcacaaggataccaagtatgtattgtttcttgatgatgatgtgaggctgcatcctgggactatcggagctctcacaaaagaaatggagaagaatcctgagatatttatacaaactggatatccccttgacttaccttctggcagtttgggcagctattgcatatatgaataccacatgccttgttcgatgggatttgcaactggtgggaagactttcttcttgtggggtggctgtatgatgatgcatgctgatgattttaggcaagaccggtacggcattgtcagtggattaagagatggcggttactcagatgatatgacactcgctgcaatagcaggacagcacaaaaggctcatattttcaccacctgttgctgtgtttccacacccccttgccagtgatcttagcttctccagatactggaattacctcaggaaacaaacttttgttctcgagtcatatgtatcgaatgtaaactggatgatgaaccgtgcattatttacaagccattgctatctgtcatgggggtttgtctggccatacattatggctttggtccatgttttagctgctcttcgggcaccgtacagcaaagttgtaaaggaagcatccgattcatcttggggtttgttcctggtgggcctcttgttcacatgcactctgatcgagctcgtttcaatgtggaatttgactaaggtggaaattcaactgtgcaatatgctgtctcctgaaggaccgaaagtatctcttgattcatacaactgggggctcgtgttcatcgctgtgttggtagacaacttcctctatccagtatccgcaatccggtcgcatttctcccaatcaatcaactggtctggcatccggtactacttgagggacgggaaaataagcaagatcgagagagagaacagttcgaagtacactgatcttggagggaagcatctatacggcaagaggacataccctcctaacaaatcgttgctcggttacctgtcaagaactctagtgcaatggcatcagccaaagaaatatgacgtataggaaggtcgaccgggggagattcagccctcgattgtgtggggggcttcttgttgtacacctcttttggtttcaactttctttcatgcctctctctctctctctctcctctctgattgtttagtggttattaggttcattcatattaaattttgtggtgttcaatcggcgccaccactttgaaagggttgcattgcacctcatagttctttgtaacactagagatatgtaacgatttggctgaagaagtgaaatgttccatgttggtgagacggtctctttggttcatttgctgattcatcgactctttaagagttgacatctactcactattgtatcataggatcacatgccttgatatagcaa

SEQ ID NO: 204053 - DNA, 2561 bp, Zea Mays
aaaggccaccgaggcagcccaaatcaacccgttcgttcctcccttctcccccctctccccacatcgggcagcctcccccctctctctcaccgctcaggtcaggccaggcccggcgggagagagatccggcgagagacgcggcctcttgctcccctcaacccccttaaagaagcgcatagaagcttcggaaggtgcccctccgcggctcgaaggaggggaggggacgccgcggacaatgacggcgatggaagccgccgtcgacgctatgctcgccgccgcgagccgtgccttcacgagcacctttgccatcgccatccagatccaggggtgcatgatctgtttagtccttgctctcgggtgggcggctgcttcaattgtcagaaaaggggttataaagaacatgaggcgcaacattgtagatggaaatagttttgcatttctttgtgacaacatagatgagcttgagcactctgttcaggagaatttacctagagtctctgtagtcatgcctttgaagggctttggcgaacataatttgcaaaattggcgaactcagattacatcactttatggtgggccactggaattcttgtttatcgtcgagagcaaagatgatcctgcttatcatgctgtttcccgtttgatcacagagtacaaggacaatctggaggcaaaggtggtcgttgctgggttgtcaacaacctgtagccagaaaattcacaatcaattggtttgtaaatgactttgtttccatcctcgatgtctatttcatggtctgttcatgacactgaatgctcattttggcttatgcttgtagatgttcctagtgtgtggaatggagatgttgaatgtgcatgcattcaaatattccatcctatttccaatatattttttttgccgtttgcatatcattcatcttccccttttatagaaactaaagtgtcttgaacggtggtaagttgtaagtgctacatttgttaccttgcaagcatgaggatagtcacattggatatgaaaaaatgccacaaattttgactgttactgtggttactatatgttcatctcttggccttgttttattttttaccaaagaaggccagtaaattgactcgttactcatgtttatcaaactgaaacagatcggtgttgaaaagatgcacaaggataccaagtatgtattgtttcttgatgatgatgtgaggctgcatcctgggactatcggagctctcacaaaagaaatggagaagaatcctgagatatttatacaaactggatatccccttgacttaccttctggcagtttgggcagctattgcatatatgaataccacatgccttgttcgatgggatttgcaactggtgggaagactttcttcttgtggggtggctgtatgatgatgcatgctgatgattttaggcaagaccggtacggcattgtcagtggattaagagatggcggttactcagatgatatgacactcgctgcaatagcaggacagcacaaaaggctcatattttcaccacctgttgctgtgtttccacacccccttgccagtgatcttagcttctccagatactggaattacctcaggaaacaaacttttgttctcgagtcatatgtatcgaatgtaaactggatgatgaaccgtgcattatttacaagccattgctatctgtcatgggggtttgtctggccatacattatggctttggtccatgttttagctgctcttcgggcaccgtacagcaaagttgtaaaggaagcatccgattcatcttggggtttgttcctggtgggcctcttgttcacatgcactctgatcgagctcgtttcaatgtggaatttgactaaggtggaaattcaactgtgcaatatgctgtctcctgaaggaccgaaagtatctcttgattcatacaactgggggctcgtgttcatcgctgtgttggtagacaacttcctctatccagtatccgcaatccggtcgcatttctcccaatcaatcaactggtctggcatccggtactacttgagggacgggaaaataagcaagatcgagagagagaacagttcgaagtacactgatcttggagggaagcatctatacggcaagaggacataccctcctaacaaatcgttgctcggttacctgtcaagaactctagtgcaatggcatcagccaaagaaatatgacgtataggaaggtcgaccgggggagattcagccctcgattgtgtggggggcttcttgttgtacacctcttttggtttcaactttctttcatgcctctctctctctctctctcctctctgattgtttagtggttattaggttcattcatattaaattttgtggtgttcaatcggcgccaccactttgaaagggttgcattgcacctcatagttctttgtaacactagagatatgtaacgatttggctgaagaagtgaaatgttccatgttggtgagacggtctctttggttcatttgctgattcatcgactctttaagagttgacatctactcactattgtatcataggatcacatgccttgatatagcaa

SEQ ID NO: 204054 - DNA, 2126 bp, Zea Mays
atcttctcttaagaacaaaattctccttttctaaataaaatacaatcccacatcgagcacatcaacctcgttcgctgtccgttgtcctctccctgccccaagggtcctggcgcggcaagatcaaagcctcccaacagccaacaagtcgatcgcaaatcgcaagaacaagagaagaaccaatccgacaacgtctccattctccctcacatctccttgctcgcccagcagctggcactccccgtctcccctcgcatccgcatcgaatcgaggcatatcgccctatatatcccattccgctcggttggattcagcttcccctccctctcccccatcgataaaaccgatgcgtcgcccggcctcgcgtaccctaccggcgacgggacgaggggaaggttacaggcacggcgcgtgaagggtcctgcccagtcctgcccggtccgccgcgatgccgtggtttgagatgtggctgcctcctgtgcctggcgagggggctgtggcggcggcgggggggctgttcctcgacggcgccgatgcggcggcgcacggcgcgctcctcgcggccatgcctggttgctccttgtcgttcgtgctccggcaccagcgttgccgggggtcgccgccggggttcctgtcgctgacgatgtcggtaaaggggggcaggggctttgtgccggccccggtggggttgctcgctggtgcggaggagaagagcggggcggaggagtcggacgcgctggtcgcggggaagagggccgtggaagcggaggcggaggcggaggcggagggagtgattctgctgcaggagaaggagaaaaagaagaagaagctggacgattgtgctggagctggcgcgatgaacatgaccaaacacctatgggccggagccgttgctgccatgatatcgagaacagccgttgctccacttgagaggctaaagttggagtatatagttcgtggtgagcagaggaatctatttgagcttatgcatgctattgcaacaacacaaggattgaaaggcttttggaaaggaaactttgtgaatatcctccgcactgctccattcaaggcagtcaacttctatgcatatgacagttacagaaagcaactggtcaaatgggctggtaatgaagaagctacgaactttgagagatttattgctggtgcttttgctggtgttacagcaacaattatgtgcatacctatggatacaatcaggacaaagatggtagctcctggcggtgaagctttaggtggggtcattggtgttgcccgccacatgatccaaactgaaggattcttctcgctgtacaagggattggtgccttctcttatcagcatggcaccctctggtgctgtattctatggagtgtatgacatactgaagatggcttatctgcattcccctgaaggaaagaaaagagtatcgatgatgaagcaacagaaacaagaggcaaatgcattggatcaacttgaattgggtactgtgaggaccttactctatggggctattgctggttgctgtgctgaagcagctacatacccgtttgaagtggtccgtaggcagctacagatgcaagtaaaagcaacaagaatgaatgcatttgcaacatgccttaagattgttgatcaaggtggggtaccagcactgtatgccggtctgatccccagcatgttacaggttctaccatcagcatcgatcagctattttgtttatgagttgatgaagatagtcctgaaagtggagtgaatacaaattaattggtgagcctacgaaccacgttcaaatggtgatcacataccttgataaaattgccgaaaaaaaaacttgtttgacgaaagctcctgatgctgagggtagcttcaggttggtaccgtaaaacattgttcagctgaggcttttcacactagttgaccaaattgtacacgaggatatattcaagacctaattcagtggcttagtagaagattgttctctgcaactctgccccagcgaaataatctcggccttgcccaatttctgttgacaatttttttcatactttgtcgttgatgtatttgacacattgacagcagtccagagcgacatttgggacattctatctgtgaccctgtctaatgcggttata

SEQ ID NO: 204055 - DNA, 2169 bp, Zea Mays
cccacatcgagcacatcaacctcgttcgctgtccgttgtcctctccctgccccaagggtcctggcgcggcaagatcaaagcctcccaacagccaacaagtcgatcgcaaatcgcaagaacaagagaagaaccaatccgacaacgtctccattctccctcacatctccttgctcgcccagcagctggcactccccgtctcccctcgcatccgcatcgaatcgaggcatatcgccctatatatcccattccgctcggttggattcagcttcccctccctctcccccatcgataaaaccgatgcgtcgcccggcctcgcgtaccctaccggcgacgggacgaggggaaggttacaggcacggcgcgtgaagggtcctgcccagtcctgcccggtccgccgcgatgccgtggtttgagatgtggctgcctcctgtgcctggcgagggggctgtggcggcggcgggggggctgttcctcgacggcgccgatgcggcggcgcacggcgcgctcctcgcggccatgcctggttgctccttgtcgttcgtgctccggcaccagcgttgccgggggtcgccgccggggttcctgtcgctgacgatgtcggtaaaggggggcaggggctttgtgccggccccggtggggttgctcgctggtgcggaggagaagagcggggcggaggagtcggacgcgctggtcgcggggaagagggccgtggaagcggaggcggaggcggaggcggagggagtgattctgctgcaggagaaggagaaaaagaagaagaagctggacgattgtgctggagctggcgcgatgaacatgaccaaacacctatgggccggagccgttgctgccatgatatcgagaacagccgttgctccacttgagaggctaaagttggagtatatagttcgtggtgagcagaggaatctatttgagcttatgcatgctattgcaacaacacaaggattgaaaggcttttggaaaggaaactttgtgaatatcctccgcactgctccattcaaggcagtcaacttctatgcatatgacagttacagaaagcaactggtcaaatgggctggtaatgaagaagctacgaactttgagagatttattgctggtgcttttgctggtgttacagcaacaattatgtgcatacctatggatacagacaaagatggtagctcctggcggtgaagctttaggtggggtcattggtgttgcccgccacatgatccaaactgaaggattcttctcgctgtacaagggattggtgccttctcttatcagcatggcaccctctggtgctgtattctatggagtgtatgacatactgaagatggcttatctgcattcccctgaaggaaagaaaagagtatcgatgatgaagcaacagaaacaagaggcaaatgcattggatcaacttgaattgggtactgtgaggaccttactctatggggctattgctggttgctgtgctgaagcagctacatacccgtttgaagtggtccgtaggcagctacagatgcaagtaaaagcaacaagaatgaatgcatttgcaacatgccttaagattgttgatcaaggtggggtaccagcactgtatgccggtctgatccccagcatgttacaggttctaccatcagcatcgatcagctattttgtttatgagttgatgaagatagtcctgaaagtggagtgaatacaaattaattggtgagcctacgaaccacgttcaaatggtgatcacataccttgataaaattgccgaaaaaaaagtatgtaagggctagtttggaaactctattttttaagggatttagggaaaatgggatttccaaactagccctaacttgtgaaattttctcgtagacttgtttgacgaaagctcctgatgctgagggtagcttcaggttggtaccgtaaaacattgttcagctgaggcttttcacactagttgaccaaattgtacacgaggatatattcaagacctaattcagtggcttagtagaagattgttctctgcaactctgccccagcgaaataatctcggccttgcccaatttctgttgacaatttttttcatactttgtcgttgatgtatttgacacattgacagcagtccagagcgacatttgggacattctatctgtgaccctgtctaatgcggttata

SEQ ID NO: 204056 - DNA, 1347 bp, Zea Mays
cagatttagaagattcacagtatattcatggcctctggccgttgctccacttgagaggctaaagttggagtatatagttcgtggtgagcagaggaatctatttgagcttatgcatgctattgcaacaacacaaggattgaaaggcttttggaaaggaaactttgtgaatatcctccgcactgctccattcaaggcagtcaacttctatgcatatgacagttacagaaagcaactggtcaaatgggctggtaatgaagaagctacgaactttgagagatttattgctggtgcttttgctggtgttacagcaacaattatgtgcatacctatggatacaatcaggacaaagatggtagctcctggcggtgaagctttaggtggggtcattggtgttgcccgccacatgatccaaactgaaggattcttctcgctgtacaagggattggtgccttctcttatcagcatggcaccctctggtgctgtattctatggagtgtatgacatactgaagatggcttatctgcattcccctgaaggaaagaaaagagtatcgatgatgaagcaacagaaacaagaggcaaatgcattggatcaacttgaattgggtactgtgaggaccttactctatggggctattgctggttgctgtgctgaagcagctacatacccgtttgaagtggtccgtaggcagctacagatgcaagtaaaagcaacaagaatgaatgcatttgcaacatgccttaagattgttgatcaaggtggggtaccagcactgtatgccggtctgatccccagcatgttacaggttctaccatcagcatcgatcagctattttgtttatgagttgatgaagatagtcctgaaagtggagtgaatacaaattaattggtgagcctacgaaccacgttcaaatggtgatcacataccttgataaaattgccgaaaaaaaagtatgtaagggctagtttggaaactctattttttaagggatttagggaaaatgggatttccaaactagccctaacttgtgaaattttctcgtagacttgtttgacgaaagctcctgatgctgagggtagcttcaggttggtaccgtaaaacattgttcagctgaggcttttcacactagttgaccaaattgtacacgaggatatattcaagacctaattcagtggcttagtagaagattgttctctgcaactctgccccagcgaaataatctcggccttgcccaatttctgttgacaatttttttcatactttgtcgttgatgtatttgacacattgacagcagtccagagcgacatttgggacattctatctgtgaccctgtctaatgcggttata

SEQ ID NO: 204057 - DNA, 1349 bp, Zea Mays
atttagaagattcacagtatattcatggcctctggaacagccgttgctccacttgagaggctaaagttggagtatatagttcgtggtgagcagaggaatctatttgagcttatgcatgctattgcaacaacacaaggattgaaaggcttttggaaaggaaactttgtgaatatcctccgcactgctccattcaaggcagtcaacttctatgcatatgacagttacagaaagcaactggtcaaatgggctggtaatgaagaagctacgaactttgagagatttattgctggtgcttttgctggtgttacagcaacaattatgtgcatacctatggatacaatcaggacaaagatggtagctcctggcggtgaagctttaggtggggtcattggtgttgcccgccacatgatccaaactgaaggattcttctcgctgtacaagggattggtgccttctcttatcagcatggcaccctctggtgctgtattctatggagtgtatgacatactgaagatggcttatctgcattcccctgaaggaaagaaaagagtatcgatgatgaagcaacagaaacaagaggcaaatgcattggatcaacttgaattgggtactgtgaggaccttactctatggggctattgctggttgctgtgctgaagcagctacatacccgtttgaagtggtccgtaggcagctacagatgcaagtaaaagcaacaagaatgaatgcatttgcaacatgccttaagattgttgatcaaggtggggtaccagcactgtatgccggtctgatccccagcatgttacaggttctaccatcagcatcgatcagctattttgtttatgagttgatgaagatagtcctgaaagtggagtgaatacaaattaattggtgagcctacgaaccacgttcaaatggtgatcacataccttgataaaattgccgaaaaaaaagtatgtaagggctagtttggaaactctattttttaagggatttagggaaaatgggatttccaaactagccctaacttgtgaaattttctcgtagacttgtttgacgaaagctcctgatgctgagggtagcttcaggttggtaccgtaaaacattgttcagctgaggcttttcacactagttgaccaaattgtacacgaggatatattcaagacctaattcagtggcttagtagaagattgttctctgcaactctgccccagcgaaataatctcggccttgcccaatttctgttgacaatttttttcatactttgtcgttgatgtatttgacacattgacagcagtccagagcgacatttgggacattctatctgtgaccctgtctaatgcggttata

SEQ ID NO: 204058 - DNA, 421 bp, Zea Mays
tgaatggagactcatgtttgccacaagctactcacatcgctggtgcggaggtggtgacatctgaaggctgaagcctatagaaggtaagaagggcattgttccgctctggtatccgcaatcatcaggttcagccatctgtgtctattgtgtaagtacaattttgaaggtgaagaagagcaggctaaaacctagtttggagcatttgccgaacccaaaaaaaatgtttggcaataacacgcccgcgatgttggtttagtatattatattatattcataagatgtactcatattcctgatcttccacttgtaaaattgtatccagcttaacaaatcctaatcgataagaccgttgcctcttgttcaacactttgcattgctatcgactcaactagaaaaatagcgtgttgccacaccattttgc

SEQ ID NO: 204059 - DNA, 2783 bp, Zea Mays
ccccgtcgcctgcccgttcccccgtttctaattttatgaccgtcgaaaaccaaaatttagataggccacccaaatccaggtgcaaatcccaacctccctccctcccaggccccctccccacctccacctccaggcaccactggtcccacctcctcacctgcgaggatgctgctcgtgagtcaggcagcgaacggctccctctccgcgcggcggctgccgtcgaagccgccggggccgtccaccaccaacccctacccgctcttcgccaaccctcgcctcctgcgccgccgcctggcgctctccggcgctggcgccgaccaagccccgcgccgcgccgcgccgaccccagccgccgcgggcgagggcccctccgcctcctccaccgaggacccggtccttgtccgcgtcgccgacgacggcgtgccgctcgagggcgtcatccagattgagaagcccggggatgcggccgccgagtccaagctcgtctcctacgcgaagctgggtcttctggccggcggggacgtgttctgccttctgctgttctctgcgattggaaggttcagccatggcctgcccgtcctcgacgccgagacgttcaagacggccgaccccttcattgctgggtggctgctgagcgcctaccttcttggcggatttggcgatgatgccaaagggcgcaatggcgtcggaagcgcggttatcaccgcagctaaatcatgggctgttgggataccggtaactttcaattctttaattctactgtttcaagcatgagccaggatgaaatgttatcttggttcttgttgttttttacccaaggtcaataacgtttttgtaagctgaggccttctgatttttgacccatctaacaccatcttctgttttttttgccaaccgtgcttgcacacaacaccatcttctattgttcattattgctgtctgttgcttgcatgagtgcatctgcctttcacttgtacattatataactttttttaatcaaatacatcacaaactacatttatttctgtgtctcatctattcatgcaattatttgttctatgtatttggctattttgttctcttgtctgtttccattacatatgaatctcttgggtgatagtcaactaaattccgacatgcttgaatgctttattaataagaaacctacttctttttataaggtttagtaggcattactaaggagccgtttggtacatctctagctttgagatcgatgttgattctgcagtttgtagactaaactaaaatagtttgaataattatgggcctgtttgtttcagcctttttgcagcttctggccgccataagctgatgcggactgtcaaacaccttgtttttcagaccgtttttgtgagaatcgctttattgaaaaccgtccaaaatcaatgtgaacacaaattcggtcgagtcgtcgcgatagtaggaatccgtcactttcaagatcctaaactctatggacccatttatcttcctccacacgtaatctccacaatactcagattctccccacagctagattctcacaaaagctcgtaaaaaagctgaaacaaacaagccctatatctagtccaaactatacaaaaggagtcatcagtaatgtaattgcaaccagcacacctcctgctccagatccaaggttgtccgaagctacagatacctagctctacgaaacatgtgaatttcttaaacaaatcttgctaaacaaatctagatgtttttaattagttgaacaagtgatccaaacagattattgcttgtgtctcctagctatactattgggtgatttactctagtatttggagcaaattattttttctattataagatgatccattactcaaggtctaaccattggttgtttcatttgtgtagtgccagtcatacaatattgttaaatcgcaactaacatgcttcagcccttcaacatagtgatttgagtagcaagagaaactatgcttttctagtagatcttgcataaaagttaaattgatgaactgtcccaggttttttattaaaagcaggcaccactgtttttcccatgtggtcttgtacattcataaatgacaactgcatttacttatgatctgatctttacaacattttcatgtctcattaactagagtcggtgtgttttctgatggataatgcttgacgtttatgatgattctctttctcgtgttagttgggacttgctatccgagcagtgacgtctggtcatcttccaccaactccttttatcttggtaaccatgggaagtacaggggtcttgttaactgcatggcgtgctttggtatcacaactgttttccaaccagcaaaagcagcaggatgatgtctaccggcgtggaagtccttttgagctttttgagctactcacatcgctggtgcggaggtggtgacatctgaaggctgaagcctatagaaggtaagaagggcattgttccgctctggtatccgcaatcatcaggttcagccatctgtgtctattgtgtaagtacaattttgaaggtgaagaagagcaggctaaaacctagtttggagcatttgccgaacccaaaaaaaatgtttggcaataacacgcccgcgatgttggtttagtatattatattatattcataagatgtactcatattcctgatcttccacttgtaaaattgtatccagcttaacaaatcctaatcgataagaccgttgcctcttgttcaacactttgcattgctatcgactcaactagaaaaatagcgtgttgccacaccattttgc

SEQ ID NO: 204060 - DNA, 1411 bp, Zea Mays
gaaccaacccttctgtcgtaccctctggatcgaagcctggacgacgcgaccgtgcggcggcgactcgacgcaaccagcacggcggcggcgcacagccccgacgacgactctccccactgccttctctccggttcattgccctttgagaaattgtgggagacgttcttacagggacatgagggaagatactccatctatgtgcacgcatcacgtgaaaagcctgttcatactagttctttgtttgctggtcgggatattcacagtgatgcgatagtatggggattgatttcaatggttgatgctgagaagagactattagcaaatgcactggaagatgttgataatcaagtttttgtcttgctttctgacagctgtgttccgctgcattcatttgattatgtgtataactacctgatgggaacgaatgttagcttcattgattgtttcaaggatccaggtccacatggcagtggaaggtaccctattgagatgtatcctgaaatagacgagagtgattttagaaagggtgcccagtggtttgcagttacgaggagacatgctttaatgattctggctgacagcctgtactacaagaagttcaagctatactgcaagccagcagaagggcgcaactgtattgcagatgagcattatttgccaacgctgttcaatatggtagatcctggtggcatctccaattggtctgttacacatgtggattggtccgagggaaaatggcatccaaggtcatatagtgctgacgatgtcacttatgatctcttgaagaatattacaacaactgatgagaacttccatgtgacaagtgatgacaagaaacttgtgatgcagaagccgtgtttgtggaatggatcgaagagaccgtgctatcttttcgccaggaagtttaatcctgaagcactcgataacctactgaagctgtttacaagttatacatctgtttgagcctatgagtcctacctgattctttgccttgggctttctaatcccacatttttttctgtttatatgtaaattgggaagcccgtatttattgggatctgggcctaaagatatcggtacaactgcaacagctgtgatggcttggagtacagtcctgggtaaatggccacaacaatgtttatagaatgacactgccctgagtgtaatttgtcgtgttcaatgtatgtctccatagtcttccagccaactcctaactcattagttctctattcttggagaacagttttttttttgtcagaatgttatatgatccattctttgtagacacagagattacaacagatgtaccacaaatgcagtcttaattttgtcactattaaatcttttatcaggcgttcaactgtgattatattttcagcaaattaaggccccccttcggaacaaaggaaat

SEQ ID NO: 204061 - DNA, 970 bp, Zea Mays
ccctgattggatccaggtccacatggcagtggaaggtaccctattgagatgtatcctgaaatagacgagagtgattttagaaagggtgcccagtggtttgcagttacgaggagacatgctttaatgattctggctgacagcctgtactacaagaagttcaagctatactgcaagccagcagaagggcgcaactgtattgcagatgagcattatttgccaacgctgttcaatatggtagatcctggtggcatctccaattggtctgttacacatgtggattggtccgagggaaaatggcatccaaggtcatatagtgctgacgatgtcacttatgatctcttgaagaatattacaacaactgatgagaacttccatgtgacaagtgatgacaagaaacttgtgatgcagaagccgtgtttgtggaatggatcgaagagaccgtgctatcttttcgccaggaagtttaatcctgaagcactcgataacctactgaagctgtttacaagttatacatctgtttgagcctatgagtcctacctgattctttgccttgggctttctaatcccacatttttttctgtttatatgtaaattgggaagcccgtatttattgggatctgggcctaaagatatcggtacaactgcaacagctgtgatggcttggagtacagtcctgggtaaatggccacaacaatgtttatagaatgacactgccctgagtgtaatttgtcgtgttcaatgtatgtctccatagtcttccagccaactcctaactcattagttctctattcttggagaacagttttttttttgtcagaatgttatatgatccattctttgtagacacagagattacaacagatgtaccacaaatgcagtcttaattttgtcactattaaatcttttatcaggcgttcaactgtgattatattttcagcaaattaaggccccccttcggaacaaaggaaat

SEQ ID NO: 204062 - DNA, 1269 bp, Zea Mays
agtcccgctgtcctccaaacgtcgcctatcttcccgcgcccgctcgtgtatccgtctctaagccaactccagcaacaccgtcaccgtgtgtgtttagactgatacattgtttgtagagagaattttgaaatagaaagtttgataaagagtgaaatagagagtcgctggagataatagtcgcccgcaacccatttgaaaatcacgccgtgttggcgtgtaatcggcgattcggcggccgccgggcggtggcgatggaggtgggtgacctgcacaaggtgtgggaggtccgtgcgctcaagatcaagcccgacgcgaccgccgcgcgggcaaccctcgaccgcgttgccaggcaggtccagcccatcatgcgccgccacaaatggcgcgtcaaggtcctctccgagttttcgccgcggaacccgaggctgctggggctcaatgtcggcgcgggcgtcgaagtcaagctgcggctacggcgcgccggccgcgaccatgacttcatcccgtacgaggaggtgctcgataccatgctacacgagctctgccacaacgagcgcgggccccacgatgcgcagttttacaagctctgggacgagctccgcaaggaatgcgaagaacttgtttcaaagggtatcactggaacaggacaagggtttgatggcacgggaaggcgagttggtggatttactgtacatccaccaccaccatctctgcggcaagctacgttagctgctgcacagaagcgggcaaggaatggagctctattgccttctggaccaagaaagttgggtggaaacagtgaaattatgagtgcacttagtccagtacaagctgctgcaatggcggctgaaagaagaatgtatgatgatttgtggtgtggatcacatgatcaatctgctattgatgattcggatgatgttattattcttcaagagtcgccaaatttgacaagggatgaaaaagacaagggtagctgctccaacacttctgcacagcccagcacttcttctagaattcacatagcagcacgagatgataggacaacaagtgatgcacttgatagttcaaagtgggaatgtggtgcttgcacacttctgaaccaggttagctccagatcttgaatgaagccagaaagggggaattaacattactgcccctgccaaacaagcacctaacatgtagtttttagtacctttcttgtaattactgcaaattcctcctatattttctcatttttttttcttgagcttatagtaatttgcaagtcac

SEQ ID NO: 204063 - DNA, 1965 bp, Zea Mays
agtcccgctgtcctccaaacgtcgcctatcttcccgcgcccgctcgtgtatccgtctctaagccaactccagcaacaccgtcaccgtgtgtgtttagactgatacattgtttgtagagagaattttgaaatagaaagtttgataaagagtgaaatagagagtcgctggagataatagtcgcccgcaacccatttgaaaatcacgccgtgttggcgtgtaatcggcgattcggcggccgccgggcggtggcgatggaggtgggtgacctgcacaaggtgtgggaggtccgtgcgctcaagatcaagcccgacgcgaccgccgcgcgggcaaccctcgaccgcgttgccaggcaggtccagcccatcatgcgccgccacaaatggcgcgtcaaggtcctctccgagttttcgccgcggaacccgaggctgctggggctcaatgtcggcgcgggcgtcgaagtcaagctgcggctacggcgcgccggccgcgaccatgacttcatcccgtacgaggaggtgctcgataccatgctacacgagctctgccacaacgagcgcgggccccacgatgcgcagttttacaagctctgggacgagctccgcaaggaatgcgaagaacttgtttcaaagggtatcactggaacaggacaagggtttgatggcacgggaaggcgagttggtggatttactgtacatccaccaccaccatctctgcggcaagctacgttagctgctgcacagaagcgggcaaggaatggagctctattgccttctggaccaagaaagttgggtggaaacagtgaaattatgagtgcacttagtccagtacaagctgctgcaatggcggctgaaagaagaatgtatgatgatttgtggtgtggatcacatgatcaatctgctattgatgattcggatgatgttattattcttcaagagtcgccaaatttgacaagggatgaaaaagacaagggtagctgctccaacacttctgcacagcccagcacttcttctagaattcacatagcagcacgagatgataggacaacaagtgatgcacttgatagttcaaagtgggaatgtggtgcttgcacacttctgaaccagcctctggcaccaatctgtgaagtttgtggtacaacaaaacctaaaattgcaaaggcgaagtacacaacttggtcttgtaaattttgtactctagagaacagcactaaacttgacaaatgctcagcatgtgatcaatggagatactcatatgggccacctgtagccacatatggcccaagctatgattgagataacagtgaaggccacaatagcacagacgacacttctgagcaggcatctgctgcattgtcgatataagtaacaactcgcacctagggcacaccggcgaattggtctttatctgttccgacgtcgtcgactcatgttgccgtggggtgaggaaatttattacgtcaattaatccgaagagcgacgaatgtcgcagggtcgccactggctggtaccgcatggtcaggttcatgtttatcttgctagcactcaccctgccacccctggtctgaagacatcccccattatccccgtgtaaagaaactggaaggtgaggtcgaaaggttcttcagttcattgatctttgccatctttctggacacaggtgcgtgatcgcgtataactcttttaacgcacgtggtctggaaggtgtgcagcgatgacctttacagcttctttcggtagagttttgtgccttatagtcaatgatcacaggtagatcaccaaagacttcatgtgttgacacgtcgcgtcgtccaacctttctgcttagctgatcgttcgaatttcgagcacgtgaggtgatagcgggcttgggttgcaggtgcgcgttgcaagattctccctgaactaggatgatttgaacctgagatttttaccgttttaatcaacacgcgcgcgccgtgtattgggg

SEQ ID NO: 204064 - DNA, 919 bp, Zea Mays
ctgaaggtaacctaggtaatcatatattgtggaccagatttcttatgtatacgattatacttttttttcttatgtttattatactactattggtatgaatgtgagagttcaaatgaagaagatgaatactctccaaagagtactaagagcaagaataggccaagcagcctcacccttgaagacacctccagggaaaaaggcaaggatcacaacaccgtctgtgggcaaaaaaaacctgctgagaagtgttacattcgatcgcaaacttgtatagctcatagttcttttccatggcactggaacctcaatttgtgatgtgtagtttgcagttagtgatgatgctaagaaaaatatccacgtccatgtcgaagttggtgaagacggctcgctcaatcattgacaactacaagcaatccactggtcatagctgcaagtcgtgcagcaagtaattttctcgcctcgtgcggtcgaagcacagtgctcattgcaagatcaaggtgaagcaagcacagtgctcattgcaaggtgaattataaccagtgctcattgcaaggtgaagctagtgatgatgctaagaaaagtaccagaatttttctcacacatgggcgtcctttttggtcgtggactttctactcgtccgttagtctggaaactcattgcaagctgaagcacagtgctcgaaagtgaagtagcattcatggactatgttagggacgttcgttattaggcaagtgaattgtgggtttgcgtttactgctacaaacgggctctaaggcagcatcaacagaatgctattgcttattgcgggttgttggaaagttgctgttttttctgctcaacagaatgtgtaattgagattttcttgaattagaaagttgttgttttgcagcgtgtattgatatataacccctcatttcct

SEQ ID NO: 204065 - DNA, 959 bp, Zea Mays
gagagaagcagtcggcagccgggaagcccgtcgcgtgcctttcttcctcaacgtgccatgattaacgaaatatttgagcactggggctattccattattcccaaaagcagatgatgataaaagcaaagaaagtaaatgtgatgtggagaagcctgctgctactgagtcctctaaaccgaaggttagcttggaggaaacaaaggatcctgagaagcatgaagttgatgttggtggcaccgacgatgatgaaagtgacgaagactttgttgattcagaagagggtgaatcagatgatgacgagagtactaagagcaagaataggccaagcagcctcacccttgaagacacctccagggaaaaagtttgcagttagtgatgatgctaagaaaaatatccacgtccatgtcgaagttggtgaagacggctcgctcaatcattgacaactacaagcaatccactggtcatagctgcaagtcgtgcagcaagtaattttctcgcctcgtgcggtcgaagcacagtgctcattgcaagatcaaggtgaagcaagcacagtgctcattgcaaggtgaattataaccagtgctcattgcaaggtgaagctagtgatgatgctaagaaaagtaccagaatttttctcacacatgggcgtcctttttggtcgtggactttctactcgtccgttagtctggaaactcattgcaagctgaagcacagtgctcgaaagtgaagtagcattcatggactatgttagggacgttcgttattaggcaagtgaattgtgggtttgcgtttactgctacaaacgggctctaaggcagcatcaacagaatgctattgcttattgcgggttgttggaaagttgctgttttttctgctcaacagaatgtgtaattgagattttcttgaattagaaagttgttgttttgcagcgtgtattgatatataacccctcatttcct

SEQ ID NO: 204066 - DNA, 924 bp, Zea Mays
gagagaagcagtcggcagccgggaagcccgtcgcgtgcctttcttcctcaacgtgccatgattaacgaaatatttgagcactgggatgataaaagcaaagaaagtaaatgtgatgtggagaagcctgctgctactgagtcctctaaaccgaaggttagcttggaggaaacaaaggatcctgagaagcatgaagttgatgttggtggcaccgacgatgatgaaagtgacgaagactttgttgattcagaagagggtgaatcagatgatgacgagagtactaagagcaagaataggccaagcagcctcacccttgaagacacctccagggaaaaagttagtgatgatgctaagaaaaatatccacgtccatgtcgaagttggtgaagacggctcgctcaatcattgacaactacaagcaatccactggtcatagctgcaagtcgtgcagcaagtaattttctcgcctcgtgcggtcgaagcacagtgctcattgcaagatcaaggtgaagcaagcacagtgctcattgcaaggtgaattataaccagtgctcattgcaaggtgaagctagtgatgatgctaagaaaagtaccagaatttttctcacacatgggcgtcctttttggtcgtggactttctactcgtccgttagtctggaaactcattgcaagctgaagcacagtgctcgaaagtgaagtagcattcatggactatgttagggacgttcgttattaggcaagtgaattgtgggtttgcgtttactgctacaaacgggctctaaggcagcatcaacagaatgctattgcttattgcgggttgttggaaagttgctgttttttctgctcaacagaatgtgtaattgagattttcttgaattagaaagttgttgttttgcagcgtgtattgatatataacccctcatttcct

SEQ ID NO: 204067 - DNA, 3370 bp, Zea Mays
gatcagaataagtgggagctcgaacacaaacagcaagaaccaccaagcgaccaagcctgcaagtcaccaagggagcccgatctgagtcaagcgagtcttcccgtttcatcgcctggaaaaaggcgagaaaccccaaagcgaaggaacagcagcgcgagtgctagcagcagcagcgattccttcgccataccgttcgctgcgctcgctcactcggatcgaaaccccctagggttcgcatcgtcctcccgccaactcctatccctcccctctccctccgccgcgcgcgcgcgtggagctaccaaaccctaggacggcaaatccggtgcgatcgcccacggtggaggcctctcggccgccgagaggagccgctcggggctcggatcagggttccggtacttcgccggtgccgcctctgggtggtgggaccggtggatggtcatgggagccagcggctccaagcttgagaaggccctcggagaccagttcccggaaggccagcgctacttcggcctcgagaacttcggcaacacctgctactgcaacagtgtccttcagaaatctggccaaacagcaatatcgtgcatagggagcagcactgctagaccacaacactatcgggatgagaagttgcactgtcaggctgagaagtggcaccgtcgtgctgctccgagagatttcagatttggcttccttcagatatttgggttttgatgtcttagaggtttacgtgaagttttggaagataagccaagattgtccaaagcaatatttttattggctctcattcatcccctttggtaacctaatctaatgattccaatatagttagaaaatcagcttatggctatatatattctacatattactattgtattgatcattattgtcattcactctactcccatttacctacaaaaaaggaaattttaatctagctgtagcttggacgaacaaaattgttggtgataagatctccactcaaaggtccgaattgatgaaatccatgtttaggtagttttgtaggatatggttgtcagccaaagccaaaggaaaaacactttgaagagcttagaagcatacaaacaagccaaaaataaatgaagacgaagatacgaaaagcctaagttttgttatataatgtagatatttatgaactttaacagtgttttgttaaaatatttataaattttatcagggtcaactaacctcgataaatacccctaaattagctcctggtgatgggtccttagcggaatcaaaggttgagatatctccaccataacgaatctttgtcaacgccctagtgtacaagctttacacctagtcagcgggcgacactgaatgaccctcatcttttttctttactttggtcaacttgattttctacgcctctttgtgtttcttagccaactcatccaccttcgacaaggaaaatataaggactcaatactagaagaataatgcaaaaataaatgaaaggtgaataaccaacttgttggggccttggtcttttaaaggtccttaaaaacacgtttaaccattggttgccaagtattataggagcttcggcactagaacaccttcgatgcaggacattagaggggcgacgaagctaactttgtcatagcgacacagggagacgatgcaaggaagagtcatcctgaatgctaaaagcaaaagacaatgttgcccttgcattatttgtaaatcatgtgtgtagtccttgtgggtgtaaatgtaatttcgtacgaagttgtacgattctctataaatagatgaatagtgtcctgcataaattaccttttggagggcaggacaattgttgtgtaatcttttctctaaagcaccttcgctcttcgctctaattcattctgtggaaccttcgaaagaggagaaatacgatattatatttatgcaattaagtcatgacttgtctggttaagtctcaaccttcgttttctgcttaagaatgaagattgattatctttttaacattgtgttgcctttttatgattgtacatagcaatccgaagcaagtgaccaacacaacttttttcatattagctttgacattggcccgtgctacctcattccccctttgctgcacatccttatgtttgaaggggtttggatgttgttcaccaaagtgtttaagtcctagtgtcatcatctttaggtgggagcaatcagccttctctagaatgcaggcaatgcctcgtgcattggccaaggcgtagtagtcaccacttgaatccaagacaggggaaaaacctttaacctcgccatccatccatctaagagctttgctggtatccgcatccttgaagatcatctgcttcggtcgtgccctaaccaaagataaggtatcatacatgtgttgcttgcagcatgagcatatgtcgtagagagaatccactgtgattgcatagcagccatggatattagcaattgagtggtctttttcttctcttcagcaagttcgtcaaagatatcatgattcttcttgttaccttcgacaagctgatgtagaagcccaaaaatttctgaattgttttcttcctgtttcttgatggcttcggcactaatccttttatacttggcctccaagacagactgaattacatccttctgctccgttagacccttgaccatgtttttgcattcaagaaaatctttggacaaagtagttagcgttttagtgtttttcgcggtgtcttttcttagctcgctgacctcttttcgaagttgggagagttccacatcactttgtgctttgaggaccttgctcagttttagcccctaaaacaaggcaaaggaaactaggtttcaatgacaaggcatggaaaaactgtatgataaaacaaagttaggttaatagtttgaactcattatagaaaacgaattaatcccgcgtgggatactgttgggggccaatgaaatctatgtttggatagttttttatgttatggttgttagaagccgaagaaaaaaaaactctttgaagagctttggagcacacagacaagccaaagatacatgaaaaggaagataaaggatttcggctccatagtaaaggatttcggagaagagaagattaagggagcgtctacaaagagaagacgtgcccaacacgcctatgcaacaatatgacattgttgtactctcctaaatattaaagcaactttgtaatagggagggatagaaattttattttacatggagatataactgagcccgaccttataaataaatgaacggtaccaccattctgaagggctggccatttgtagatttcttgtccatgcctccatggcatttctgtgattagagagtttcagaatttattgatatgttgaaactattgtattaa

SEQ ID NO: 204068 - DNA, 727 bp, Zea Mays
agtaagcctagctaggccatggatcgttcgttggtcgcccatgcccatggtcgacgagatcgacgacgactcctggtgcctggcgccggagtactacacgcacggcatcgtggacgagaagacggacgtgttcgcgttcggcgtcttcctgctggagctcgtcaccgggcggaagccggtggacggcagacaccggagcctcctcagctgggcccggccgctgctgagcggcgacggcaaggtggaggcgctggtggacccgaggctcggcggcgactacgacggcgagcaggcgcggcgggtgacgttcgtggcgtcgctgtgcgtcagggcggcggcgacgtggcggccgtccatgaccgaggtgctggagctgctggaaggcggcgagatccggcaggaccggtgggcgatgccagagacggcggtggccaacgacgacggcgagcagcagccatggtggttcgacgttctcgacgacttcgacgacgacgacgacgaccaagacgcaggcggcgaggagttcagcaccccgtccccttcctcctcctcgtcgtcgtcaaccacaagcaattagccatttacatccccagatacctggactcactgtgacgtggagttctgctagtttgtcctgataggggggagggcgggtcccaccacctgtaaatacaaaaaaaggttatctcttgaaaatgtttattactgggtgacgatgaaatgtaag

SEQ ID NO: 204069 - DNA, 3945 bp, Zea Mays
gtttttttttcgaattttaaacgataattctggtcttgatctcgtcctcgaggcaaatctctttgggaatcgcctgggaagtatcagtagaacgggggagagcttgaggagtagccgagtagggttggagaggcgtaggggcgcgtgtgggcgctcgagctgttgttgctgggcctcgccggctccgttttcttccacctccgcgcgcagcggcagcgcggcagccagcgggggtgggcgtcaagtcaaggcagcgccgtcgtttcatgtccgcggtcaggtttggtgtctaatgcaggtgtggtactggagtactggactactggtcctgtagagcagttcgggggcgagggagatggactggccctggcccctggtcgctgtgccgctccgaactggggcgagggcgagggcgaggtgttcgtgggtaagggtcgcgggcgatgtgcggctgggaggcgggctaccgaggcgtaagaaataaagcagtagtagacgagagagccgcgatttataaagcgggtttgtgtggctcgctgctcgcctccgctccactcctctcacctggtgactgctcctcccacctcgctgtttcttctacgggatcaggttgctgcttgctgcggttcagatccttatccccttctgctttagatgggcctcgcggagcagtgcatggaggtggaggaggtgcgggactcggcgaatcggaggtgatcccggtcatggggtagagtggagtggagggggttgagcgtgtggtatggagccgtcccgtggcggtgttggcggcggcgggcggcggtggggggaggcggagggtgatgcggcggaggaagggagacgaggggaggacgggggcgaggtgagcctgcgggagtggctggaccggccgggccgagcggtggaggcggcagagtgcgtgcacgtgttcaggcaggtggcggaggcggtggcagtcgcgcacgcgcagggggtggccgtgggcagcgcgcggccgtcgtgcttcgtcgtgtcgccgcccttcgcgcgcgtcgccttcatcgagtccgcctccggctccgacgcctcgggctcgtgctcgggctctgacgcctccgaggacgccgacggcgacccggacccggacccggacccggacgcctcgcctccgctgcggcgacgcgacagcgccgtccccggcgaggagcgcgcggggaggtcgttcccgctcaagagcgtgctggccatggagctcagctggtacaccagccctgaggatgcggacgacagcgccgctaccttcgcctctgacgtctacagactgggtgtgctcttgttcgagctgttctatacgttcgaaacgatggaggacaagatgcgggcaatggcgaatctgcggcaccgggtgttgccaccgcagttgctgttcaaatggcccaaggaagcatccttctgccagttgctaatgcaccctgtgccagaaaccagaccgaagatgagtgaggtgctgcagagtgagttccttaatcagtcaaggaatagcctggaagagcatgaagcggcacttaggttacgcgaagagatagaagaacaagaattattgctggattttcttcagcagttgcagaaaagaaagcaagatatagccgacagtttgcagggcactattgctttcctctcttctgacatcaatgaggtaccccaccagcaatctacaattggccactgtgagaacttcttatccgatggggataaagaggtgtgctctggaactgttgaagagcagagtgattgtggatccaggaagcgttttagacctgagctgcaaggtgttgatatggaggaaaataatcgtagtgttgaagaatgttccagaacagtaccatcctctgagttaatccaggaaagtgttctgtctaaaagctccaggttgatgaagaacttcaaaaaacttgaaacagcctattttctaacaaggtccaagttgatgaagcaagttggcagccaaataagtagctgtgatcgagttgttaagaacactactggttcagctgttgggactgagggaagttcactagatgatttttctttggaaaggcaatatggtacaaggcaaagaggttgggtaaactcttttcttgaaggattgtgcaagtatttgtcattcagtaagttgaaagttcgggcagaactgaagcattgtgatttgctgaactcgtcaaacttagtatgctccgtagggtttgaccgagatagagagttttttgcaactgcaggtgtaaataagaagataaaagtgtttgagtataatatgattgtaaatgaacaccgtgatattcactatcctgtagtagagatgtctaatagatcaaagttgagttgtatttgctggaacagttatatgaagagccatattgcatctagtgattttgagggtatagtacaggtttgggatgttactaggagtcaagtttttgttgggatgagggagcatgagcgacgcgtgtggtcggtggacttctcaattgtggacccaacaaaattggctgggagtattggcactattagaacaagagcaaatgtgtgttctgtacaatttcaacctgatactgctcgctccattgccatcggctctgcagaccacaaaatttactgctatgatctacgtaacatacgagctccttattgtacactagttggccacacaaagactgtaagctatgttaagtatctggatgcatcaacaatactatccgcatctactgacaactcattgaagctttgggacttatcgatgaatccaggaaggataattgacagtccagttcaaacatttacagggcatacaaatacaaagaacttcgttggtctttccatatctgatggttacattgctactggctctgaaacaaatgaggtttttgtctaccacaaagaatttcccatgccagtgttggcttataagttcagcgtgacggaccctatatcgggacaggagattgatgatcagtcacagttcatttcatgcgtctgctggagagggcagtcttcaactctactttctgcaaattccagcggcaacattaagatcttagaaatggactgaggagtttgcatctgtttgagtctcagctataaatagaccgacttcttaggccgtgctcaacaaatcatgcatatagccgtggtagatgtcactgtctagggagttgagtttaaaatgagagattggatgagtaatgctgctagagatagcttaccaagttgtgcgcgtgcgtggcttcaaaatttgtggcgattaaatccagagttgccaacggtgcagcttaatccgagttgcagagttgggaaaggtagtagctgtagcagatttagcgtggttttataggattacagattagcgtggtagcaaaagtagcataaataggaaacagaattggggcgtgggatagtaccacggggaaaggttttgtacatcattggtttgaggtatacttgtacaggcaatcaatccagtttctacctaccagtaccagcatcagacttgctcttgtcatagtgttacttgaaaggtgaaaggtataaatcgctgtacatctgttgaatcagacatcagcatttgcatcattatctcccttttttattttccatataatattgatgaatgtgttaggtcgcagacatcataagacttgttggcattcgtctgcagacgtgaggcgaggagctgtgcataagttaaaagaatcttcagtatttgtctaatgctccgtttgtattgtcgatattggagcacaaaacaaattggaatcagctttcctaaaagagcccagcataaggccgctacttcgagtagaaacattgatttcagcgttttattaagactctgaagctatccccgaacatatggtccgcatgatggattgaagccagtggtcatctgaaaaatgctccagactgaat

SEQ ID NO: 204070 - DNA, 1748 bp, Zea Mays
catcgtgaatcttgagaaggcggaggttgccgacgtgaaaaaggttatagagagtatacaagagcaggcttcctatcctgctgaccaacaagtgcttatacaccaggggaaggtgctcaaggacgacacaacattggaggaaaaccaagtagttgaaaataattttcttgttataatgctcagacagaacaagggatcatcaagtgcagcaccagctaaggtaaccgcgaatcaggcaccctctactcagacagtgcctgctactccacctcaaacgtcagcagccccagatgcaccggcacctattgtacctgtcagtgcaccggctgcaactgctacagcctcagcagctcctgctgttgctgtctccactgaggcggatagttatggtcaggctacctcaaacctagttgctggcagcaacttggaaggaacaattaaatccattcttgaaatgggtggcgggacatgggatagagacactgtactacgtgctctgcgggctgcgtacaacaatccagagcgtgctgttgagtacttatattctgggattcctgaacaaatggaggttcctgcaccgcctccgagttcccaaccagtcgaccctgttcaggcggtacaaccagctcaagctggaccaaatgctaaccctctcgacctctttccccaatctcttccgaatgattccgctaatgccaacacaggaaatcttgatgttttgcgtaataactcacagttccaaaacctacttggtttggttcaggctaaccctcaaattttgcagccattgcttcaagaattgaggaaacaaaatccccgggttatgcagctaatccaggaaaaccaagcagagtttatgcggttgattagtgagccactagagggagacgaagagaatgaaatgatgctggatcagatggcagatgcaactgagaccattgcagtcactccagaggagaatgaagctatacttcgtcttgaagggatgggctttgaccgggcactcgtcctggaagtgttcttcgcctgcaacaagaacgagcagctggccgccaactacctcttggatcacatgcacgagttcgacaacgatgacgggctcggagggcctccattgtgatgcgatgcgaaggctgtggacagaaaataggaaaacgttttgggatttgtctcgtctgtccgctccgctccccctacatttctttgctgtttagtacataattctagatttacagaaaagacaaagtttactcttttctggatcatatgttttgtgctacttattgctgttctggccgcattgggccagcatgcagttattcacgggttcaacctgacaagcgctggctgcagcagcgaggtgtttgtaggtttcgcggtgattcgtctacccaaatctggaaccgtactgatactgaagaccgtactgatactgaaggcattatccggcgtaaactgttaattcaaacattattacacgaatgcataaggctgagcacggcttttgggcttgaactcgttagactgccaccaaatagcaaatcatgcatatggtcgcatgaatcaacggtttgtactgtatactttttacacagtggacttttggactattcgtacagtaaagtttaaaattcgcactatagattgtacttttcatgtagtggaaattttggactatttatacagtacattttgaaatgggaatgagtaagctggagtatagccttatacggcctgtttggtttgtg

SEQ ID NO: 204071 - DNA, 2218 bp, Zea Mays
ataaattcgttaaacttgaggaccctgccggcaaaaaatctccctctcagtaggggccggaataaaaatctcctcgccttcctctcctacgccgcctgacctctgctgtccgcctcaacggtccaaccctccggttcgacgtaggcgccggcggcgaaatgaaggtctccgtgaagacgctcaagggatccagcttccatatcgaagtggatcctaccgacaaggttgccgacgtgaaaaaggttatagagagtatacaagagcaggcttcctatcctgctgaccaacaagtgcttatacaccaggggaaggtgctcaaggacgacacaacattggaggaaaaccaagtagttgaaaataattttcttgttataatgctcagacaggtaggctacttgtttattattctggttgacacatgggcacatgacaaatcacgggtgtatgacttggtatgataataaaattattactgagatatgaataactgataacattaactgaataactgtcatagtgcattggattatttgaaagaatttgtgcttcaatttctatggctagcttattagcagtattttatatatggatgcaaaggctgctgtgaatttggaatgtctacgatagcatcagaaatgttctatatatcttatcaattgtaacctttcacagaacaagggatcatcaagtgcagcaccagctaaggtaaccgcgaatcagacagtgcctgctactccacctcaaacgtcagcagccccagatgcaccggcacctattgtacctgtcagtgcaccggctgcaactgctacagcctcagcagctcctgctgttgctgtctccactgaggcggatagttatggtcaggctacctcaaacctagttgctggcagcaacttggaaggaacaattaaatccattcttgaaatgggtggcgggacatgggatagagacactgtactacgtgctctgcgggctgcgtacaacaatccagagcgtgctgttgagtacttatattctgggattcctgaacaaatggaggttcctgcaccgcctccgagttcccaaccagtcgaccctgttcaggcggtacaaccagctcaagctggaccaaatgctaaccctctcgacctctttccccaatctcttccgaatgattccgctaatgccaacacaggaaatcttgatgttttgcgtaataactcacagttccaaaacctacttggtttggttcaggctaaccctcaaattttgcagccattgcttcaagaattgaggaaacaaaatccccgggttatgcagctaatccaggaaaaccaagcagagtttatgcggttgattagtgagccactagagggagacgaagagaatgaaatgatgctggatcagatggcagatgcaactgagaccattgcagtcactccagaggagaatgaagctatacttcgtcttgaagggatgggctttgaccgggcactcgtcctggaagtgttcttcgcctgcaacaagaacgagcagctggccgccaactacctcttggatcacatgcacgagttcgacaacgatgacgggctcggagggcctccattgtgatgcgatgcgaaggctgtggacagaaaataggaaaacgttttgggatttgtctcgtctgtccgctccgctccccctacatttctttgctgtttagtacataattctagatttacagaaaagacaaagtttactcttttctggatcatatgttttgtgctacttattgctgttctggccgcattgggccagcatgcagttattcacgggttcaacctgacaagcgctggctgcagcagcgaggtgtttgtaggtttcgcggtgattcgtctacccaaatctggaaccgtactgatactgaagaccgtactgatactgaaggcattatccggcgtaaactgttaattcaaacattattacacgaatgcataaggctgagcacggcttttgggcttgaactcgttagactgccaccaaatagcaaatcatgcatatggtcgcatgaatcaacggtttgtactgtatactttttacacagtggacttttggactattcgtacagtaaagtttaaaattcgcactatagattgtacttttcatgtagtggaaattttggactatttatacagtacattttgaaatgggaatgagtaagctggagtatagccttatacggcctgtttggtttgtg

SEQ ID NO: 204072 - DNA, 1510 bp, Zea Mays
gaaaacaaagcacgaccagaaccgcagaggggggacacccggactcagagagagagagaggggcattcgcccgttcgaattctctcgcctcggcctcctcctcacctgcctgctcggctgctcgccagaccaaccacagccgtcggcgctgcagaccgcggcgggcaggatcagcggtgcgtagcctgcccatttcgcgagcaggaccatataattccaagaccctgatgatggccacaactgcttatatcgatgattcctgttcggaggttattgatcccccgaagactgaggtgctggatgttgctgaactccctggtgaccatactcagaacccaccaaaaccgaatgttgtggtgtctagcagtgtgcgtgaacttctggaatgtccagtctgtttgagtgccatgtatcctcctattcatcaggcatgaactgggtaacataaggtgtcttgctcttgagaaggtggctgcatctcttgaacttccatgcaagtaccagtgctttgggtgcccaggcatttatccttactacagcaagctgaagcatgagtcgcagtgccaatatagaccttatagttgtccatatgctggatctgaatgcacagttgctggtgacatcccatatttggtgaatcacttgaaagatgaccacaaagttgacatgcacaatggctgtaccttcaatcatcgctatgtaaagccaaaccctcatgaagttgagaatgccacatggatgcttacggtattcagctgctttggccagtacttctgcctacacttcgaggccttccagctgggcatgtcacccgtctacatcgccttcctgaggttcatgggagacgacgcggaagcgaagaactacagctacagcctggaggtagggggcacggggcgcaagatggtctggcagggggtgccgcggagcatcagggacagccaccggaaggtccgggacagctacgacgggctcatcatccagaggaacatggccctgttcttctcgggtggcgacaggaaggagctcaagctgcgtgtcaccgggcggatctggaaggaacaatgagcttgatgggtcagctagtacgtctgtcccgctccgctgctgccctgaactcatgaatcgcatcgcaaagagcttttgccagtcgtaggaatgggcgactctgtggttcgttctgtgttttcagcttcttctcgcttgctattgtcttcatggttcctgcagggtaggtaggtgctgttggatgtgtagatcatgtagaggttggaggttgctaccgatgcagaattcgtggagatttcctattttattgaactgtctttagagcagcttcaagagatgagctattagtgttgtcgagtaaaaaatttggatgcccttcccgcgcggaagcatctttattcccgcacgtagccaatatcggtgctgcgagtagagatggcaacggctataaacccattgtatttttgccctctcaaacccgtacatatgaaaaatatctatg

SEQ ID NO: 204073 - DNA, 1550 bp, Zea Mays
gaaaacaaagcacgaccagaaccgcagaggggggacacccggactcagagagagagagaggggcattcgcccgttcgaattctctcgcctcggcctcctcctcacctgcctgctcggctgctcgccagaccaaccacagccgtcggcgctgcagaccgcggcgggcaggatcagcggaccatataattccaagaccctgatgatggccacaactgcttatatcgatgattcctgttcggaggttattgatcccccgaagactgaggtgctggatgttgctgaactccctggtgaccatactcagaacccaccaaaaccgaatgttgtggtgtctagcagtgtgcgtgaacttctggaatgtccagtctgtttgagtgccatgtatcctcctattcatcagtgctctaatggtcatacattgtgttccggatgcaaaccaagggttcataaccgttgtccaacttgtaggcatgaactgggtaacataaggtgtcttgctcttgagaaggtggctgcatctcttgaacttccatgcaagtaccagtgctttgggtgcccaggcatttatccttactacagcaagctgaagcatgagtcgcagtgccaatatagaccttatagttgtccatatgctggatctgaatgcacagttgctggtgacatcccatatttggtgaatcacttgaaagatgaccacaaagttgacatgcacaatggctgtaccttcaatcatcgctatgtaaagccaaaccctcatgaagttgagaatgccacatggatgcttacggtattcagctgctttggccagtacttctgcctacacttcgaggccttccagctgggcatgtcacccgtctacatcgccttcctgaggttcatgggagacgacgcggaagcgaagaactacagctacagcctggaggtagggggcacggggcgcaagatggtctggcagggggtgccgcggagcatcagggacagccaccggaaggtccgggacagctacgacgggctcatcatccagaggaacatggccctgttcttctcgggtggcgacaggaaggagctcaagctgcgtgtcaccgggcggatctggaaggaacaatgagcttgatgggtcagctagtacgtctgtcccgctccgctgctgccctgaactcatgaatcgcatcgcaaagagcttttgccagtcgtaggaatgggcgactctgtggttcgttctgtgttttcagcttcttctcgcttgctattgtcttcatggttcctgcagggtaggtaggtgctgttggatgtgtagatcatgtagaggttggaggttgctaccgatgcagaattcgtggagatttcctattttattgaactgtctttagagcagcttcaagagatgagctattagtgttgtcgagtaaaaaatttggatgcccttcccgcgcggaagcatctttattcccgcacgtagccaatatcggtgctgcgagtagagatggcaacggctataaacccattgtatttttgccctctcaaacccgtacatatgaaaaatatctatg

SEQ ID NO: 204074 - DNA, 3031 bp, Zea Mays
aaaaaactccaattgcggcgggtggggaaaaaaagagagaaagaaatttttttctccgttttttgaccccaattctgactgactcgccgccggcggctcgatcacgccggaaccctagtcgaggtctggggtagtttcggccgtgctcgggagctcgtttacgcggcgagctcgaccgccgcgggtctccggagccggtggacggcatcatcgtctagggtttgctcttaatcatctagggtttgctcttaccggagctgctcggccgcatcgtccgcgggcctacattttgtgctgccgccgagatgccgccgccgtctaagaagttggctcgcgtcgacacgctccagctcaaggatcagatcgtcaagcggctggggcccctgcgcgctgagctctacttccgcagcctcaagaagttcctcggctgtcagctcggcaaggatgagtttgagaagatctgtgttactacattggggaaggagaacatcaagctccacaatttcctcctccggtccatcctcagcaatgcttgtctatcggatgggcctccgccaagcatgcaggcggccactggaaactcgcagactagcacggtgtccaatgggacattcagcaatggcttattgccggtgaggagggtgaggccccggactaagaggttcagtgataagccgagcccgattgggaagtctcctcttggtcatccgagtgctgggggggagtttgtgtcagctggttgcaaggttttgcaggaggtaatctctgtggaggatggcgaggaggtcaaccaggcccgtggtagcccagtctgtgtgcagagccgaagcccgataaggcccccagtgggggttccaaaggttcagaattctgagcctttgatatcttgcgctttagatgtgtgctgcaattatggtgaactgccagattctcagacgctgtccaagctacttgatgataagttgaaggctcaaggtctcagtgtatccaaagagtttgctgatgtgttgaacgctgggttgaatgcatacatgactcggatgctgaagccctgtctaggtattgcgaaggcaaggggaatcaacaggacgatgcaccaagcaaatagccgcaccactgcttcagtaaatagtgggcagaacaatggctttcctttggaatcaagccattgttatcaagcttccctgcctgatctctcgacagcagtgctatcagatgctcagttagtggggtccgtggtgattcatgagaagatttcttcctatctccacaactgatagagagcagttagtttcctccacatttttggcaaaccctatggtggagttggtcaagtttaggcagtatgttgtagggccttctatcctgctgtagaaactacagctacaggtagttaggttgaggtatagtgaagttttactataggactgggtagtgtacccatggctggtgagggtgatacttcttaggatgcagtacatgatagtgagttccatttagctgtgattattcgcaaaggaaataattataacaaaagattctggaatgtgtcgtgccttttttttcgagcgttttgcagatatttgccattatgaaaaatgtgttttctaaaactgtcattataattcgtgcggtgattcccattatttgataaaaaaattggcgcatccattatatacgttggcccctaccagatgcccttgttgacttccttttacatactgcttgtctccaagcaccaagctcaagcagccaccagcggcaagctcaagcagccatggacatgggccggctccactccctgcagtaagcagcggcagccatggacatgggccagctccagcacgcgacctcctcgtcctccggcagcggcagccatggacgcggcacccggtgttctgtggtgtgcggcgtccttctccctgctgacttctttgccgccgtcattcctgttcttgttgtccagcaaatcctccgcacattccctcgactttactgcctactttccatgtggctgacatgtccaatgtggtgacctggacttcgttgctagggaatagggataaaacatgccatacgaatgtacaatatggcacgggttaatttttttgatcaaataatggcaactaccggatatcatgaactataatgacatttttagaatacacaattttcataatggcatatatatgaaaacccctttttttcaacgccttatgcaccaatgttaccatgttgtgcctgtacagagaatcaggtactgtgtttagaatattttgctgttggatatcttgggtttgttgcctcttgtctgctgtgatctagtttgtctggccaggttattggtttgtttattttaatgtgcataggcatccatctatttggctattactgttgatcatttattaattagtgttgcttaagggtgccatataaattcttgtttctttttttctctcttcctgtcattatctggtataggtccagcttgactcggagccaacatatagctacgaaactgcgtcggggttttatctgcattgtggtatgattcatttgctacaagagcgttccatgttgtacccactccagtctgtcttttgtcttccctgtatatattatagagagaaaaaaagactgttacagatttatacagaggacccaagatgcagaaagctgaagatatgattcggcaagtccacggtgtcaggcattcaggccttcgtagaggattctggtgagcatgaagccgtcggtcccttcttagatggcaacgggcctcgattcccaattcaccatgggaaattctttcattagagacagtgaagtttcgtttcccacgaggatataaatgtgtaaacgaggacggaaatcattttctatctctgttctctacggagacacgttaaacatgtacgtggtggtgttttcgtgtaatagttaacgataaaaataaataattatcatgtcaatagaccacactcattgtataattgtgattcattttaatatatacataatgatattttta

SEQ ID NO: 204075 - DNA, 3042 bp, Zea Mays
ataaatttggggaaaaaactccaattgcggcgggtggggaaaaaaagagagaaagaaatttttttctccgttttttgaccccaattctgactgactcgccgccggcggctcgatcacgccggaaccctagtcgaggctggggtagtttcggccgtgctcgggagctcgtttacgcggcgagctcgaccgccgcgggtctccggagccggtggacggcatcatcgtctagggtttgctcttaatcatctagggtttgctcttaccggagctgctcggccgcatcgtccgcgggcctacattttgtgctgccgccgagatgccgccgccgtctaagaagttggctcgcgtcgacacgctccagctcaaggatcagatcgtcaagcggctggggcccctgcgcgctgagctctacttccgcagcctcaagaagttcctcggctgtcagctcggcaaggatgagtttgagaagatctgtgttactacattggggaaggagaacatcaagctccacaatttcctcctccggtccatcctcagcaatgcttgtctatcggatgggcctccgccaagcatgcaggcggccactggaaactcgcagactagcacggtgtccaatgggacattcagcaatggcttattgccggtgaggagggtgaggccccggactaagaggttcagtgataagccgagcccgattgggaagtctcctcttggtcatccgagtgctgggggggagtttgtgtcagctggttgcaaggttttgcaggaggtaatctctgtggaggatggcgaggaggtcaaccaggcccgtggtagcccagtctgtgtgcagagccgaagcccgataaggcccccagtgggggttccaaaggttcagaattctgagcctttgatatcttgcgctttagatgtgtgctgcaattatggtgaactgccagattctcagacgctgtccaagctacttgatgataagttgaaggctcaaggtctcagtgtatccaaagagtttgctgatgtgttgaacgctgggttgaatgcatacatgactcggatgctgaagccctgtctaggtattgcgaaggcaaggggaatcaacaggacgatgcaccaagcaaatagccgcaccactgcttcagtaaatagtgggcagaacaatggctttcctttggaatcaagccattgttatcaagcttccctgcctgatctctcgacagcagtgctatcagatgctcagttagtggggtccgtggtgattcatgagaagatttcttcctatctccacaactgatagagagcagttagtttcctccacatttttggcaaaccctatggtggagttggtcaagtttaggcagtatgttgtagggccttctatcctgctgtagaaactacagctacaggtagttaggttgaggtatagtgaagttttactataggactgggtagtgtacccatggctggtgagggtgatacttcttaggatgcagtacatgatagtgagttccatttagctgtgattattcgcaaaggaaataattataacaaaagattctggaatgtgtcgtgccttttttttcgagcgttttgcagatatttgccattatgaaaaatgtgttttctaaaactgtcattataattcgtgcggtgattcccattatttgataaaaaaattggcgcatccattatatacgttggcccctaccagatgcccttgttgacttccttttacatactgcttgtctccaagcaccaagctcaagcagccaccagcggcaagctcaagcagccatggacatgggccggctccactccctgcagtaagcagcggcagccatggacatgggccagctccagcacgcgacctcctcgtcctccggcagcggcagccatggacgcggcacccggtgttctgtggtgtgcggcgtccttctccctgctgacttctttgccgccgtcattcctgttcttgttgtccagcaaatcctccgcacattccctcgactttactgcctactttccatgtggctgacatgtccaatgtggtgacctggacttcgttgctagggaatagggataaaacatgccatacgaatgtacaatatggcacgggttaatttttttgatcaaataatggcaactaccggatatcatgaactataatgacatttttagaatacacaattttcataatggcatatatatgaaaacccctttttttcaacgccttatgcaccaatgttaccatgttgtgcctgtacagagaatcaggtactgtgtttagaatattttgctgttggatatcttgggtttgttgcctcttgtctgctgtgatctagtttgtctggccaggttattggtttgtttattttaatgtgcataggcatccatctatttggctattactgttgatcatttattaattagtgttgcttaagggtgccatataaattcttgtttctttttttctctcttcctgtcattatctggtataggtccagcttgactcggagccaacatatagctacgaaactgcgtcggggttttatctgcattgtggtatgattcatttgctacaagagcgttccatgttgtacccactccagtctgtcttttgtcttccctgtatatattatagagagaaaaaaagactgttacagatttatacagaggacccaagatgcagaaagctgaagatatgattcggcaagtccacggtgtcaggcattcaggccttcgtagaggattctggtgagcatgaagccgtcggtcccttcttagatggcaacgggcctcgattcccaattcaccatgggaaattctttcattagagacagtgaagtttcgtttcccacgaggatataaatgtgtaaacgaggacggaaatcattttctatctctgttctctacggagacacgttaaacatgtacgtggtggtgttttcgtgtaatagttaacgataaaaataaataattatcatgtcaatagaccacactcattgtataattgtgattcattttaatatatacataatgatattttta

SEQ ID NO: 204076 - DNA, 420 bp, Zea Mays
ccccaagacacaagggaacaagaatagcatgccaaaattgcctggcaaaactgcaagtacacagaagatgttgcactgtttcctgctcttggtcacaaagaacacaaacaaccgggtgttgcagccctattacgcaacgaacttctatattctactacgtgctgttgatcgattggctgccaattatagcagattgcctggaatcttcgacagtgagattgatgaggatatccctaggctgaagactgttgcggcttcagtggcaagtgagatgggtttgaatggagcatccttatccgaagacctgataaccgagatgtgccggttcgggggtgcggagattcatccagtggctgcttttgtcggtggagttgcttcccaagaagtgattaagtttgacttaggataaacacaaaacaa

SEQ ID NO: 204077 - DNA, 927 bp, Zea Mays
gctatctactccactctacttgatggtaatgtacccattgaggacgcggccacagatatgaggggttcacatgacggcaggtgataccgtgatagcagaacatgtggctcaatgatgttccagacaaggatgttattgggaagaatgggtatttatgatcagtatcaggattggcgcctcgatgtcgacaacatgacatatgaggtaccctcccactgaatagcaatagcacgtagtaaaataaaacagaaaagattttacctcaccatttcatatcgcaggagttgctcgatcttgaggaccggattggatatgtaagtacagggcttcgtgaggacgagatcattcaaagccttaggatggtaaagtactccgcgttcaaccccagacatttttctacggaaatggacaggagatgtagcatctgtcaagaagagttcgaagtacacgaggaaactgggaagctgagctgtggccacagctatcacgtgcactgcataaagcagtggctttctcggaagaacgcttgtccggtttgcaagaccactgtctcgaagacctgaagtccctattctttctagtgtctgaaccacactttcattaagtataatccaattgaaatgcaaaagattagttctattgttgctgtacagtccagcagccgtctgcacgcacgcttgttgagtacagtatctagtacacgcacgcttgctgtacacacatgatcctagtatttatttgcatatggaacttacaatttttttcaccatggcctactgagtacagtatctagtactggctgccttactcaacgcatgacagtcggacttactgcatgagttcttccatgtgtttgttgtattactgaacgcatggcagtcggacttggcccaaagcagtccagcttgcattggtggttcaatggac

SEQ ID NO: 204078 - DNA, 3442 bp, Zea Mays
gccaccgaccgatcaggcgaccccgctccaagaggaaatccaccaccgcggccggggcctcccagatctcgctggaggcagcggcagcggcggcggtggggggcgatggcgctcaacatgaagaccctgacgcaggcgctggcgaaggcgtcggctgtcatcgagaagacggtgtccacgacggtgcaggaggtgacgggcccgcgcccgctgcaggactacgagctgctggaccaggccgggtccggcgggccgggactcgcgtggcggatctacacggcgcgaccgcgggacggcgccccctcggcgccctaccccgtcgtctccgtctgggtgctcgacaagcgcgccctcgccgaggcacgggcgcgggcggggctgtcgaaggcggccgaggacgccttcctcgacctcgtccgcgccgacgcggcgcggctcgtgcgcctgcgccacccgggcgtgctccacgttgtgcaggcgcttgacgagaccaaggccgccatggccatggccactgagcccgtcttcgcctccgtagctaacgcgctcgggtgccttgacaacgtcggcaaggtgcccaaggagctcaagggcatggaaatgggactacttgagattaaacatggactgctacaagttgcagagacgttagattttcttcataacaatgctcatcttgcccatcgagctatatcgcctgagacggtctttataacttctaacggatcttggaagcttggtgggtttggttttgctctttcagttgatcaagccacaggtggtttgacttcatcacagctattccattattcggactatgatgtcgaggatacagctttgcctcttcaaccgtcgttgaactatactgcaccagaattggttcgaagtggagattctaaagttggctctgcttgtgacatgtttagctttggatgtctagcttaccatctggttgctcgtagaccacttctggactgccataacaatgttaaaatgtacatgaatgccttgacatatttaacaagtgaagccttttctaatattccttctgatttggtatcggatttgcaaaggatgatatcgatggatgcagtatcgcgtcctagtgctgtggcctttacaggttcttctttcttccgggatgatacgaggttgcgcgctcttcgtttccttgaccatttgcttgagagagataatatgcagaagacagagtttttgaaggcattatcagatatgtggaaggattttgattcccgagttcttcgatataaagttcttcctcctctttgtgctgagttacgcaacatggttatgcagccaatgattttgcctatggttctaacaatagcagaatctcaggataaaggggattttgaacttgcaacactgcctgcgcttgttccagtgtttacttcagcatcaggtgaaactctacttttgcttgtgaagcatgcagatctcatcattaacaaggccacacaggaacatttgatatcacatattcttccaatgctggttcgggcttatgatgacaatgatccccggttacaggaagaagttctgcgtcgaacagtatcactgtctcgtcaacttgacaccaagctagtcaaacaggctgtgcttcctcgtgtacatggattagctctaaagacgacagttgccgcggtgcgcgtgaatgcgttgcgctgtttaggagatcttgtgccatccctggacaaagaaggtatattgggtatcttggagacggttcggcgttgcacagctgttgaccatactgcgccaactcttatgtgcacacttggtgttgctaatgcaatctataaacaatgcggtgtggagtttgctgcggaatatgtgattcctctcatcttcccattactcacagcacatcaactgaatgtacaacaatttgccaagtatatgctatttgtcaaggacattacaagatcgaagagaagcgtggtgtgactgttacagataatgggaacacagaggtaaaagcatcaccttcattggcaaacgggatccattctgaacctatgccaggacaaataccagctgcaaagagcagccctccatgggatgaagactggggtccttctaagaaaaccggtgttccatctctctcagttgattctagtgcacagacaaagcaaccctcagtacacccttttgacttcagtactcaaacaaagcaatccacaccactcccctttgatttgagcacccgagcaaagcagccatcattagtttctcatgctacagcagctacaatcccacctgcgcaaccacaaccagtacaatctcttgtgcccagttcaggacctcaaacttctggctcatgtgcccctgttgacattgagtggcctcctcgaagaagctcgtcatccgacttcaatgcatccttgtctattagcaaggagaatgaatctggaaggctatctagcgacggacttgacgatattgatccttttgctgattggcccccaaaacctagcaatgttactagcattacagcaaccgagcatcgtccaagcataaatcaaaatatttctggatttagctcaggtaacatagggtttggtggcagcgggaattctatagggcaagcgaaaagcaaccaaatgagctggtcaaacacgcctaatctgatgggcatgaactcaactggcagctatttgaatcagggcagtgcagctctaggttttggaaatccaattggaggattgagcactggcctctccaatccaagcagttccagtacaggcctgagcatgatgcaaccaaaatctgattttggatcactgtccatgtctgccaataatgccgcaaatggcccacccagacttgcccctcctccatctacttcagttggaagagggcgtggtagaaatcaaggacaatcagcactctcccgagcatcaaggcctcctcattcgaactcgtcatcaggacaacaacctatcctggatttactttagtaagagaggcttgcctctattcttggcgatgacgattgtcaatgtgtacatcttcaaacctttgtaagaggttaccttctctcatgcgtagggttttgatttgggcattgaggctatcttcatattggtgacagaagaaatgtcgttgtgtatgtttctgtctaaaatcggctgtagcttgtagagttgatgaatatagttgacatgcttatctggactgtgaagttttgaatgtttacataatgtttcatgtgccttatatgtggtccctgcccattttctccccgctccccaacatcatgtaattcattagttaaggctcgtgttgtgtatacttagtctgtcgagtttaaggccaatcggcaattctgcttctatacagttgtttggttgctggtaggatcaccactgttatgttatgataccccacaactgtgtgaagtcgatcttcatgtttggtc

SEQ ID NO: 204079 - DNA, 3411 bp, Zea Mays
ccaccgaccgatcaggcgaccccgctccaagaggaaatccaccaccgcggccggggcctcccagatctcgctggaggcagcggcagcggcggcggtggggggcgatggcgctcaacatgaagaccctgacgcaggcgctggcgaaggcgtcggctgtcatcgagaagacggtgtccacgacggtgcaggaggtgacgggcccgcgcccgctgcaggactacgagctgctggaccaggccgggtccggcgggccgggactcgcgtggcggatctacacggcgcgaccgcgggacggcgccccctcggcgccctaccccgtcgtctccgtctgggtgctcgacaagcgcgccctcgccgaggcacgggcgcgggcggggctgtcgaaggcggccgaggacgccttcctcgacctcgtccgcgccgacgcggcgcggctcgtgcgcctgcgccacccgggcgtgctccacgttgtgcaggcgcttgacgagaccaaggccgccatggccatggccactgagcccgtcttcgcctccgtagctaacgcgctcgggtgccttgacaacgtcggcaaggtgcccaaggagctcaagggcatggaaatgggactacttgagattaaacatggactgctacaagttgcagagacgttagattttcttcataacaatgctcatcttgcccatcgagctatatcgcctgagacggtctttataacttctaacggatcttggaagcttggtgggtttggttttgctctttcagttgatcaagccacaggtggtttgacttcatcacagctattccattattcggactatgatgtcgaggatacagctttgcctcttcaaccgtcgttgaactatactgcaccagaattggttcgaagtggagattctaaagttggctctgcttgtgacatgtttagctttggatgtctagcttaccatctggttgctcgtagaccacttctggactgccataacaatgttaaaatgtacatgaatgccttgacatatttaacaagtgaagccttttctaatattccttctgatttggtatcggatttgcaaaggatgatatcgatggatgcagtatcgcgtcctagtgctgtggcctttacaggttcttctttcttccgggatgatacgaggagagagataatatgcagaagacagagtttttgaaggcattatcagatatgtggaaggattttgattcccgagttcttcgatataaagttcttcctcctctttgtgctgagttacgcaacatggttatgcagccaatgattttgcctatggttctaacaatagcagaatctcaggataaaggggattttgaacttgcaacactgcctgcgcttgttccagtgtttacttcagcatcaggtgaaactctacttttgcttgtgaagcatgcagatctcatcattaacaaggccacacaggaacatttgatatcacatattcttccaatgctggttcgggcttatgatgacaatgatccccggttacaggaagaagttctgcgtcgaacagtatcactgtctcgtcaacttgacaccaagctagtcaaacaggctgtgcttcctcgtgtacatggattagctctaaagacgacagttgccgcggtgcgcgtgaatgcgttgcgctgtttaggagatcttgtgccatccctggacaaagaaggtatattgggtatcttggagacggttcggcgttgcacagctgttgaccatactgcgccaactcttatgtgcacacttggtgttgctaatgcaatctataaacaatgcggtgtggagtttgctgcggaatatgtgattcctctcatcttcccattactcacagcacatcaactgaatgtacaacaatttgccaagtatatgctatttgtcaaggacattacaagcaagatcgaagagaagcgtggtgtgactgttacagataatgggaacacagaggtaaaagcatcaccttcattggcaaacgggatccattctgaacctatgccaggacaaataccagctgcaaagagcagccctccatgggatgaagactggggtccttctaagaaaaccggtgttccatctctctcagttgattctagtgcacagacaaagcaaccctcagtacacccttttgacttcagtactcaaacaaagcaatccacaccactcccctttgatttgagcacccgagcaaagcagccatcattagtttctcatgctacagcagctacaatcccacctgcgcaaccacaaccagtacaatctcttgtgcccagttcaggacctcaaacttctggctcatgtgcccctgttgacattgagtggcctcctcgaagaagctcgtcatccgacttcaatgcatccttgtctattagcaaggagaatgaatctggaaggctatctagcgacggacttgacgatattgatccttttgctgattggcccccaaaacctagcaatgttactagcattacagcaaccgagcatcgtccaagcataaatcaaaatatttctggatttagctcaggtaacatagggtttggtggcagcgggaattctatagggcaagcgaaaagcaaccaaatgagctggtcaaacacgcctaatctgatgggcatgaactcaactggcagctatttgaatcagggcagtgcagctctaggttttggaaatccaattggaggattgagcactggcctctccaatccaagcagttccagtacaggcctgagcatgatgcaaccaaaatctgattttggatcactgtccatgtctgccaataatgccgcaaatggcccacccagacttgcccctcctccatctacttcagttggaagagggcgtggtagaaatcaaggacaatcagcactctcccgagcatcaaggcctcctcattcgaactcgtcatcaggacaacaacctatcctggatttactttagtaagagaggcttgcctctattcttggcgatgacgattgtcaatgtgtacatcttcaaacctttgtaagaggttaccttctctcatgcgtagggttttgatttgggcattgaggctatcttcatattggtgacagaagaaatgtcgttgtgtatgtttctgtctaaaatcggctgtagcttgtagagttgatgaatatagttgacatgcttatctggactgtgaagttttgaatgtttacataatgtttcatgtgccttatatgtggtccctgcccattttctccccgctccccaacatcatgtaattcattagttaaggctcgtgttgtgtatacttagtctgtcgagtttaaggccaatcggcaattctgcttctatacagttgtttggttgctggtaggatcaccactgttatgttatgataccccacaactgtgtgaagtcgatcttcatgtttggtc

SEQ ID NO: 204080 - DNA, 3453 bp, Zea Mays
aggaaatccaccaccgcggccggggcctcccagatctcgctggaggcagcggcagcggcggcggtggggggcgatggcgctcaacatgaagaccctgacgcaggcgctggcgaaggcgtcggctgtcatcgagaagacggtgtccacgacggtgcaggaggtgacgggcccgcgcccgctgcaggactacgagctgctggaccaggccgggtccggcgggccgggactcgcgtggcggatctacacggcgcgaccgcgggacggcgccccctcggcgccctaccccgtcgtctccgtctgggtgctcgacaagcgcgccctcgccgaggcacgggcgcgggcggggctgtcgaaggcggccgaggacgccttcctcgacctcgtccgcgccgacgcggcgcggctcgtgcgcctgcgccacccgggcgtgctccacgttgtgcaggcgcttgacgagaccaaggccgccatggccatggccactgagcccgtcttcgcctccgtagctaacgcgctcgggtgccttgacaacgtcggcaaggtgcccaaggagctcaagggcatggaaatgggactacttgagattaaacatggactgctacaagttgcagagacgttagattttcttcataacaatgctcatcttgcccatcgagctatatcgcctgagacggtctttataacttctaacggatcttggaagcttggtgggtttggttttgctctttcagttgatcaagccacaggtggtttgacttcatcacagctattccattattcggactatgatgtcgaggatacagctttgcctcttcaaccgtcgttgaactatactgcaccagaattggttcgaagtggagattctaaagttggctctgcttgtgacatgtttagctttggatgtctagcttaccatctggttgctcgtagaccacttctggactgccataacaatgttaaaatgtacatgaatgccttgacatatttaacaagtgaagccttttctaatattccttctgatttggtatcggatttgcaaaggatgatatcgatggatgcagtatcgcgtcctagtgctgtggcctttacaggttcttctttcttccgggatgatacgaggttgcgcgctcttcgtttccttgaccatttgcttgagagagataatatgcagaagacagagtttttgaaggcattatcagatatgtggaaggattttgattcccgagttcttcgatataaagttcttcctcctctttgtgctgagttacgcaacatggttatgcagccaatgattttgcctatggttctaacaatagcagaatctcaggataaaggggattttgaacttgcaacactgcctgcgcttgttccagtgtttacttcagcatcaggtgaaactctacttttgcttgtgaagcatgcagatctcatcattaacaaggccacacaggaacatttgatatcacatattcttccaatgctggttcgggcttatgatgacaatgatccccggttacaggaagaagttctgcgtcgaacagtatcactgtctcgtcaacttgacaccaagctagtcaaacaggctgtgcttcctcgtgtacatggattagctctaaagacgacagttgccgcggtgcgcgtgaatgcgttgcgctgtttaggagatcttgtgccatccctggacaaagaaggtatattgggtatcttggagacggttcggcgttgcacagctgttgaccatactgcgccaactcttatgtgcacacttggtgttgctaatgcaatctataaacaatgcggtgtggagtttgctgcggaatatgtgattcctctcatcttcccattactcacagcacatcaactgaatgtacaacaatttgccaagtatatgctatttgtcaaggacattacaagcaagatcgaagagaagcgtggtgtgactgttacagataatgggaacacagaggtaaaagcatcaccttcattggcaaacgggatccattctgaacctatgccaggacaaataccagctgcaaagagcagccctccatgggatgaagactggggtccttctaagaaaaccggtgttccatctctctcagttgattctagtgcacagacaaagcaaccctcagtacacccttttgacttcagtactcaaacaaagcaatccacaccactcccctttgatttgagcacccgagcaaagcagccatcattagtttctcatgctacagcagctacaatcccacctgcgcaaccacaaccagtacaatctcttgtgcccagttcaggacctcaaacttctggctcatgtgcccctgttgacattgagtggcctcctcgaagaagctcgtcatccgacttcaatgcatccttgtctattagcaaggagaatgaatctggaaggctatctagcgacggacttgacgatattgatccttttgctgattggcccccaaaacctagcaatgttactagcattacagcaaccgagcatcgtccaagcataaatcaaaatatttctggatttagctcaggtaacatagggtttggtggcagcgggaattctatagggcaagcgaaaagcaaccaaatgagctggtcaaacacgcctaatctgatgggcatgaactcaactggcagctatttgaatcagggcagtgcagctctaggttttggaaatccaattggaggattgagcactggcctctccaatccaagcagttccagtacaggcctgagcatgatgcaaccaaaatctgattttggatcactgtccatgtctgccaataatgccgcaaatggcccacccagacttgcccctcctccatctacttcagttggaagagggcgtggtagaaatcaaggacaatcagcactctcccgagcatcaaggcctcctcattcgaactcgtcatcaggacaacaacctatcctggatttactttagtaagagaggcttgcctctattcttggcgatgacgattgtcaatgtgtacatcttcaaacctttgtaagtctgaaggagttctacttcggggaatctggaccttgcagaggttaccttctctcatgcgtagggttttgatttgggcattgaggctatcttcatattggtgacagaagaaatgtcgttgtgtatgtttctgtctaaaatcggctgtagcttgtagagttgatgaatatagttgacatgcttatctggactgtgaagttttgaatgtttacataatgtttcatgtgccttatatgtggtccctgcccattttctccccgctccccaacatcatgtaattcattagttaaggctcgtgttgtgtatacttagtctgtcgagtttaaggccaatcggcaattctgcttctatacagttgtttggttgctggtaggatcaccactgttatgttatgataccccacaactgtgtgaagtcgatcttcatgtttggtc

SEQ ID NO: 204081 - DNA, 3180 bp, Zea Mays
aggaaatccaccaccgcggccggggcctcccagatctcgctggaggcagcggcagcggcggcggtggggggcgatggcgctcaacatgaagaccctgacgcaggcgctggcgaaggcgtcggctgtcatcgagaagacggtgtccacgacggtgcaggaggtgacgggcccgcgcccgctgcaggactacgagctgctggaccaggccgggtccggcgggccgggactcgcgtggcggatctacacggcgcgaccgcgggacggcgccccctcggcgccctaccccgtcgtctccgtctgggtgctcgacaagcgcgccctcgccgaggcacgggcgcgggcggggctgtcgaaggcggccgaggacgccttcctcgacctcgtccgcgccgacgcggcgcggctcgtgcgcctgcgccacccgggcgtgctccacgttgtgcaggcgcttgacgagaccaaggccgccatggccatggccactgagcccgtcttcgcctccgtagctaacgcgctcgggtgccttgacaacgtcggcaaggtgcccaaggagctcaagggcatggaaatgggactacttgagattaaacatggactgctacaagttgcagagacgttagattttcttcataacaatgctcatcttgcccatcgagctatatcgcctgagacggtctttataacttctaacggatcttggaagcttggtgggtttggttttgctctttcagttgatcaagccacaggtggtttgacttcatcacagctattccattattcggactatgatgtcgaggatacagctttgcctcttcaaccgtcgttgaactatactgcaccagaattggttcgaagtggagattctaaagttggctctgcttgtgacatgtttagctttggatgtctagcttaccatctggttgctcgtagaccacttctggactgccataacaatgttaaaatgtacatgaatgccttgacatatttaacaagtgaagccttttctaatattccttctgatttggtatcggatttgcaaaggatgatatcgatggatgcagtatcgcgtcctagtgctgtggcctttacaggttcttctttcttccgggatgatacgaggttgcgcgctcttcgtttccttgaccatttgcttgagagagataatatgcagaagacagagtttttgaaggcattatcagatatgtggaaggattttgattcccgagttcttcgatataaagttcttcctcctctttgtgctgagttacgcaacatggttatgcagccaatgattttgcctatggttctaacaatagcagaatctcaggataaaggggattttgaacttgcaacactgcctgcgcttgttccagtgtttacttcagcatcaggtgaaactctacttttgcttgtgaagcatgcagatctcatcattaacaaggccacacaggaacatttgatatcacatattcttccaatgctggttcgggcttatgatgacaatgatccccggttacaggaagaagttctgcgtcgaacagtatcactgtctcgtcaacttgacaccaagctagtcaaacaggctgtgcttcctcgtgtacatggattagctctaaagacgacagttgccgcggtgcgcgtgaatgcgttgcgctgtttaggagatcttgtgccatccctggacaaagaaggtatattgggtatcttggagacggttcggcgttgcacagctgttgaccatactgcgccaactcttatgtgcacacttggtgttgctaatgcaatctataaacaatgcggtgtggagtttgctgcggaatatgtgattcctctcatcttcccattactcacagcacatcaactgaatgtacaacaatttgccaagtatatgctatttgtcaaggacattacaagcaagatcgaagagaagcgtggtgtgactgttacagataatgggaacacagaggtaaaagcatcaccttcattggcaaacgggatccattctgaacctatgccaggacaaataccagctgcaaagagcagccctccatgggatgaagactggggtccttctaagaaaaccggtgttccatctctctcagttgattctagtgcacagacaaagcaaccctcagtacacccttttgacttcagtactcaaacaaagcaatccacaccactcccctttgatttgagcacccgagcaaagcagccatcattagtttctcatgctacagcagctacaatcccacctgcgcaaccacaaccagtacaatctcttgtgcccagttcaggacctcaaacttctggctcatgtgcccctgttgacattgagtggcctcctcgaagaagctcgtcatccgacttcaatgcatccttgtctattagcaaggagaatgaatctggaaggctatctagcgacggacttgacgatattgatccttttgctgattggcccccaaaacctagcaatgttactagcattacagcaaccgagcatcgtccaagcataaatcaaaatatttctggatttagctcaggtaacatagggtttggtggcagcgggaattctatagggcaagcgaaaagcaaccaaatgagctggtcaaacacgcctaatctgatgggcatgaactcaactggcagctatttgaatcagggcagtgcagctctaggttttggaaatccaattggaggattgagcactggcctctccaatccaagcagttccagtacaggcctgagcatgatgcaaccaaaatctgattttggatcactgtccatgtctgccaataatgccgcaaatggcccacccagacttgcccctcctccatctacttcagttggaagagggcgtggtagaaatcaaggacaatcagcactctcccgagcatcaaggcctcctcattcgaactcgtcatcaggacaacaacctatcctggatttactttagtaagagaggcttgcctctattcttggcgatgacgattgtcaatgtgtacatcttcaaacctttgtaagacaaaagacagggacgcgcgcacgcacatatctactcactcatccaccctagaataccttaacaaatcttcattggttgtaaagtcattcgtgattttattaaggagtcattcgtgattttaaaaatgaggcagaaaacaaatcttcattgtgtttgcc

SEQ ID NO: 204082 - DNA, 1179 bp, Zea Mays
atacgcttgttctcctcctcctctgtaattctccctgttgcaacgactctaattttcatttcaaggaagacaactgatgttctttcagaggaagaaatcaaagaaagccaaagactccagaggatcgcagaagaaggggaaagatgggcgtgggaagaatgatcttttcgatcgtgccaagggagggcttgatgccctcgcaggaagcctgcaggaagccaagaaggacgccgaaacggcgactgagaagcttcaaggggatgtgaagtcgggcatggaaacgatccggcacaagggctcaggcctccttgagaaagccaaagaagaactcgggagtcactccgacgccagccgttcctcaaaggaactagagcgaggaagcgaggaacaggggaacaacaaggacatggacgctttcagtgcagtgatggacaaggtgaagggccacccagaagcgatggagaaggtcagcgctgtgatggacaaggtgaagagccacccggaagtggtggacaaggtcaaggacgaggtgatgagcctcgctggcgctctccgtctgcggagacatggatccgaagataaagaagctgagtccgaagagaaggcagaaggagcgcagagcgccgacgagggtgcctctgatggcatggctggagaacctagtgtgttggagcaggccgtgcaagagattcaggctgtcgccgcagctttgcagcagacagctgaacccgaagctgaaattccagctgagaccgctgctgctgctgctgcagaaacttctgctggaggagacaagcctgaagaaacgaacggggaggtggagcaagatgacccgaagaagcggctcgacttcgctgggttcttcgccatgctgctcgagaggttctgctccccggccagcaagaagaaagattaagttggttgcaggtccggcttgtggatttctcgttctgtcttctgtgatcttcgacttggacattacatggagtgcgtgggattgtgggtggtgtacagtctgcagttgtgttatcttaaaacaacaaatcagctattggttttttactaccttactttgatgacggggcaatggctacgttttacttgatgtaattatcatcgccattgtggatttaatttattttatctctactatatttaaagcacaagtttcaacggtcg

SEQ ID NO: 204083 - DNA, 1515 bp, Zea Mays
ccacgttgttgcatggcatgccccccctgaatacgcttgttctcctcctcctctgtaattctccctgttgcaacgactctaattttcatttcaaggaagacaactgatcattatattgaactcgcaactcacgtataataaacagctgccgaggcagagaagatgctgacatggcagatcgtcttcaaaagtagccgaaatttgatttcaacttccttgaatcttctgtggcagattgcttaagtttgttttccttatgggttgatttggtgacaagggaccacgagggattgaaggggattgagggaattaatttcttccttaattccttttaattcccgatccctggtcaccaaatcagcccgcatgtgactatattatcgcagtgtaattaagagaaggaacgggacaagatgttctttcagaggaagaaatcaaagaaagccaaagactccagaggatcgcagaagaaggggaaagatgggcgtgggaagaatgatcttttcgatcgtgccaagggagggcttgatgccctcgcaggaagcctgcaggaagccaagaagacgccgaaacggcgactgagaagcttcaaggggatgtgaagtcgggcatggaaacgatccggcacaagggctcaggcctccttgagaaagccaaagaagaactcgggagtcactccgacgccagccgttcctcaaaggaactagagcgaggaagcgaggaacaggggaacaacaaggacatggacgctttcagtgcagtgatggacaaggtgaagggccacccagaagcgatggagaaggtcagcgctgtgatggacaaggtgaagagccacccggaagtggtggacaaggtcaaggacgaggtgatgagcctcgctggcgctctccgtctgcggagacatggatccgaagataaagaagctgagtccgaagagaaggcagaaggagcgcagagcgccgacgagggtgcctctgatggcatggctggagaacctagtgtgttggagcaggccgtgcaagagattcaggctgtcgccgcagctttgcagcagacagctgaacccgaagctgaaattccagctgagaccgctgctgctgctgctgcagaaacttctgctggaggagacaagcctgaagaaacgaacggggaggtggagcaagatgacccgaagaagcggctcgacttcgctgggttcttcgccatgctgctcgagaggttctgctccccggccagcaagaagaaagattaagttggttgcaggtccggcttgtggatttctcgttctgtcttctgtgatcttcgacttggacattacatggagtgcgtgggattgtgggtggtgtacagtctgcagttgtgttatcttaaaacaacaaatcagctattggttttttactaccttactttgatgacggggcaatggctacgttttacttgatgtaattatcatcgccattgtggatttaatttattttatctctactatatttaaagcacaagtttcaacggtcg

SEQ ID NO: 204084 - DNA, 1315 bp, Zea Mays
aaaaggttaaaatcgacaactcgacatgcttaagttgtggcagcgattactagagatagatggctccataaaaggagggccacgttgttgcatggcatgccccccctgaatacgcttgttctcctcctcctctgtaattctccctgttgcaacgactctaattttcatttcaaggaagacaactgtgtaattaagagaaggaacgggacaagatgttctttcagaggaagaaatcaaagaaagccaaagactccagaggatcgcagaagaaggggaaagatgggcgtgggaagaatgatcttttcgatcgtgccaagggagggcttgatgccctcgcaggaagcctgcaggaagccaagaaggacgccgaaacggcgactgagaagcttcaaggggatgtgaagtcgggcatggaaacgatccggcacaagggctcaggcctccttgagaaagccaaagaagaactcgggagtcactccgacgccagccgttcctcaaaggaactagagcgaggaagcgaggaacaggggaacaacaaggacatggacgctttcagtgcagtgatggacaaggtgaagggccacccagaagcgatggagaaggtcagcgctgtgatggacaaggtgaagagccacccggaagtggtggacaaggtcaaggacgaggtgatgagcctcgctggcgctctccgtctgcggagacatggatccgaagataaagaagctgagtccgaagagaaggcagaaggagcgcagagcgccgacgagggtgcctctgatggcatggctggagaacctagtgtgttggagcaggccgtgcaagagattcaggctgtcgccgcagctttgcagcagacagctgaacccgaagctgaaattccagctgagaccgctgctgctgctgctgcagaaacttctgctggaggagacaagcctgaagaaacgaacggggaggtggagcaagatgacccgaagaagcggctcgacttcgctgggttcttcgccatgctgctcgagaggttctgctccccggccagcaagaagaaagattaagttggttgcaggtccggcttgtggatttctcgttctgtcttctgtgatcttcgacttggacattacatggagtgcgtgggattgtgggtggtgtacagtctgcagttgtgttatcttaaaacaacaaatcagctattggttttttactaccttactttgatgacggggcaatggctacgttttacttgatgtaattatcatcgccattgtggatttaatttattttatctctactatatttaaagcacaagtttcaacggtcg

SEQ ID NO: 204085 - DNA, 470 bp, Zea Mays
gatggctccataaaaggagggccacgttgttgcatggcatgccccccctgaatacgcttgttctcctcctcctctgtaattctccctgttgcaacgactctaattttcatttcaaggaagacaactgtgtaattaagagaaggaacgggacaagatgttctttcagaggaagaaatcaaagaaagccaaagactccagaggatcgcagaagaaggggaaagatgggcgtgggaagaatgatcttttcgatcgtgccaagggagggcttgatgccctcgcaggaagcctgcaggaagccaagaaggacgccgaaacggcgactgagaagcttcaaggggatgtgaagtcgggcatggaaacgatccggcacaagggctcaggcctccttgagaaagccaaagaagaactcgggagtcactccgacgccagccgttcctcaaaggaactagtgattcatgtggatattgcag

SEQ ID NO: 204086 - DNA, 1961 bp, Zea Mays
gcgcacccagatagacagagccacctcacccccacttcgccctccactcccggtctcccgcaccgtgtccgtgccgacacccaaggcccgccaggaaagcgaaagagagcgtcagtcacgcacgcaccgatgccggacgtgtcgccgctactgccgccggggaagccaccggccaccacggcgcggttcgcgcggtgcgcgtcgagcgcgaacgacgagctccgcagcttccgcgcctgcctggcctggctctgcgtggaccactcctcctccccgcgcgtggcggccgtgggctcctgggcggtcttcctcctcctcgccgtcgccgcgcccgcggccgtccgcctcctgggcaccgctccgccgcggcccttcgacgggcaggtccaggtctcgctcaccctggccgcgtcgctcgcctacgtctgcctccgcgcgctcctccaccgcgcggggggcctccgccgcctgctccacctcgacagcctccgccgcgactccgaggacgtgcaggcgggctacgccgcgcagctcgcgcgctccttccgcgtcctcgcctgcttcgtgctcccctgcgccctcgccgaggccgcgtacaaggcctactggtaccgcgccgccgccgccgcgtacggctccccgtggtggtgggccgccgcggcctgcgccgtcgaggtcgcctcctgggtgtaccgcgtcgcgctcttcttcatggtctgcgtcctcttccgggtcatctgctacctgcagatcctgcggatggtcgggttcgcgcgcgagttcggcaggttcgccgacgtcgccaccgtgctgcagcaccaccgccggatcagggagcagctcaggaagatcagtcaccggtaccgcaagttcatagtctgcagcctcgtgctcgtctccgccagccagttcgccgcgctactcgccaccaccaggccgcacgccatcgtcaatctcgccaccgcaggcgagctcgcgttgtgctcggtcagccttgtggcgggtctgctgatgtgcctgtacagcgcggcgaagatcacgcacaagacgcaggcgatgacgagcgtggcggcggcgtggcacgcggacgccacggtgcacgccttcgacaacgaccaggagaacccggacccggacctgccgcccaccgcgggctacctggcgcccgccaacgcctaccgcgtggccgccggcgacgagtccggcagcggcggcgacgacgacgacgacagccggagcgagtgctcctcgctcgacgacccaaagtacgtgccgttccaggccaacaacatcagcttccagaagaggcaggcgctggtgacgtacctggagaacaaccgggcggggatcacggtgtacggcttcgtggtggaccgggcgtggctgcacgcgctcttcatgatcgagttctcgctcgtcatgtggctgctcgggaagaccgtcggcatctcctgagctcacgcacacccttctttttgccggctctggctcctgtcaggtgcagagttctcagcggaggattgtacaaagtgagtgcagatacaagatactctgatcatctgatggagatcagaacagctgctttgatttgtaggttcatttgacagctcgtatgttagatatcgcaacttctagttcgtgtgttttgatttgtgcttgttttttttttcactgcgttgcttcctccggtatgtcggggttttttttttttttttttaacagctgctttgatttgtaggttcatttgacagctcgtatgttagatatcgcaacttctagttcgtgtgttttgatttgtgcttgttttttttttcactgcgttgcttcctccggtatgtcggggtttttttttttttttttttgtaactgacgcttcatagacacaagtgatgcacgtgctgtggtgtgctgtgaaatggaatttgcaaggaaaagaaaaggctcggctgagtaaacacgtt

SEQ ID NO: 204087 - DNA, 1261 bp, Zea Mays
tgtccagtgaacagattggctgttcattagcagatgctgcttcaagttgtgaatatactcattttttgagggaagcttcgagatgttatccgtctttgcatgttatttacattaatacttcgctggaaacaaaagctcatgctcatgaacttgttcctacaataacttgcacctcttctaatgttgttccaactatattacaggcatttgcccaaataccaaatcttaatgtctggtatggtcctgattcatatatgggtgcaaacatagcagatttattccagagaatggctacaatgtcagatgaagaaattgcaaaaattcatccagaccacaacagaaaatctttgagttcattactgccacgcctacactattaccagggtggtaactgtatggtacatgacatgtttggccatgaggttgtggggaaaataaaggaacaatattgtgatgcatttctaacagcacactttgaggtccctggagaaatgttctctttggcaatggaagcaaaacggagagcaatgggagttgttggatccactcagaatatcttggatttcattaaggatcatgtgatgggagctctggacagaaatgtagatgaacaccttcagtttgtgctaggaacagaatcagggatgatcacttcaattgttgctgctgttcaggaattacttcatttgtattcttctcaagagagagcaaacatcgaagtagaaattgtgtttccagtatcttcggatgcaatttctaagacatcgaatggttctcatcatgttggttcttcaatggctactgatttgaatagtcttactattgttcctggtgtgagttctggcgaaggctgctccattcatggtggttgtgcctcgtgtccctacatgaagatgaataccctggggtcgctacttaaagtttgccatcagcttcctgataaaaacaacaaattatctgtataccaagctaacagaattaatgttaggactcctctcggaaaatcagttgcagaggttgggtgtgagcctattctgcatatgcggcatttccagaaaacaaggaggttacccgacaagcttgttcaccaggttgtaaatggtaatggtgacaaacccttgcaatagctgttcatcaatacttgtatttattttataaaggtggtatggaggatgaatatatctcaagtgaatgccatgttgagctggcataccgaagataagattatttgccctgtacggtagacatgtggacttgccca

SEQ ID NO: 204088 - DNA, 756 bp, Zea Mays
tgcaaaaattcatccagaccacaacagaaaatctttgagttcattactgccacgcctacactattaccagggtggtaactgtatggtacatgacatgtttggccatgaggttgtggggaaaataaaggaacaatattgtgatgcatttctaacagcacactttgaggtccctggagaaatgttctctttggcaatggaagcaaaacggagagcaatgggagttgttggatccactcagaatatcttggatttcattaaggatcatgtgatgggagctctggacagaaatgtagatgaacaccttcagtttgtgctaggaacagaatcagggatgatcacttcaattgttgctgctgttcaggaattacttcatttgtattcttctcaagagagagcaaacatcgaagtagaaattgtgtttccagtatcttcggatgcaatttctaagacatcgaatggttctcatcatgttggttcttcaatggctactgatttgaatagtcttactattgttcctggtgtgagttctggcgaaggctgctccattcatggtggttgtgcctcgtgtccctacatgaagatgaataccctggggtcgctacttaaagtttgccatcagcttcctgataaaaacaacaaattatctgtataccaagctaacagaattaatgttaggactcctctcggaaaatcagttgcagaggttgggtgtgagcctattctgcatatgcggcatttccaggaccttcgcacagg

SEQ ID NO: 204089 - DNA, 1334 bp, Zea Mays
actttgaatttgaattgtttattacgggcattacgcattaccctggagtgtggactttaatttgttcataagatcatcccggctcctgagagattcgttctatctgattttccttggaattttcgtgatcttggtttcacttgctcctagagtttgatgaggccaagcgcagttgtagaaagaggcttgacgggcacaaccggcgccgcaggaagccgcagccagataccatgaactctgggagctttatgacaagtcaacaaggcttgttttcgagtgcagggacaaggttctcgtcgttcccggctccaaggccggagccaagctggtctggagtcatcaaatccgaggacagctcatactacacacaccacccggtgctcagcaacaggccgcacgtcgccggcacctccacgtcgccggcctactccaaggaaggccggcgcttcccgttcctccaggacggcgaccaagtcagcttcagcgcatcaggcgccgggacgctcgaggtctccacggtgtgccagcccctcctcaagacgaccgccgccgtggccccgccgccgcccgagagcagcaagatgctcgcccccgtgctggactcggattgtgctctctctcttctgtcatcccccgccaactcttccagcgtcgacgtgagccggatggtccagcccgcggagcgcatccccatggcgcagcccctcgtccccggcctccagcaccaccagttcggcggctccccggtgccggactggttcgccggctccggcgccgtccctgccgcgggcaccggcgggttcgcctgcccccacagcgtggagagcgagcagttcaacacagtcctagtgccgagctccgacggcggccacgagatgaactaccacggcatattccacgtcggcggcgagggctcctccgacgggacgtccccttcgctcccgttctcgtggcagtagcttaccgttgaagcgggcagtgttatgatcggtcagctgtatagcggtggtcatcacaccagttccctcttctttccgtgtttatttattctctgctccctcacgcactcccccgtgtcacttgctagtttcttagttttgcatgcctgatgcatgtagcctgaaaaaactctatcaaattagtgccagatttcctagttcccgtttgtttcattttattttgagaattggaatcttactaatgatttcctagttcccgtttgtttcattttattttgagaattggaatcttattaatgtaataggctattttttagaatgtgacattccaccactttacaaagttattgtataagcctatctcaaattcatggg

SEQ ID NO: 204090 - DNA, 1091 bp, Zea Mays
gatcgtagaaaataggttattcattcgtccttctattatctttgcctttgtcttctttcctaagatttcactacttctgcggggtgtcacagtcttaagatcatgggtaggaaatgatgtccgagagtgaagagcatggctcgctcctagacaagatcaacgacaagatcaacgagaagatccatgagtacaagcactcgtcgtcgtcgtcctcctcttcggactcagatgatgacaagaagcccaagaagtctaagaagaagaagctttttggaagaaaacacccattgcatcatgtcctcggaggaggcaaagccgccgaccttgtgctgtggaggaacaaacaggcatctgggagcatattggtaggggtgaccgtgatctggttactgttcgagggcatcggctaccacctccttaccttcctctgccacgcactaattgtgtttctcactatctggttcatctggtccaatgctgcgtcctttgtcaacaggtcacctccaaagttcccagaggtcattctatctgaagtccagtgcatgaaggtagctcatgttgcaaggaaagaaatcaacgaggctttctatacattgcgcaatgttgcttctggaaaagatttgaaaacatatctgatgacagttacagtgctgtggttcatttccataattggaagctgcttcagtttcttgactctgtcttacactattttcctgatggcatacactctgcccatgttgtatgagaaatacgaagatcaagttgatatcgtaggcgagaaggccctcattgagataaaaaagcagtacaaagtgattgatgcaaagtttatctctaagatcccaatgttgtctgagaagaaacaacactgagagagggtgctccaaaggtctaattcagcacattaccaatatatgaaagtagttcctttggctttgctatatcatcatttagcaacctttaagatgataccatagatattatatggattcctaaggttggaaatttgtgtcttccgagtcccctagaatagttgcttcttcctgtctgacagtgaatttgattttgtatggatgtgacatataaataaa

SEQ ID NO: 204091 - DNA, 2448 bp, Zea Mays
ccccaccgcacgcatccagtggctgctgccgcctcgcccccgctcctcctcctctcccgccacccacgccgcgcaggcctcacctactggtcgtcgttgcctaggggccagaacgcagggcccacagccccgccgcccgccaccgcctccaagcctgctgcgccgctcactgtcaacctgcctcgccaagtcgcccggatctcgacgccccacctgcggccggcggcggccccgccaaggtgccctgacagacgcggagacgccaccagaaccacggagttcgtgcgctggctggttgtctgcggaagactctccctctggcatgtaccgatgcgatctctcaactagtcataagcagctgaaagtagttcacatatatacttaaatactcaatcaatgaaagtagtgcactaaaatttgttccgacatcaagtttgctaaactattacggcaacatctaagctatgcatatcatacaccaacgcagttcgattgtccagctgataataataaaacgaaagctacgttgtctcctgctcctagagtgaactgagtcgacagaccacatactgacatacgccttgtattcttgtaaatatagcagattttgcatcatctggacgctagatagtttttttcttgtgttcagactttcgaagttgaattgaacaaattataaggatgtttagaactgctactgaattgttagagaattatatagatatgttatgttaccgcctttttttttacctgatgtgttcttttatctcgacaaccctggattaaaatcctagctccgccactgccgccacctccctgctccaaccccgcacctccgcttcgccatgaacccttcgtcgtcatccacctcctcctctggcgggtaccactctagggccgctgcctttgcttccccgcagccgcgcggcggtggcggtggcggcggccgagatgggagcgaccgcatcgacgccctcggtcgcctcctgacgagggtgttgcgccacatggcggcggagctgcgcatagatatgaggaccgatggatacgtgcgcgtccgcgacctgttgaagctcaaccttcagaccttcgccaaggcccctctcaagtctcacactgttgacgagatcagggaggcagtcaggcaggacaacaagcagcggtttagtctgttggaggaagatggcgagctgttgatccgggcgaaccaggggcacacagtaacaactgtcacatcagagagcctgctgaagcccattttgtcccccgacgaagtgtcagtttgtgtgcatggaacttacagaaaaaaccttgactcgattttgcaatttgggctaaagcgtatggcaaggttacacatacatttctcaagcggcttaccatcagatggagaagtaaccagtggtgtacggcagaatgtaaacatcttgatacatctggacgttagtaaagcacttaaaggtgggatgaagctttatatttcagacaacaaagtgatcttgacagaaggttttgatggcgtcgtcccggtgaaatactttgaaagagtcgaaacatggccaggacgagctccaataccgttccagagataacaggccatgttaccatttttcgacgagttagtttctctgtgcctgaggatgtcaagagggtttgccaaccatctatcctaattaatggagtacgagaagtttgcggagtatgagcagaagtactcagaggatgcagcaaccaaacattgaaaagtatcatggggagttgcctgcctgctgggctgatgcccttcctcagctcagtttggcaacttccagaagcatacgcctgaggtgcgcaacgtctgcttcggagcgagggagcatggcatgggcggcatttgcaacggtgggcacagcccagggctccgtttcatggccaacgactgctatgcaagcagtccttctttacaagcgtgcaagcaaacatccggtccattagattacgatccaaccacagatataactataatttgttatggttttttataaagattattgagttggtggtgaaaaggtttaagtattaaatgtgacctacggttgaatcacgatctaatggaccagatggtttgcttatggtttgcttgcacgcttgcaaagaaggactgcttgcatagcagtcgttgccccgttctatgttgttggtacctatcttgcttctctgatcgatcaataaaaggagacattatttgagggaccctttttgggtgccttgtatgctgtagctgttcaagtggctgaataaggctgcaagtcttgtgtaaggtgagactctgatgcataagctttgcaacttgcaagtgatgttggattttggaatgttatcaactttagtacacgttttctggccgtctgatcgaatcctggacaccaggggtagaattaattggtcgatcagagctgttaatcgtcc

SEQ ID NO: 204092 - DNA, 2530 bp, Zea Mays
ccccaccgcacgcatccagtggctgctgccgcctcgcccccgctcctcctcctctcccgccacccacgccgcgcaggcctcacctactggtcgtcgttgcctaggggccagaacgcagggcccacagccccgccgcccgccaccgcctccaagcctgctgcgccgctcactgtcaacctgcctcgccaagtcgcccggatctcgacgccccacctgcggccggcggcggccccgccaaggtgccctgacagacgcggagacgccaccagaaccacggagttcgtgcgctggctggttgtctgcggaagactctccctctggcatgtaccgatgcgatctctcaactagtcataagcagctgaaagtagttcacatatatacttaaatactcaatcaatgaaagtagtgcactaaaatttgttccgacatcaagtttgctaaactattacggcaacatctaagctatgcatatcatacaccaacgcagttcgattgtccagctgataataataaaacgaaagctacgttgtctcctgctcctagagtgaactgagtcgacagaccacatactgacatacgccttgtattcttgtaaatatagcagattttgcatcatctggacgctagatagtttttttcttgtgttcagactttcgaagttgaattgaacaaattataaggatgtttagaactgctactgaattgttagagaattatatagatatgttatgttaccgcctttttttttacctgatgtgttcttttatctcgacaaccctggattaaaatcctagctccgccactgccgccacctccctgctccaaccccgcacctccgcttcgccatgaacccttcgtcgtcatccacctcctcctctggcgggtaccactctagggccgctgcctttgcttccccgcagccgcgcggcggtggcggtggcggcggccgagatgggagcgaccgcatcgacgccctcggtcgcctcctgacgagggtgttgcgccacatggcggcggagctgcgcatagatatgaggaccgatggatacgtgcgcgtccgcgacctgttgaagctcaaccttcagaccttcgccaaggcccctctcaagtctcacactgttgacgagatcagggaggcagtcaggcaggacaacaagcagcggtttagtctgttggaggaagatggcgagctgttgatccgggcgaaccaggggcacacagtaacaactgtcacatcagagagcctgctgaagcccattttgtcccccgacgaagtgtcagtttgtgtgcatggaacttacagaaaaaaccttgactcgattttgcaatttgggctaaagcgtatggcaaggttacacatacatttctcaagcggcttaccatcagatggagaagtaaccagtggtgtacggcagaatgtaaacatcttgatacatctggacgttagtaaagcacttaaaggtgggatgaagctttatatttcagacaacaaagtgatcttgacagaaggttttgatggcgtcgtcccggtgaaatactttgaaagagtcgaaacatggccaggacgagctccaataccgttccagagataacaggccatgttaccatttttcgtgattcgattgatgattttccggactccgtgaaaagctgtggttctttgtgtgtcttttcggtttttgtgtaacgaaaccaaaagacgagttagtttctctgtgcctgaggatgtcaagagggtttgccaaccatctatcctaattaatggagtacgagaagtttgcggagtatgagcagaagtactcagaggatgcagcaaccaaacattgaaaagtatcatggggagttgcctgcctgctgggctgatgcccttcctctcagtttggcaacttccagaagcatacgcctgaggtgcgcaacgtctgcttcggagcgagggagcatggcatgggcggcatttgcaacggtgggcacagcccagggctccgtttcatggccaacgactgctatgcaagcagtccttctttacaagcgtgcaagcaaacatccggtccattagattacgatccaaccacagatataactataatttgttatggttttttataaagattattgagttggtggtgaaaaggtttaagtattaaatgtgacctacggttgaatcacgatctaatggaccagatggtttgcttatggtttgcttgcacgcttgcaaagaaggactgcttgcatagcagtcgttgccccgttctatgttgttggtacctatcttgcttctctgatcgatcaataaaaggagacattatttgagggaccctttttgggtgccttgtatgctgtagctgttcaagtggctgaataaggctgcaagtcttgtgtaaggtgagactctgatgcataagctttgcaacttgcaagtgatgttggattttggaatgttatcaactttagtacacgttttctggccgtctgatcgaatcctggacaccaggggtagaattaattggtcgatcagagctgttaatcgtcc

SEQ ID NO: 204093 - DNA, 2426 bp, Zea Mays
ccccaccgcacgcatccagtggctgctgccgcctcgcccccgctcctcctcctctcccgccacccacgccgcgcaggcctcacctactggtcgtcgttgcctaggggccagaacgcagggcccacagccccgccgcccgccaccgcctccaagcctgctgcgccgctcactgtcaacctgcctcgccaagtcgcccggatctcgacgccccacctgcggccggcggcggccccgccaaggtgccctgacagacgcggagacgccaccagaaccacggagttcgtgcgctggctggttgtctgcggaagactctccctctggcatgtaccgatgcgatctctcaactagtcataagcagctgaaagtagttcacatatatacttaaatactcaatcaatgaaagtagtgcactaaaatttgttccgacatcaagtttgctaaactattacggcaacatctaagctatgcatatcatacaccaacgcagttcgattgtccagctgataataataaaacgaaagctacgttgtctcctgctcctagagtgaactgagtcgacagaccacatactgacatacgccttgtattcttgtaaatatagcagattttgcatcatctggacgctagatagtttttttcttgtgttcagactttcgaagttgaattgaacaaattataaggatgtttagaactgctactgaattgttagagaattatatagatatgttatgttaccgcctttttttttacctgatgtgttcttttatctcgacaaccctggattaaaatcctagctccgccactgccgccacctccctgctccaaccccgcacctccgcttcgccatgaacccttcgtcgtcatccacctcctcctctggcgggtaccactctagggccgctgcctttgcttccccgcagccgcgcggcggtggcggtggcggcggccgagatgggagcgaccgcatcgacgccctcggtcgcctcctgacgagggtgttgcgccacatggcggcggagctgcgcatagatatgaggaccgatggatacgtgcgcgtccgcgacctgttgaagctcaaccttcagaccttcgccaaggcccctctcaagtctcacactgttgacgagatcagggaggcagtcaggcaggacaacaagcagcggtttagtctgttggaggaagatggcgagctgttgatccgggcgaaccaggggcacacagtaacaactgtcacatcagagagcctgctgaagcccattttgtcccccgacgaagtgtcagaaaaaaccttgactcgattttgcaatttgggctaaagcgtatggcaaggttacacatacatttctcaagcggcttaccatcagatggagaagtaaccagtggtgtacggcagaatgtaaacatcttgatacatctggacgttagtaaagcacttaaaggtgggatgaagctttatatttcagacaacaaagtgatcttgacagaaggttttgatggcgtcgtcccggtgaaatactttgaaagagtcgaaacatggccaggacgagctccaataccgttccagagataacaggccatgttaccatttttcgacgagttagtttctctgtgcctgaggatgtcaagagggtttgccaaccatctatcctaattaatggagtacgagaagtttgcggagtatgagcagaagtactcagaggatgcagcaaccaaacattgaaaagtatcatggggagttgcctgcctgctgggctgatgcccttcctcagctcagtttggcaacttccagaagcatacgcctgaggtgcgcaacgtctgcttcggagcgagggagcatggcatgggcggcatttgcaacggtgggcacagcccagggctccgtttcatggccaacgactgctatgcaagcagtccttctttacaagcgtgcaagcaaacatccggtccattagattacgatccaaccacagatataactataatttgttatggttttttataaagattattgagttggtggtgaaaaggtttaagtattaaatgtgacctacggttgaatcacgatctaatggaccagatggtttgcttatggtttgcttgcacgcttgcaaagaaggactgcttgcatagcagtcgttgccccgttctatgttgttggtacctatcttgcttctctgatcgatcaataaaaggagacattatttgagggaccctttttgggtgccttgtatgctgtagctgttcaagtggctgaataaggctgcaagtcttgtgtaaggtgagactctgatgcataagctttgcaacttgcaagtgatgttggattttggaatgttatcaactttagtacacgttttctggccgtctgatcgaatcctggacaccaggggtagaattaattggtcgatcagagctgttaatcgtcc

SEQ ID NO: 204094 - DNA, 2588 bp, Zea Mays
ccccaccgcacgcatccagtggctgctgccgcctcgcccccgctcctcctcctctcccgccacccacgccgcgcaggcctcacctactggtcgtcgttgcctaggggccagaacgcagggcccacagccccgccgcccgccaccgcctccaagcctgctgcgccgctcactgtcaacctgcctcgccaagtcgcccggatctcgacgccccacctgcggccggcggcggccccgccaaggtgccctgacagacgcggagacgccaccagaaccacggagttcgtgcgctggctggttgtctgcggaagactctccctctggcatgtaccgatgcgatctctcaactagtcataagcagctgaaagtagttcacatatatacttaaatactcaatcaatgaaagtagtgcactaaaatttgttccgacatcaagtttgctaaactattacggcaacatctaagctatgcatatcatacaccaacgcagttcgattgtccagctgataataataaaacgaaagctacgttgtctcctgctcctagagtgaactgagtcgacagaccacatactgacatacgccttgtattcttgtaaatatagcagattttgcatcatctggacgctagatagtttttttcttgtgttcagactttcgaagttgaattgaacaaattataaggatgtttagaactgctactgaattgttagagaattatatagatatgttatgttaccgcctttttttttacctgatgtgttcttttatctcgacaaccctggattaaaatcctagctccgccactgccgccacctccctgctccaaccccgcacctccgcttcgccatgaacccttcgtcgtcatccacctcctcctctggcgggtaccactctagggccgctgcctttgcttccccgcagccgcgcggcggtggcggtggcggcggccgagatgggagcgaccgcatcgacgccctcggtcgcctcctgacgagggtgttgcgccacatggcggcggagctgcgcatagatatgaggaccgatggatacgtgcgcgtccgcgacctgttgaagctcaaccttcagaccttcgccaaggcccctctcaagtctcacactgttgacgagatcagggaggcagtcaggcaggacaacaagcagcggtttagtctgttggaggaagatggcgagctgttgatccgggcgaaccaggggcacacagtaacaactgtcacatcagagagcctgctgaagcccattttgtcccccgacgaagtgtcagcgtatggcaaggttacacatacatttctcaagcggcttaccatcagatggagaagtaaccagtggtgtacggcagaatgtaaacatcttgatacatctggacgttagtaaagcacttaaaggtgggatgaagctttatatttcagacaacaaagtgatcttgacagaaggttttgatggcgtcgtcccggtgaaatactttgaaagagtcgaaacatggccaggacgagctccaataccgttccagagataacaggccatgttaccatttttcggtaattcacatacatgattttttttttggggggggggagggggggcttaatatgcattgtgggtgtggaatatatcagcatttggtaaaatttgattgtgctgggacctctcagtgattcgattgatgattttccggactccgtgaaaagctgtggttctttgtgtgtcttttcggtttttgtgtaacgaaaccaaaagacgagttagtttctctgtgcctgaggatgtcaagagggtttgccaaccatctatcctaattaatggagtacgagaagtttgcggagtatgagcagaagtactcagaggatgcagcaaccaaacattgaaaagtatcatggggagttgcctgcctgctgggctgatgcccttcctcagctcagtttggcaacttccagaagcatacgcctgaggtgcgcaacgtctgcttcggagcgagggagcatggcatgggcggcatttgcaacggtgggcacagcccagggctccgtttcatggccaacgactgctatgcaagcagtccttctttacaagcgtgcaagcaaacatccggtccattagattacgatccaaccacagatataactataatttgttatggttttttataaagattattgagttggtggtgaaaaggtttaagtattaaatgtgacctacggttgaatcacgatctaatggaccagatggtttgcttatggtttgcttgcacgcttgcaaagaaggactgcttgcatagcagtcgttgccccgttctatgttgttggtacctatcttgcttctctgatcgatcaataaaaggagacattatttgagggaccctttttgggtgccttgtatgctgtagctgttcaagtggctgaataaggctgcaagtcttgtgtaaggtgagactctgatgcataagctttgcaacttgcaagtgatgttggattttggaatgttatcaactttagtacacgttttctggccgtctgatcgaatcctggacaccaggggtagaattaattggtcgatcagagctgttaatcgtcc

SEQ ID NO: 204095 - DNA, 1495 bp, Zea Mays
ccaaccccatttcatttctcgggcgcacttggaggagacgggcaaagccgctgagcaagttgcacttaaccctgataagtggctagagttcaagctccaagagaaggcaacagtcagtcacaactcacagttattcaggttttcatttgatccatcaactaaactgggacttgatgttgcctcgtgcctcatcacaagggcacctataggcgaggaagctgagggaagaaggaaatatgttattcgcccgtacacacctatctctgatccagactctaaaggatattttgacctactgatcaaggtttaccctgatggaaaaatgagtcagtattttgcaagtttgaagccaggagatgttgttgaagtcaaagggcccattgaaaagctcagatacaacccgaacatgaaaaaacaaattgggatggtaagatagccttaacttgctttgaccttttgatttcatccctgcaaggattttttttcgaaaacgcaggagagctgcgtatcaatatattaagaagaaagggtgaggcaagataatttttcatgtatttgattcaattgtttttagctcgtatgtttgttttaccttgattagagagtaaccctgcagatactatagctgttgaataatgtgcatgcctttggttccagatcgctggtggttctggtataacaccaatgctgcaggttgtcagggctatcctcaaaaaccctaatgacaacactcaggtctccttaatttacgccaatgtgtcaccagatgatatattgctcaaaagagaactggatagacttgccagtagctatcctaacttcaaggtattttatacagttgataaaccgtcaactgactggaggggtggtgttggttttgtatcaaaggacatggttttgaaaggtttgccaggcccagcggaggactctctgattcttgtttgtggtccaccaggaatgatgaatcacatatctggagacaaggccaaggatagatcacagggcgagctctctggcgttctgaaagacttaggatacaccgcagagatggtatacaaattctgagaagacagtagtagactctgctgacgcacacacattcttgctgccctgcagtcaataaaccacacctgaactttttgttgttgctgctgcatctggctctgaactggaaaccgttttgacttgtttcctgatgtaataataattttcatccgagaattctaggtgtagcttcgggtgttctgcagatgccacgctgcgatgtttgcgaaaattctagtatgctggcacttgagataagagctatcgagttctactggatagctgcagcgaattatggtatgttggaagttggaacccagtcatttgtcgcaatctggcgcgtatgtgccgtggcatctaggaactcgttgccgtatggtggatgtcgtaatcgtagagagagagagatgctttgttctgttgccgttagcttctgctgggaaccttgaac

SEQ ID NO: 204096 - DNA, 2920 bp, Zea Mays
gctcaacaactccgtactcgttctcttttactagcaaagacatattctttttttttcgagagaaaataataaacgatggaaggaatgccatgcatatactcatggtaaataaaatggaaaaaggcgataaataatttactcggcgccggcggccgacgtggcttcccttgcagcggcacactcacccgagacctgtagccggtggccgctatccgcgggggctccaccgccactcccgactcccgctcgccgcccgccttacaaaaccccacaaccccatccgcagccacccgccgcggcaccccctccaccaccggccaccatgcagacgcagaccctcatcctacgcgctggcccctccgcccgacgctccacgccgccgccggccagcaccgtgcacctcgccgcctccggaaggtgcctgctgcgtgctcccagctcgctccgacgccgaagaacccgctctctcagggcctctgcctctctcgagcaggtcaaggaagtcgccagctccccagctccctccgggaagagtagtcaagcaactagaagagatgtgaggaatatcgcaattgttgctcatgttgatcatgggaaaacaactttggtggattcaatgttaaggcaagccaaggtacattccagttttccgagataatcaagttgtgcaggaaagaataatggactccaatgacctagaacgggaaagagggatcacgattctgagcaagaatacatcaataacctataagggcactaaaatcaatataattgatactcctggacattcagattttggtggggaggttgagcgtgttctgaacatggtggaaggagttcttctagtggttgattctgtagaggggcctatgccacagacaaggtttgttctgaagaaagctctagaatttggacatgctgttgttgtagttgtaaacaagatcgacagacctactgctcgtcctgagtttgtggtgaattcaacatttgaactatttattgaattaaatgcaactgatgaacagtgtgatttccaaacagtctatgcaagtggaattaaaggaaaggccagtctatctcctgacaatttagctgatgacctaggacccctttttgaggcaattcttagatgcataccagagccacgcgttgagaaagatggtgccctgcaaatgcttgtatctaatactgaatatgatgagcacaaaggaagaattgcaattggacggctgcatgcaggagaacttcagcgtggcatggaggtcaaggtttgtacaccagacgatgcttgcagggttggtaaagtgagtgagctttttgtttatcagaacttcagccgtgcccccgttgaatctgttagtgctggtgacatttgtgctgtatgtggaatcgatgatatcatgatcggggaaactatagctgataaagttacaggaacaccattgcccactatcaaagtggaggagccaacagtcagaatgtctttctccatcaatacatcaccttttgttggacgggaggggaaatatgttactagccgaaatctccgtgacaggttgtatcgcgagctcgaaaggaatttggctatgaaagtagaagacggggaaactgctgatacatttcttgttagtggcagaggcacactacatctcacaatattgatagaaaatatgcggagagaaggatatgaatttatgattggacctccaaaggtcataaacaagacagtcgatggaaaactactagagccttatgagatagctgctgttgaagtcccagaggagtccatgggatcagttgttgagcttttagggaaaaggcgtggacagatggttgacatggaagctaacgggacggagggaacaacattgctgaaatacaagattcctaccagaggccttattggacttcggaatgcaattcttacagcttctcgtggcagagctatattgaatacaatctttgacagctatggcccatgggctggagatcttagctcacgtgatcagggatccttggttgcttttgaagatggaagcactacttcttatgcacttcttaatgcacaagaaagaggtatgttgtttgtccaaccagggcaggatgtttacaaaggtcaaattgttggtatccatcagagacctggtgatttagcaattaatgtgtgcaagaaaaaggctgctacaaatgttcgttccaacaaagaaactacagtggttcttgatgaacctttaagctacagtttggatgactgcatagagtttatccaagaagatgagatagtggaggttactcctgcaagcatccgtatgtgcaagaacccaaaagtttcgaagaaaaagtaacataatcgcatccatttgtcgtcaatgcatcttctacacatagaagctgcatgctccgttgccaggtctcgtatgagtgacggctgcacggcgtcctcaagtcagtaatcaggatatttttggtggtctacagacaaagactaaaggtcgccagattaagatagaggattatatggcagttttgtgatgaataaatcagccgatacctggagtagtattatttggccacggataaggcgggcactgtttctcatctacttctccctgttctttttatttgtcgtgttttagttcaaaaatgaactagacgacaaatatttgagaacgaagttagtattacacatatattgtgtaggtcatacgtaggactataggcattgtacacgattctttcgacgctagtaaagactggaagaaagctttagcaaatggattagcacacaactgctgctacagactcttatttatttgtaattcaagccagtctataagttgcaacaaactcctgtgcaattttgaactgaagattatagggaagaacctaccattacacgaatgggcccatagatttagag

SEQ ID NO: 204097 - DNA, 2850 bp, Zea Mays
gctcaacaactccgtactcgttctcttttactagcaaagacatattctttttttttcgagagaaaataataaacgatggaaggaatgccatgcatatactcatggtaaataaaatggaaaaaggcgataaataatttactcggcgccggcggccgacgtggcttcccttgcagcggcacactcacccgagacctgtagccggtggccgctatccgcgggggctccaccgccactcccgactcccgctcgccgcccgccttacaaaaccccacaaccccatccgcagccacccgccgcggcaccccctccaccaccggccaccatgcagacgcagaccctcatcctacgcgctggcccctccgcccgacgctccacgccgccgccggccagcaccgtgcacctcgccgcctccggaaggtgcctgctgcgtgctcccagctcgctccgacgccgaagaacccgctctctcagggcctctgcctctctcgagcaggtcaaggaagtcgccagctccccagctccctccgggaagagtagtcaagcaactagaagagatgtgaggaatatcgcaattgttgctcatgttgatcatgggaaaacaactttggtggattcaatgttaaggcaagccaaggttttccgagataatcaagttgtgcaggaaagaataatggactccaatgacctagaacgggaaagagggatcacgattctgagcaagaatacatcaataacctataagggcactaaaatcaatataattgatactcctggacattcagattttggtggggaggttgagcgtgttctgaacatggtggaaggagttcttctagtggttgattctgtagaggggcctatgccacagacaaggtttgttctgaagaaagctctagaatttggacatgctgttgttgtagttgtaaacaagatcgacagacctactgctcgtcctgagtttgtggtgaattcaacatttgaactatttattgaattaaatgcaactgatgaacagtgtgatttccaaacagtctatgcaagtggaattaaaggaaaggccagtctatctcctgacaatttagctgatgacctaggacccctttttgaggcaattcttagatgcataccagagccacgcgttgagaaagatggtgccctgcaaatgcttgtatctaatactgaatatgatgagcacaaaggaagaattgcaattggacggctgcatgcaggagaacttcagcgtggcatggaggtcaagaacttcagccgtgcccccgttgaatctgttagtgctggtgacatttgtgctgtatgtggaatcgatgatatcatgatcggggaaactatagctgataaagttacaggaacaccattgcccactatcaaagtggaggagccaacagtcagaatgtctttctccatcaatacatcaccttttgttggacgggaggggaaatatgttactagccgaaatctccgtgacaggttgtatcgcgagctcgaaaggaatttggctatgaaagtagaagacggggaaactgctgatacatttcttgttagtggcagaggcacactacatctcacaatattgatagaaaatatgcggagagaaggatatgaatttatgattggacctccaaaggtcataaacaagacagtcgatggaaaactactagagccttatgagatagctgctgttgaagtcccagaggagtccatgggatcagttgttgagcttttagggaaaaggcgtggacagatggttgacatggaagctaacgggacggagggaacaacattgctgaaatacaagattcctaccagaggccttattggacttcggaatgcaattcttacagcttctcgtggcagagctatattgaatacaatctttgacagctatggcccatgggctggagatcttagctcacgtgatcagggatccttggttgcttttgaagatggaagcactacttcttatgcacttcttaatgcacaagaaagaggtatgttgtttgtccaaccagggcaggatgtttacaaaggtcaaattgttggtatccatcagagacctggtgatttagcaattaatgtgtgcaagaaaaaggctgctacaaatgttcgttccaacaaagaaactacagtggttcttgatgaacctttaagctacagtttggatgactgcatagagtttatccaagaagatgagatagtggaggttactcctgcaagcatccgtatgtgcaagaacccaaaagtttcgaagaaaaagtaacataatcgcatccatttgtcgtcaatgcatcttctacacatagaagctgcatgctccgttgccaggtctcgtatgagtgacggctgcacggcgtcctcaagtcagtaatcaggatatttttggtggtctacagacaaagactaaaggtcgccagattaagatagaggattatatggcagttttgtgatgaataaatcagccgatacctggagtagtattatttggccacggataaggcgggcactgtttctcatctacttctccctgttctttttatttgtcgtgttttagttcaaaaatgaactagacgacaaatatttgagaacgaagttagtattacacatatattgtgtaggtcatacgtaggactataggcattgtacacgattctttcgacgctagtaaagactggaagaaagctttagcaaatggattagcacacaactgctgctacagactcttatttatttgtaattcaagccagtctataagttgcaacaaactcctgtgcaattttgaactgaagattatagggaagaacctaccattacacgaatgggcccatagatttagag

SEQ ID NO: 204098 - DNA, 613 bp, Zea Mays
atgagtccatgacacactcctgctcgcggtgggggtgctcatcccggcgctgttcctgctcgtgccctcgcgccaggaggggtacatctcagacgaccacgacgtgttcgctgctgaaatcaaagttggtttcactttggaaaagccagtgtcattccttacttctcacatagacaaactagggaatgccatatttgaagagattggtgtacctaatagcaaggtatcatcgtttcaatgcacccattagcttttaaatactccacacatgttgtttttggtgttcttccttatccaaaagatgcttcaataagtttgccagctctaagtgtgttgagatcatccttaatagagatgattctccagcaagtgaacctatccttgacaccactttttgggcatccatgttgtttcgagctgttgagatttcctggaggagttacagtcattcctgcagtgtctggttttacatgggcaaacacagaccccctattcgactttgtgttgaacaactccattttatcagattttgggtaatcttacagagctcaaggatcagctgaaacttggattgaacttaaggtcatatgaggaacgagagtgcagggcggca

SEQ ID NO: 204099 - DNA, 624 bp, Zea Mays
atcggccatgagtccatgacacactcctgctcgcggtgggggtgctcatcccggcgctgttcctgctcgtgccctcgcgccaggaggggtacatctcagacgaccacgacgtgttcgctgctgaaatcaaagttggtttcactttggaaaagccagtgtcattccttacttctcacatagacaaactagggaatgccatatttgaagagattggtgtacctaatagcaagctctcgttcacacttgaagttatggttgcttcgactgttagccatgcgtcatcaggaaaatcgagccagaagacaaggtcacaattttgcttcaagcataaccatgagttgcaatcatgggctatgatgcaaagatgaggctttgtttattggctactgtaactatatgattaattttaaagctttttgaggtcaggttaactgtagatatagatgttgcttcgactgtatatatgattaattttaaatctctcaccgaagggttgggagcttatatagaggaatgcaaggactcttactcgggtccacgttctgcaataatactttcttgtaacgtattgaccataaatacataatacaacatgcaacttctctgcaagattctgtttgttct

SEQ ID NO: 204100 - DNA, 2016 bp, Zea Mays
ctcggagctatctcagtgacaggacctctatgctgggttgaacatatgtcgttggacaatgaaactggattagacaaacctggaataagggtcaggtcagtcacaggccttgttgcagcagactatttcgtccctggatattttgtttgggctgtcttaattgccaatttagctcgtattggatatgaagaaaagaccatgtacatggctgcatatgattggaggttatctttccagaacactgaggttcgtgatcaaactttgagcagaataaagagcaatattgaactcatggtagcaacaaatggtggaaatagggtggtggtgatcccacactccatgggggtcctctattttctgcattttatgaaatgggtcgaagcacctcctcccatggggggcggtggtggtccgaactggtgtgagaagcatattaaagctgtaatgaatattggaggacctttcttaggagttcccaaggctgttgctgggcttttctcatctgaagccaaagatgttgccgttgctagagctatcgctcctgatgtcctggactctgattttcttggacttcaaactttgcgccatttgatgcgtatgacccgaacatgggattcaacaatgtcaatgcttcctaaaggtggtgatacaatttggggaaatctggattggtctccagaagatggccttgaatgtaaagctaagaagcataaaaccaatgataccgaggtttctaaggatagcaatggggaaaatatcgaagttcaacctgaacctataaactacggaaggctggtatccttcggtaaagatgtagcagaggcaccttcttcagagattgaacagatagaatttcgtgatgctgttaaaggtaacgatatcgtccattcaaatgcatcatgccgggagatctggacagagtaccatgaattaggatggggtggaataaaggcagtcgcagactacaaagtttacactgccagttctgttatagaccttcttcactttgttgctccaaggatgatgcagcgtggaaatgtccacttttcatatggaattgctgataacttggatgatccgaaatatcaacattacaaatattggtcaaaccccttggaaacaaagctaccgaatgctcctgacatggaaataatttccatgtacggagtaggcattcctactgaaagggcatatgtctacaagttggctccacaggcagagtgctatataccattccggattgacgcctcggctgatggcggggaggaaaacaaatgcttgaaagggggtgtttacttagctgacggcgacgaaactgttccagttcttagcgcgggctacatgtgtgcaaaagggtggcgtggcaaaactcgtttcaaccctgccggcagcaagacttacgtgagagagtacagccattcaccaccctcaactctcctggaaggcaggggcactcagagcggtgcacatgttgatataatggggaacttcgctttgatcgaggacatcatcaggatagctgccggggcaaccggtgaggaaattggtggcgaccaggtttattcagatatattcaaatggtcagagaaaatcaaattgaaattgtaacccatgggaagttaaaagaagtgccccaacccgttcattgcgttcctaaatgcttgcctgagcgcaactctggattttgcttaaatatcgtatttttttcacgcctcattcgtccctctagtaaatttacattgacaggaccccggtgcgacgcggatgttgtaccgtatttttggcattgtatattaaaatgtacaggcgtaagttacatttgctagctgaaattattgcagtagcttgccttttcttttgagcacggaagtgtgctctccattacgtgataacctgtgccaaatctttgacaatcatatcctgaatataagatggaacattatttcgttgtgtgaccatattacaagagcggggaatgtaattgactatccttgacacaaaattacataacagcaa

SEQ ID NO: 204101 - DNA, 2247 bp, Zea Mays
gttggtggcagagcggacgacaacgcacgcgcgcctcttcctcctcctccccgccgccgccgccgccgccgcgcgcgcctttgcgtgccccataccgtctcctccaacacgctcccctcgttggcatcaatttcccatcccacctgtccaccgtcgcccgccgctatctcgcacccgaacccagcgcctccctcgtcgccgccggcgcgccgccatggtgtcgcagcacggcatcctcctcgcagttaacatcatctccgaccatttcggtcctatcgtatccaaagtgtgtggctgccttctgcgccacggcgcgctgtcgttgcaggatatcgtccgccgcctcgaactctcgcccgggcaggggctggcgataggacagtgacgctctacctggccatcttcgacaatgttctgcaccggctgcgcttctcaaagttcctttccgtcgtccgtgtggatattcctgagtcagaagttcttctcgaaggattacttcagaatggtaggctaacatttgagcaacttgtggagcgaacaatatttaaagtatcagaagacagccccttaccaacaagggaagaagtacgaatgaacttcaacaaacttgtctatgcgcattatgtggaacgttgcccaaaaccagaacctttttttgatcctcttgcggttgaacaacctacatccacaaggaaacgggctcctaaaactgttgaggcggttctttcacttgagcagaaagttgtctgtactgcagctctatctgacgctgaaagattttctgagataccatacttcatggacgggtcatcgagtgcaaaagatggccatcatgctgttgctggtaataagcgaaaacatgaaaccttagaagttgatgaagatgattcgataattgcagaaagtgaagtactttggcggataaattttgagagattcatattttgtttaaagaagaagttttgtgcagaacgaaagaaagcaaagatgaggctcggaacacttgctatatgggaagcattttttgaggccaatgtaacaaacaacgacaacaagactgtgacatcaccaatagatggaattttggaaagagtaggacaaaaggaaggaggcatgtcaatgactttggatcacataacaagtgtgttgaatgatttagagtgcacttctaccgctaataacccagaagaattcacattcgatttgaataaattggttgagacatgtcgaaacgatgagatagagtctcttgtgaaaaagaaacatgggcaagaagcttatacaatctttaggttattgctgaaacaaggctctccagttgagacggatgaaattactgacaggacaattctagacaagcaggttgttcatgaaactctatacaagctttggaaagatgaatacatagattcagagagagtcccttcaacatcagcaacaggaacaggaagcgctcagttctttgtttggagagtaaaaaatatttatagggaacacttcatggacaatctttaccatgctgctttaaacttgcgccagatggtcaattatatggctgaactactacttgagggttcaaaggatgaaatcaagcttcggaacagaaaaaacattttgatcctagctctcactagacatgatgaatcccttatgttgttccatgatttttgagaatactggaacaggatctggttataaatttctggtctttggagaaaccaaagcatggtgatttttctttggaattgtcaaagcttcgtacctatgatgttgttgagggagttgctcgtcaacttgaattggaccatgcatgaaaattcggcttacatcccacaattgctaatctcagcaacctaaaccacagcctgtcaagtatcgaacagtggagcatctgttggacatgctcatcctttacaatcagattaaccttttttgtttcttttggtcaatatgagcatgatttccgtgtaacaaaatgtgttggacttcctgaactttaacaaagattattacattcagttaaaacatcgtttcccccagtttatatgtaacatcagaatagatgttctttgtggttaaatgtcattgtgcgccaagtcatgcatctggtatgcttgtctgttgctgttaacgcctcgtaggttgtctggacgacttcatttggaacacatgccaacaggcaaacaagaggggcatatttatattgcagtttagagtaacagacatgatatcctactatttctttgt

SEQ ID NO: 204102 - DNA, 2273 bp, Zea Mays
gttggtggcagagcggacgacaacgcacgcgcgcctcttcctcctcctccccgccgccgccgccgccgccgcgcgcgcctttgcgtgccccataccgtctcctccaacacgctcccctcgttggcatcaatttcccatcccacctgtccaccgtcgcccgccgctatctcgcacccgaacccagcgcctccctcgtcgccgccggcgcgccgccatggtgtcgcagcacggcatcctcctcgcagttaacatcatctccgaccatttcggtcctatcgtatccaaagtgtgtggctgccttctgcgccacggcgcgctgtcgttgcaggatatcgtccgccgcctcgaactctcgcccgggcaggtgaagaactccctcctcattctcattcagcacaactgcgttcaggcctacacaagccccagaggggctggcgataggacagtgacgctctacctggccatcttcgacaatgttctgcaccggctgcgcttctcaaagttcctttccgtcgtccgtgtggatattcctgagtcagaagttcttctcgaaggattacttcagaatggtaggctaacatttgagcaacttgtggagcgaacaatatttaaagtatcagaagacagccccttaccaacaagggaagaagtacgaatgaacttcaacaaacttgtctatgcgcattatgtggaacgttgcccaaaaccagaacctttttttgatcctcttgcggttgaacaacctacatccacaaggaaacgggctcctaaaactgttgaggcggttctttcacttgagcagaaagttgtctgtactgcagctctatctgacgctgaaagattttctgagataccatacttcatggacgggtcatcgagtgcaaaagatggccatcatgctgttgctggtaataagcgaaaacatgaaaccttagaagttgatgaagatgattcgataattgcagaaagtgaagtactttggcggataaattttgagagattcatattttgtttaaagaagaagttttgtgcagaacgaaagaaagcaaagatgaggctcggaacacttgctatatgggaagcattttttgaggccaatgtaacaaacaacgacaacaagactgtgacatcaccaatagatggaattttggaaagagtaggacaaaaggaaggaggcatgtcaatgactttggatcacataacaagtgtgttgaatgatttagagtgcacttctaccgctaataacccagaagaattcacattcgatagagtctcttgtgaaaaagaaacatgggcaagaagcttatacaatctttaggttattgctgaaacaaggctctccagttgagacggatgaaattactgacaggacaattctagacaagcaggttgttcatgaaactctatacaagctttggaaagatgaatacatagattcagagagagtcccttcaacatcagcaacaggaacaggaagcgctcagttctttgtttggagagtaaaaaatatttatagggaacacttcatggacaatctttaccatgctgctttaaacttgcgccagatggtcaattatatggctgaactactacttgagggttcaaaggatgaaatcaagcttcggaacagaaaaaacattttgatcctagctctcactagacatgatgaatcccttatgttgttccatgatttttgagaatactggaacaggatctggttataaatttctggtctttggagaaaccaaagcatggtgatttttctttggaattgtcaaagcttcgtacctatgatgttgttgagggagttgctcgtcaacttgaattggaccatgcatgaaaattcggcttacatcccacaattgctaatctcagcaacctaaaccacagcctgtcaagtatcgaacagtggagcatctgttggacatgctcatcctttacaatcagattaaccttttttgtttcttttggtcaatatgagcatgatttccgtgtaacaaaatgtgttggacttcctgaactttaacaaagattattacattcagttaaaacatcgtttcccccagtttatatgtaacatcagaatagatgttctttgtggttaaatgtcattgtgcgccaagtcatgcatctggtatgcttgtctgttgctgttaacgcctcgtaggttgtctggacgacttcatttggaacacatgccaacaggcaaacaagaggggcatatttatattgcagtttagagtaacagacatgatatcctactatttctttgt

SEQ ID NO: 204103 - DNA, 965 bp, Zea Mays
cggcatcctgtctgtcagtagtgttagatggacggcaaaacaataaaggctcagatctgggacacagctgggcaggaaaggtaccgtgcaattacaagtgcttactaccgtggagccgtgggagcactgcttgtgtacgacatcacaaagaggcagagcttcgacaatgttcacaggtggcttcgtgaactccgcgaccatgctgactccagtattgtgatcatgatggtcggtaacaaatctgacctaatccacctgagagctatctctgaggatgaaggcaaagcgttggctgagaaggaggggttgttcttcctcgagacatcagctatggaggctataaacgtggagcaagccttccagactatcatgacggaggtctatggcattgtcaacaggaaagcgctggctgccaaagaagcagcagctgcaactgcttcgttgccctcccagggtaaaatcatcagcattgacagcactgcaggaaacacaaagagggcatgctgctctacctaaaaatgttcaaacaccacattatacagaaccttggagacaattgttggtagaaaatggagcatagtgatcacaaatggtgtggtggcaatatatactcctattctattctattcttttcttttctttattgtgtggacaaaatgggggtacatgcagtttagtttgttcagtgtgtgttagtcaaaagttagatattttcgttaggatccataccatttatcttctcaagttaaatgatactgcagtataactcagaatcatatagtcccaagttgctacagaattcaactgcgaatttgtgatttcatcatgcttacattctactctctgtatcttaaatattaagatatctttgtgcagcctactctgacaggagtttgttgcatgctggtacctaagccactcttgttccataactacagtaggtgttggaaccattgaataattag

SEQ ID NO: 204104 - DNA, 1827 bp, Zea Mays
cactcccttgtggttgtggccttcccgtcatcccgtggcggcggctcgcctcctcaaggcctccagactccagtgctcggcgtcgacgtgcgaatcagcgacctccaacacgccgccgcttcgtttctcctgtctcctgattcccgatccgctgagcgccagcgacgacctgctctgcgcgcctggccgtccccgtccttctgcgcagtgccttctctacctcttctcctcgccttccccgcaagactgccttggcgtctctggtagttgaatggcttcaagtgcacgggacattatgtttcggcctctcaaaacattaactataagcccggcactggcatctggtgtgatcagacagcgttaccagcttcaacagcatgcaccagtgagtggcacatccaaaggaaaggctaagctcaaagcaggtcagcctttgaagcgttccaccattggagcaaagaaaggggcaccttccgctgctggtggcggcggtggtcgtggtcgtcgtgaggccattgagcgcattattcagatttccgagtcatgtctcaatgcatctactccgttgcggcacttgcccctcaaggagcgtcttcgtgaggccaaacgtgaggaactgggtcttgtctccaaggagaggcaacgagagcttgatatagccaaagccaaatctaaagccaaatctaaaggtcctggtggagatgatggagaccgtgtgcttatgggtccaccgggccttgactatatcagtcttgggctagttgatgaggaggcaatccccaagtatgaactcacagtcgaggatggtcggcgacttgctaaagaatacagtcgtgtactaatgcggcggcaccgtgcaaggcaaacagcagagtcaatgcttctaaccctaaaaaaggaggccattgatgctctccctgagaagctacgagctgctgctatggtacctgacatgacaccgttccctgcaaaccggtacatggcgacactcacaccaccaattgaaggatatattgaaaaagtgcgggaagcggccaagaagcactctgtgaaggagaaacttcgctgagaattcaagagaggaaactgtttccgtaaggtgaataaatattcaacctaatgtacaagaacagctttggcacaaactgcaattgccatatttggtgatctaatcagacatcccaatttgctgagcagccattatctagtgaaatcctttttgccatttttatgcaactctacaggattgttttttttttttgcagttgtcgctagactgtcatttcattttctgtttttgctcatttaggatgtttgctgttgagaggcatgcttggtgcaagtgcaatggtgagagctgccttactcgttatcatgtcgcagtttcgatgcacctctttgtctttgcggggaaaagacttcgatttatcccctatttacacctcatttatagtcatgtgggagcctctaggacgtttgttgttgacagcaacttccgcaataaagggttagcagtgagaccatgaaactaagaatctcccgattcctcacaaatgccccccgtactattttatactctagattgctgatacagcaagggttatatgatgcagcattttgttcgtatgtgctttcaatttttagttgcactgcatctttccatgaggtaatggtatattgtgtaccttatgtttctgcgagatgtcagtttcgacttttgagtagccctcatttggacatttggatttactacattgcagccgttcttgcatgaccttcgctccaggttatgcgtatgttatccatttgtgctgtacgatcttgacc

SEQ ID NO: 204105 - DNA, 2191 bp, Zea Mays
ccgtggcggcggctcgcctcctcaaggcctccagactccagtgctcggcgtcgacgtgcgaatcagcgacctccaacacgccgccgcttcgtttctcctgtctcctgattcccgatccgctgagcgccagcgacgacctgctctgcgcgcctggccgtccccgtccttctgcgcagtgccttctctacctcttctcctcgccttccccgcaagactgccttggcgtctctgaacgtccgatcagaacgtccggagccgatcaagggcaacgacgcgatgaggatgattaatcgtgactaatcgttcgatcagtttagaaacgatcagcctggctggctggattgaaatttcggcccagtggcccacttcacttgcccagcggcccagcccagcttccttttttccaattcccaccacttgagcagaagtcgcacaagtcacaaccaagagccaacagagcaacgcaggcacacacgacacgaaccaggcaaccagctgcggacggaggaaccctagcggaacactgtgccggtgacggcggcgcgctaccggtgacgggggatacggcggcatcggcccctcctccatccccggcgcggcggcgccagcagccggcctgcagcaaaggtagttgaatggcttcaagtgcacgggacattatgtttcggcctctcaaaacattaactataagcccggcactggcatctggtgtgatcagacagcgttaccagcttcaacagcatgcaccagtgagtggcacatccaaaggaaaggctaagctcaaagcaggtcagcctttgaagcgttccaccattggagcaaagaaaggggcaccttccgctgctggtggcggcggtggtcgtggtcgtcgtgaggccattgagcgcattattcagatttccgagtcatgtctcaatgcatctactccgttgcggcacttgcccctcaaggagcgtcttcgtgaggccaaacgtgaggaactgggtcttgtctccaaggagaggcaacgagagcttgatatagccaaagccaaatctaaagccaaatctaaaggtcctggtggagatgatggagaccgtgtgcttatgggtccaccgggccttgactatatcagtcttgggctagttgatgaggaggcaatccccaagtatgaactcacagtcgaggatggtcggcgacttgctaaagaatacagtcgtgtactaatgcggcggcaccgtgcaaggcaaacagcagagtcaatgcttctaaccctaaaaaaggaggccattgatgctctccctgagaagctacgagctgctgctatggtacctgacatgacaccgttccctgcaaaccggtacatggcgacactcacaccaccaattgaaggatatattgaaaaagtgcgggaagcggccaagaagcactctgtgaaggagaaacttcgctgagaattcaagagaggaaactgtttccgtaaggtgaataaatattcaacctaatgtacaagaacagctttggcacaaactgcaattgccatatttggtgatctaatcagacatcccaatttgctgagcagccattatctagtgaaatcctttttgccatttttatgcaactctacaggattgttttttttttttgcagttgtcgctagactgtcatttcattttctgtttttgctcatttaggatgtttgctgttgagaggcatgcttggtgcaagtgcaatggtgagagctgccttactcgttatcatgtcgcagtttcgatgcacctctttgtctttgcggggaaaagacttcgatttatcccctatttacacctcatttatagtcatgtgggagcctctaggacgtttgttgttgacagcaacttccgcaataaagggttagcagtgagaccatgaaactaagaatctcccgattcctcacaaatgccccccgtactattttatactctagattgctgatacagcaagggttatatgatgcagcattttgttcgtatgtgctttcaatttttagttgcactgcatctttccatgaggtaatggtatattgtgtaccttatgtttctgcgagatgtcagtttcgacttttgagtagccctcatttggacatttggatttactacattgcagccgttcttgcatgaccttcgctccaggttatgcgtatgttatccatttgtgctgtacgatcttgacc

SEQ ID NO: 204106 - DNA, 2819 bp, Zea Mays
ccgtggcggcggctcgcctcctcaaggcctccagactccagtgctcggcgtcgacgtgcgaatcagcgacctccaacacgccgccgcttcgtttctcctgtctcctgattcccgatccgctgagcgccagcgacgacctgctctgcgcgcctggccgtccccgtccttctgcgcagtgccttctctacctcttctcctcgccttccccgcaagactgccttggcgtctctgaacgtccgatcagaacgtccggagccgatcaagggcaacgacgcgatgaggatgattaatcgtgactaatcgttcgatcagtttagaaacgatcagcctggctggctggattgaaatttcggcccagtggcccacttcacttgcccagcggcccagcccagcttccttttttccaattcccaccacttgagcagaagtcgcacaagtcacaaccaagagccaacagagcaacgcaggcacacacgacacgaaccaggcaaccagctgcggacggaggaaccctagcggaacactgtgccggtgacggcggcgcgctaccggtgacgggggatacggcggcatcggcccctcctccatccccggcgcggcggcgccagcagccggcctgcaggtacggtctccagtctccagatcgcccctctggcgatcaggaacgatcagccgatctgaaaacattgctgtggattcagatcctggggtggatggaatggttacttgttgattcgttacttgctgtgtcgttattttgtgtggcacttgggttggtgtgatctttacccatgctcgattgtgagccttacctgcaacccgaggtgacttgcgtttttgtcttgttttcgtatctcaagctatagtttgaacggtcggggttgtttggatctagaggtgctgatgacaatgtagtgcgcgtgtcagttgattttttgtgcccttccttgaataagtagtaatttatcaactatcatgtccgtcggaggtgccgtttggtatttcctatgagtttactcattttgttctttgttggacatagccagcacttgttttttattacatgttccatcgacgttattcagacacatcatattgtgtatttggcattcactttgctgcttaattgttttattgcactgtgtctgctcattttgataaattgtcttcataaaagatctattttttgtatgcccacaaaagaaaagaaaggaaaagttaagttaattgcatatttcccattggtgtagcaaaggtagttgaatggcttcaagtgcacgggacattatgtttcggcctctcaaaacattaactataagcccggcactggcatctggtgtgatcagacagcgttaccagcttcaacagcatgcaccagtgagtggcacatccaaaggaaaggctaagctcaaagcaggtcagcctttgaagcgttccaccattggagcaaagaaaggggcaccttccgctgctggtggcggcggtggtcgtggtcgtcgtgaggccattgagcgcattattcagatttccgagtcatgtctcaatgcatctactccgttgcggcacttgcccctcaaggagcgtcttcgtgaggccaaacgtgaggaactgggtcttgtctccaaggagaggcaacgagagcttgatatagccaaagccaaatctaaagccaaatctaaaggtcctggtggagatgatggagaccgtgtgcttatgggtccaccgggccttgactatatcagtcttgggctagttgatgaggaggcaatccccaagtatgaactcacagtcgaggatggtcggcgacttgctaaagaatacagtcgtgtactaatgcggcggcaccgtgcaaggcaaacagcagagtcaatgcttctaaccctaaaaaaggaggccattgatgctctccctgagaagctacgagctgctgctatggtacctgacatgacaccgttccctgcaaaccggtacatggcgacactcacaccaccaattgaaggatatattgaaaaagtgcgggaagcggccaagaagcactctgtgaaggagaaacttcgctgagaattcaagagaggaaactgtttccgtaaggtgaataaatattcaacctaatgtacaagaacagctttggcacaaactgcaattgccatatttggtgatctaatcagacatcccaatttgctgagcagccattatctagtgaaatcctttttgccatttttatgcaactctacaggattgttttttttttttgcagttgtcgctagactgtcatttcattttctgtttttgctcatttaggatgtttgctgttgagaggcatgcttggtgcaagtgcaatggtgagagctgccttactcgttatcatgtcgcagtttcgatgcacctctttgtctttgcggggaaaagacttcgatttatcccctatttacacctcatttatagtcatgtgggagcctctaggacgtttgttgttgacagcaacttccgcaataaagggttagcagtgagaccatgaaactaagaatctcccgattcctcacaaatgccccccgtactattttatactctagattgctgatacagcaagggttatatgatgcagcattttgttcgtatgtgctttcaatttttagttgcactgcatctttccatgaggtaatggtatattgtgtaccttatgtttctgcgagatgtcagtttcgacttttgagtagccctcatttggacatttggatttactacattgcagccgttcttgcatgaccttcgctccaggttatgcgtatgttatccatttgtgctgtacgatcttgacc

SEQ ID NO: 204107 - DNA, 1651 bp, Zea Mays
caagagccaacagagcaacgcaggcacacacgacacgaaccaggcaaccagctgcggacggaggaaccctagcggaacactgtgccggtgacggcggcgcgctaccggtgacgggggatacggcggcatcggcccctcctccatccccggcgcggcggcgccagcagccggcctgcagacagcgttaccagcttcaacagcatgcaccagtgagtggcacatccaaaggaaaggctaagctcaaagcaggtcagcctttgaagcgttccaccattggagcaaagaaaggggcaccttccgctgctggtggcggcggtggtcgtggtcgtcgtgaggccattgagcgcattattcagatttccgagtcatgtctcaatgcatctactccgttgcggcacttgcccctcaaggagcgtcttcgtgaggccaaacgtgaggaactgggtcttgtctccaaggagaggcaacgagagcttgatatagccaaagccaaatctaaagccaaatctaaaggtcctggtggagatgatggagaccgtgtgcttatgggtccaccgggccttgactatatcagtcttgggctagttgatgaggaggcaatccccaagtatgaactcacagtcgaggatggtcggcgacttgctaaagaatacagtcgtgtactaatgcggcggcaccgtgcaaggcaaacagcagagtcaatgcttctaaccctaaaaaaggaggccattgatgctctccctgagaagctacgagctgctgctatggtacctgacatgacaccgttccctgcaaaccggtacatggcgacactcacaccaccaattgaaggatatattgaaaaagtgcgggaagcggccaagaagcactctgtgaaggagaaacttcgctgagaattcaagagaggaaactgtttccgtaaggtgaataaatattcaacctaatgtacaagaacagctttggcacaaactgcaattgccatatttggtgatctaatcagacatcccaatttgctgagcagccattatctagtgaaatcctttttgccatttttatgcaactctacaggattgttttttttttttgcagttgtcgctagactgtcatttcattttctgtttttgctcatttaggatgtttgctgttgagaggcatgcttggtgcaagtgcaatggtgagagctgccttactcgttatcatgtcgcagtttcgatgcacctctttgtctttgcggggaaaagacttcgatttatcccctatttacacctcatttatagtcatgtgggagcctctaggacgtttgttgttgacagcaacttccgcaataaagggttagcagtgagaccatgaaactaagaatctcccgattcctcacaaatgccccccgtactattttatactctagattgctgatacagcaagggttatatgatgcagcattttgttcgtatgtgctttcaatttttagttgcactgcatctttccatgaggtaatggtatattgtgtaccttatgtttctgcgagatgtcagtttcgacttttgagtagccctcatttggacatttggatttactacattgcagccgttcttgcatgaccttcgctccaggttatgcgtatgttatccatttgtgctgtacgatcttgacc

SEQ ID NO: 204108 - DNA, 954 bp, Zea Mays
aaaaaccatgcttttagtgcctcttgttagtgcgtaccgctatgatggcccagaggtgaacacatctttggctcattctgaagccaaaatacttcatgagaagatccataagaaggcttacagtgatgaggagatcattagaattctcaccacacggagcaaagctcagctacttgcaacattcaatagctacaaggatcagttcactcatgcaatcaacaaggatctgaaagctgaccccaaggatgagtttctttcaacactgcgggcgatcatccggtgcttcacctgccctgacagatacttcgagaaagtcattcgactggctcttggaggcatgggcactgatgaggatgacctcaccagggtcgtaactactcgcgccgaggtcgacctgaagctgataaaggaggcttatcagaagagaaacagtgtgccgctggagcgtgctgtggccaaagatacaactagagattatgaggatattatgcttgccctccttggggcggagtgaggaggcgtgcctcaactcgatctcatctgctcctacttgtttgatggggccaaaaaactgcatcgacgtggtatccacatggccgtggttttgaataataataaatttgtaacacgtagcctgcattagcagcgcgttttaaataaaggaacttcctgatatacttgttatcgtttgactgcgttttcacagaagctgttttgttcgttatggttatcctttcctgatgactgatgggaacatacaaactggatgctgttttgacgttaggcacagctctcttctttttccttgccttttctggttatttacaacagtcgagagcagagcagccagagttcatggtgtactgtattaaactcatgacgagtgaaatattccggtgtgcttgacaagatcaatcaatcttggctactgtattcaactcatgaagagtgaaa

SEQ ID NO: 204109 - DNA, 1994 bp, Zea Mays
gtcattcagcaccaccaccaaccctcatcctctctccccgttccctcgcagccagaacaatagccgcgtccaccgcctgcaacttccggcacgccgcctccccagcttccccgcggttgctccgggcgcttcctttgctcccctcccgcagaggctaggcatggcgtcgctggcggcgtcagcggccgccgcggcggaggtgacgcacctcacgcagcgcgacgcggcggagatcgacgagcagctcatgggcccgctcgggttcagcgtcgaccagctcatggaacttgctggattgagcgttgcggcagcccttgcggaggtttacaagttgaatgaacatgcaagggtacttgttatctgtggcccaggaaataatggtggtgatggtctggtagctgctcgtcatctttatcactttggatataggccatctatttgctacccaaaacgcacacccaaacctctatattctggtctcgttactcagcttgaatcactgtcgatcccattcatacctgtcgaagacctacctaacgaattaccacgggagtttgatgttattgttgatgcaatgtttggtttctcatttcatggaacacccagaccaccctttgatcatcttatccaaatgcttgtttcattgagtgatattcaaaatccagataagcgcccagcaattgtttctattgatatcccttctggatggcatgttgaagagggagatgtcgatggaggcattaaacctgatatgctggtgtcattgactgcacctaagctctgtgcaaaaaagttcactggcccacaccattttcttgggggaaggtttgtccccccacctattttaaacaaatacggacttcagcttcctccttaccctggcacatcaatgtgtgtgagaattggaaaagctccatctgttgaaatttcatctctcagggagaactatatttcccctgaacttcttgagagtcaagtgatgtctgatccatttgatcagttccttaaatggtttgatgaagcagtaacagccggtctgcgtgagcccaatgcaatggctttgacaactgccaacaaggaaggaaaaccttcttcgaggatggttcttttaaagggagttgataaacagggatttgtttggtatacaaattatggtagccggaaggcgcatgacttgtgtgaaaaccctaacgcagcactccttttctactggaatgagatgaaccgtcaggtaagagttgaagggtcagttgagaaggttccagaagctgaatcagataaatatttccacagccgcccacgtggaagtcagcttggtgccatagtcagcaagcagagtactgtaattgctggaagagaagttcttcaacaggattacaagaaattggaacaaaaatattctgatgggagcttgattccaaaacctgaatattggggtggctacaaattgacaccgacactttttgagttctggcaaggacaacagtctcgactgcatgaccggttacaatactcgcagagagaagtagatgggagcacagtgtggcacatcgagaggttgtccccttgactgttagcctgtcaacacttcggtaatagcgttgaggttatcaccagcaaccaaatcttctccagctgcaagatgtgcgaactgccccaagatgttaccgtggtgattagatcccgtgtttgagtaccgcagcccagaagctcagttctgtgcggacacccttttcagtttccacttgggccttccattgtagcggtgggtgaggagagagtgaagtgctttgcaaagtcatcagatctcttttaggcccttgcgtttctcttccgtaaatggtatccatcgaaccaggtttctaaatcctgccgattgtgaacttgtgccgtgatacactagtactgcgggaataatgatcttgggatggcattgtcagcaccgtgctagtaaataaagatgcaatttgatttattcctttggcccagcgtca

SEQ ID NO: 204110 - DNA, 1644 bp, Zea Mays
catgtgtggtccagtatctgttgtgtgccaccaaccacataaagaacctgcacttaccagaaaacagcatggcttggtatgttctacatgtgtataccaactgggatagcattaggctatgtttatggcggactggttggaaaatatctgaactggcgtgctgctttctggggagagtcaatattgatggttccttttgttattcttggttttgtaataaagccactaaacctcaaaggatttgctcacaacacaacaaaagaatatggccagatgcttaatcctgaggttcaagatcagataaataataatgcgacaaagcatgttttgcctggtggaattgaggatctttcagggaaggttccacaaaagttctccttgtccagtttttgccacggtatcatgactgaaattggtcgcttcagcaaagatatgaaagaactactacaagagaaggtttttgtcatcgttgttttaggttatatatcctacaatttcgtcattggtgcttattcctactggggcccaaaggcaggtcaagagatctacaatatggggagtgcagatcttatgtttggtggaattactatagtgtgtggaattattggatcactagcaggaggtttcatccttgacaagatagggtctactattcctaatgccttcaagcttctttcgggtgcgacatttgtaggggcaatattctgctttggtgctttttgtttcaagagcctttatgggttcataccctcctttgcagttggggagctttcagtgttcgcaactcaggcacctgtaaattttgtatgccttcacgccgtgaagccacatttgcggccattggcaatggccgtatccactgtttcaatccatatatttggcgatgtgccttcttcacctcttgttgggcttcttcaggacaaaatcaataattggagggccacagctcttattttgacatccatccttttcgctgctgttgtgttctggttcattggcatatttatccccagcgtcgatcgtttcaatgaagagagcgagcatggccttactgtcgccgagagatcaaatctcaggccgctccttgatgaaaaggacgagccacggacatctgactaaaacctacgcaagtcataaccttttatttcttggcttagtccgtagtttttcccttatgccatcaacatgtgaaatgtaaatttgcatgcccattggctgtacctgtacatatacgaggtttgttcgttttgcgttattcttttacttttttttgtacaggctacagaaacaagcaaaagagtgctagaattcctttttttacgaattaaaacattttagaatttctttttacgaatgtaaaacgtgttcggattgtgacatggcataactttctggttatgcggttatgctctgctcacgggaggctaggtgatgtcactgtatgcctagatggatctgcaactactctttcgtggctactttgagcacctcgaatccccttggggattggagtggattaagagcttgttcgattagttcttaatccatgtggatttgggtattctaattttttttaatctcgtccaatccatgtataacgggaataaccgaacaaggtttaaggtggaaatgaactaatttctt

SEQ ID NO: 204111 - DNA, 1819 bp, Zea Mays
atcagtggatgtgacaagccagtttttgtacagttggagggacgagggtggatgatataatcctttcaggcttattggtgttggcttgttagtgtggactatcgcaacagctggttgtggagtatcatttgatttctggtcaattactatatgccgcatgtttgttggcgttggcgaagcttcatttataagtctcgcagctccattcattgatgacaatgcaccggtagctcagaaaacagcatggcttggtatgttctacatgtgtataccaactgggatagcattaggctatgtttatggcggactggttggaaaatatctgaactggcgtgctgctttctggggagagtcaatattgatggttccttttgttattcttggttttgtaataaagccactaaacctcaaaggatttgctcacaacacaacaaaagaatatggccagatgcttaatcctgaggttcaagatcagataaataataatgcgacaaagcatgttttgcctggtggaattgaggatctttcagggaaggttccacaaaagttctccttgtccagtttttgccacggtatcatgactgaaattggtcgcttcagcaaagatatgaaagaactactacaagagaaggtttttgtcatcgttgttttaggttatatatcctacaatttcgtcattggtgcttattcctactggggcccaaaggcaggtcaagagatctacaatatggggagtgcagatcttatgtttggtggaattactatagtgtgtggaattattggatcactagcaggaggtttcatccttgacaagatagggtctactattcctaatgccttcaagcttctttcgggtgcgacatttgtaggggcaatattctgctttggtgctttttgtttcaagagcctttatgggttcataccctcctttgcagttggggagctttcagtgttcgcaactcaggcacctgtaaattttgtatgccttcacgccgtgaagccacatttgcggccattggcaatggccgtatccactgtttcaatccatatatttggcgatgtgccttcttcacctcttgttgggcttcttcaggacaaaatcaataattggagggccacagctcttattttgacatccatccttttcgctgctgttgtgttctggttcattggcatatttatccccagcgtcgatcgtttcaatgaagagagcgagcatggccttactgtcgccgagagatcaaatctcaggccgctccttgatgaaaaggacgagccacggacatctgactaaaacctacgcaagtcataaccttttatttcttggcttagtccgtagtttttcccttatgccatcaacatgtgaaatgtaaatttgcatgcccattggctgtacctgtacatatacgaggtttgttcgttttgcgttattcttttacttttttttgtacaggctacagaaacaagcaaaagagtgctagaattcctttttttacgaattaaaacattttagaatttctttttacgaatgtaaaacgtgttcggattgtgacatggcataactttctggttatgcggttatgctctgctcacgggaggctaggtgatgtcactgtatgcctagatggatctgcaactactctttcgtggctactttgagcacctcgaatccccttggggattggagtggattaagagcttgttcgattagttcttaatccatgtggatttgggtattctaattttttttaatctcgtccaatccatgtataacgggaataaccgaacaaggtttaaggtggaaatgaactaatttctt

SEQ ID NO: 204112 - DNA, 2053 bp, Zea Mays
cttaatccgaagctaacagccccacggtttactttggcatacgacataaacaattcaattacttgtcatgttctgcattatcaacatgctgaactatattgatcgaggagtaatagcaagtaatggggtcaatggtacccgcaaaagttgttctggtggcacatgcacctcgggctcaggaattcaaggagacttcaatcttaataatcttgaagatggtacactgtcctcagcatttatggttgggttgttggtgtcttcgttgatatttgcaagccttgtaaaaagatataatcctttcaggcttattggtgttggcttgttagtgtggactatcgcaacagctggttgtggagtatcatttgatttctggtcaattactatatgccgcatgtttgttggcgttggcgaagcttcatttataagtctcgcagctccattcattgatgacaatgcaccggtagctcagaaaacagcatggcttggtatgttctacatgtgtataccaactgggatagcattaggctatgtttatggcggactggttggaaaatatctgaactggcgtgctgctttctggggagagtcaatattgatggttccttttgttattcttggttttgtaataaagccactaaacctcaaaggatttgctcacaacacaacaaaagaatatggccagatgcttaatcctgaggttcaagatcagataaataataatgcgacaaagcatgttttgcctggtggaattgaggatctttcagggaaggttccacaaaagttctccttgtccagtttttgccacggtatcatgactgaaattggtcgcttcagcaaagatatgaaagaactactacaagagaaggtttttgtcatcgttgttttaggttatatatcctacaatttcgtcattggtgcttattcctactggggcccaaaggcaggtcaagagatctacaatatggggagtgcagatcttatgtttggtggaattactatagtgtgtggaattattggatcactagcaggaggtttcatccttgacaagatagggtctactattcctaatgccttcaagcttctttcgggtgcgacatttgtaggggcaatattctgctttggtgctttttgtttcaagagcctttatgggttcataccctcctttgcagttggggagctttcagtgttcgcaactcaggcacctgtaaattttgtatgccttcacgccgtgaagccacatttgcggccattggcaatggccgtatccactgtttcaatccatatatttggcgatgtgccttcttcacctcttgttgggcttcttcaggacaaaatcaataattggagggccacagctcttattttgacatccatccttttcgctgctgttgtgttctggttcattggcatatttatccccagcgtcgatcgtttcaatgaagagagcgagcatggccttactgtcgccgagagatcaaatctcaggccgctccttgatgaaaaggacgagccacggacatctgactaaaacctacgcaagtcataaccttttatttcttggcttagtccgtagtttttcccttatgccatcaacatgtgaaatgtaaatttgcatgcccattggctgtacctgtacatatacgaggtttgttcgttttgcgttattcttttacttttttttgtacaggctacagaaacaagcaaaagagtgctagaattcctttttttacgaattaaaacattttagaatttctttttacgaatgtaaaacgtgttcggattgtgacatggcataactttctggttatgcggttatgctctgctcacgggaggctaggtgatgtcactgtatgcctagatggatctgcaactactctttcgtggctactttgagcacctcgaatccccttggggattggagtggattaagagcttgttcgattagttcttaatccatgtggatttgggtattctaattttttttaatctcgtccaatccatgtataacgggaataaccgaacaaggtttaaggtggaaatgaactaatttctt

SEQ ID NO: 204113 - DNA, 2036 bp, Zea Mays
ctcgaatttctacgtttctcctcgttcgctcgctttcgtgattacttgtcatgttctgcattatcaacatgctgaactatattgatcgaggagtaatagcaagtaatggggtcaatggtacccgcaaaagttgttctggtggcacatgcacctcgggctcaggaattcaaggagacttcaatcttaataatcttgaagatggtacactgtcctcagcatttatggttgggttgttggtgtcttcgttgatatttgcaagccttgtaaaaagatataatcctttcaggcttattggtgttggcttgttagtgtggactatcgcaacagctggttgtggagtatcatttgatttctggtcaattactatatgccgcatgtttgttggcgttggcgaagcttcatttataagtctcgcagctccattcattgatgacaatgcaccggtagctcagaaaacagcatggcttggtatgttctacatgtgtataccaactgggatagcattaggctatgtttatggcggactggttggaaaatatctgaactggcgtgctgctttctggggagagtcaatattgatggttccttttgttattcttggttttgtaataaagccactaaacctcaaaggatttgctcacaacacaacaaaagaatatggccagatgcttaatcctgaggttcaagatcagataaataataatgcgacaaagcatgttttgcctggtggaattgaggatctttcagggaaggttccacaaaagttctccttgtccagtttttgccacggtatcatgactgaaattggtcgcttcagcaaagatatgaaagaactactacaagagaaggtttttgtcatcgttgttttaggttatatatcctacaatttcgtcattggtgcttattcctactggggcccaaaggcaggtcaagagatctacaatatggggagtgcagatcttatgtttggtggaattactatagtgtgtggaattattggatcactagcaggaggtttcatccttgacaagatagggtctactattcctaatgccttcaagcttctttcgggtgcgacatttgtaggggcaatattctgctttggtgctttttgtttcaagagcctttatgggttcataccctcctttgcagttggggagctttcagtgttcgcaactcaggcacctgtaaattttgtatgccttcacgccgtgaagccacatttgcggccattggcaatggccgtatccactgtttcaatccatatatttggcgatgtgccttcttcacctcttgttgggcttcttcaggacaaaatcaataattggagggccacagctcttattttgacatccatccttttcgctgctgttgtgttctggttcattggcatatttatccccagcgtcgatcgtttcaatgaagagagcgagcatggccttactgtcgccgagagatcaaatctcaggccgctccttgatgaaaaggacgagccacggacatctgactaaaacctacgcaagtcataaccttttatttcttggcttagtccgtagtttttcccttatgccatcaacatgtgaaatgtaaatttgcatgcccattggctgtacctgtacatatacgaggtttgttcgttttgcgttattcttttacttttttttgtacaggctacagaaacaagcaaaagagtgctagaattcctttttttacgaattaaaacattttagaatttctttttacgaatgtaaaacgtgttcggattgtgacatggcataactttctggttatgcggttatgctctgctcacgggaggctaggtgatgtcactgtatgcctagatggatctgcaactactctttcgtggctactttgagcacctcgaatccccttggggattggagtggattaagagcttgttcgattagttcttaatccatgtggatttgggtattctaattttttttaatctcgtccaatccatgtataacgggaataaccgaacaaggtttaaggtggaaatgaactaatttctt

SEQ ID NO: 204114 - DNA, 2785 bp, Zea Mays
ctcttccctcctccacccacttcacctggcacactagtggccactgcactggtagtagtagcccagtactggcaccgctctagcccagatcaaagctcgggagaagagggagaggaggtagtgcaacataaatcccgagtcccaccaaatcgcaagtcctagcagcttccggtctgcaactgcaacgccgcgggcttgagtgcgagagtgcgcgtgggggatgaggcgggtggcaccggcgatgaccgccgccagcagcgctgctggcggcgaggagacggcggtggtggagaagacgctgctcaacggggacgtctaccgcggcggctcgccgcacgggaagggcaggtacgtgtgggccgacggctgcatgtacgaggggaactggcggcggggcaaggcgtccgggaagggccgcttctcgtggccgtcgggcgccacgttcgaggggcagttccgcaggggccgcatcgacgggcagggcgtgttcgtcggcccagacggcgccacctaccgcggcgcgtgggtggcggaccgtcgccacggcctgggcaacaagacctacgccaacggggactgctacgagggccagtggcgccgcaacctccaggacggccacggccggtacgtctgggccaacggcaaccagtacatcggggagtggcgcgccggggtgctctccggccgcggcgcgcttatctgtgccaatggcagccgctacgacggcgtctgggagaacggcgtgcccaaagggtcaggggtcttcacgtggcccaccggcggctcctggcctgggagctcggtagacctgccggccatgagcgccactttcttcgcgcctcctggtgctgttgctgtgagtaggaggtcttctgtggagggcgtgggggacaaggcgaccccgcggatctgcatatgggagtcggagggcgaggctggagacattacctgcgacatcgtcgacgcgctcgaggcgtctatgcctatgctcttcaaggaagccgcggctatcgcgggtggagcaacttacatgcgatcagccagcggagtcccacgctgggcgtcggcggtggcaaccacgccgcagagtaaacgacccgggcggaccatatccaagcgacacaagaattacgagcttatgctgcagctgcaattaggcatcatgcattccgtggggaagtcttcggctgtgccgatgcgagaactggaacagggagattttgatccaagggaaaatgctttgtcctggacagagttcccaccagagggttcgaaggccacactgccgcattcaactgggtacttctgctggaaggactactgccccatggtgttcaggggattacatgctttcgatctgtggcaatgatcctctgagggagctgtcttcgcctgggaaaagcgggagcttcttttaccttacccaagacgaccaattcatgattaagacagtgaagaaatcagaagtcaagctgctacttaagatgttaaatagctactgcaaacatgtcgatcgatacaagaactcattaatcacgaggttctatggtgtacactgtgtgaagcgccataatggacagaagattcatcgccgttttgatttgaaaggttcatcatatggacgaacagcagacaagtttgaagatgagattgatgagacaactacactcaaggacttggacctcaattttgtcttccggttgcagaaatcttggtacaccgatctccatgaacaattgagacgagactgcgatttcttggaatcagaagggattatggattacagtttcttgataggaattcacttttgtgatgacatctctgcctcaaagatgggatcctctacttttactgcttctccaagtggtggcacaacagagctttgcttctcagatgatgcttttgatatggtacctgattgcagccggaaatctttgattagactgggcgcacacatgccaggccgggcagagcaagcatccagaaggagcgggttcgtattcccaaaccagaccggcgaagtgcacgacgtgattctctttttcgggataattgacatccttcaggattacagcgtcaaaaagcggctcgagcatagttacaagtcattgcagacagaccccaactcgatctctgccgtggaacccaagctctactcgaggaggtttcaagagttcatcggcagaattttcgtggaagatggctaacacgcattgggtacagattaaccggtggagcagcagctcatcggcggctaggtaactaaccgtgaagcctcgggtcagcggtgaaggggatctgagttcgaagcaaacttgccccgaattctctccgaaaaccattcgagtggctggatttttgaagcgcagccatgggatcggatggttttgtctgtaaattatgtgattggttcttccggctacattatagcagcagtttgtttgtcctccttaatttagttggaggtttttttatcttcaccccccccccccccccccccccttccccttctgtatatcggtccgatgtgaagaatcgggcagtgagttttgtttccagaaaggattatttaagggctttatagggtgcatgggattgatggacatataatccatggattatatgatacttacaaggcattatatgtcccttgatcccatccaatctgcatgtaaccaaagtcataaggctgcggcaggcagtgaataataagatcgtgtacagatacaccttgatcctgggaatgggtggattagaattcaattcagcgtcgtcatgacccgtg

SEQ ID NO: 204115 - DNA, 2939 bp, Zea Mays
cctctcgctcctcttccattgtataatcctcttccctcctccacccacttcacctggcacactagtggccactgcactggtagtagtagcccagtactggcaccgctctagcccagatcaaagctcgggagaagagggagaggaggtagtgcaacataaatcccgagtcccaccaaatcgcaagtcctagcagcttccggtctgcaactgcaacgccgcgggcttgagtgcgagagtgcgcgtgggggatgaggcgggtggcaccggcgatgaccgccgccagcagcgctgctggcggcgaggagacggcggtggtggagaagacgctgctcaacggggacgtctaccgcggcggctcgccgcacgggaagggcaggtacgtgtgggccgacggctgcatgtacgaggggaactggcggcggggcaaggcgtccgggaagggccgcttctcgtggccgtcgggcgccacgttcgaggggcagttccgcaggggccgcatcgacgggcagggcgtgttcgtcggcccagacggcgccacctaccgcggcgcgtgggtggcggaccgtcgccacggcctgggcaacaagacctacgccaacggggactgctacgagggccagtggcgccgcaacctccaggacggccacggccggtacgtctgggccaacggcaaccagtacatcggggagtggcgcgccggggtgctctccggccgcggcgcgcttatctgtgccaatggcagccgctacgacggcgtctgggagaacggcgtgcccaaagggtcaggggtcttcacgtggcccaccggcggctcctggcctgggagctcggtagacctgccggccatgagcgccactttcttcgcgcctcctggtgctgttgctgtgagtaggaggtcttctgtggagggcgtgggggacaaggcgaccccgcggatctgcatatgggagtcggagggcgaggctggagacattacctgcgacatcgtcgacgcgctcgaggcgtctatgcctatgctcttcaaggaagccgcggctatcgcgggtggagcaacttacatgcgatcagccagcggagtcccacgctgggcgtcggcggtggcaaccacgccgcagagtaaacgacccgggcggaccatatccaagcgacacaagaattacgagcttatgctgcagctgcaattaggcatcatgtgaggttttggtagctccgtgttctcacaatgtggtctggtttttggagaggatgtgcaaatggaggttttattatggttctgcatcctgcaggcattccgtggggaagtcttcggctgtgccgatgcgagaactggaacagggagattttgatccaagggaaaatgctttgtcctggacagagttcccaccagagggttcgaaggccacactgccgcattcaactgggtacttctgctggaaggactactgccccatggtgttcaggcatttgaggaagttgtttgctgtggatacaggggattacatgctttcgatctgtggcaatgatcctctgagggagctgtcttcgcctgggaaaagcgggagcttcttttaccttacccaagacgaccaattcatgattaagacagtgaagaaatcagaagtcaagctgctacttaagatgttaaatagctactgcaaacatgtcgatcgatacaagaactcattaatcacgaggttctatggtgtacactgtgtgaagcgccataatggacagaagattcatcgccgttttgatttgaaaggttcatcatatggacgaacagcagacaagtttgaagatgagattgatgagacaactacactcaaggacttggacctcaattttgtcttccggttgcagaaatcttggtacaccgatctccatgaacaattgagacgagactgcgatttcttggaatcagaagggattatggattacagtttcttgataggaattcacttttgtgatgacatctctgcctcaaagatgggatcctctacttttactgcttctccaagtggtggcacaacagagctttgcttctcagatgatgcttttgatatggtacctgattgcagccggaaatctttgattagactgggcgcacacatgccaggccgggcagagcaagcatccagaaggagcgggttcgtattcccaaaccagaccggcgaagtgcacgacgtgattctctttttcgggataattgacatccttcaggattacagcgtcaaaaagcggctcgagcatagttacaagtcattgcagacagaccccaactcgatctctgccgtggaacccaagctctactcgaggaggtttcaagagttcatcggcagaattttcgtggaagatggctaacacgcattgggtacagattaaccggtggagcagcagctcatcggcggctaggtaactaaccgtgaagcctcgggtcagcggtgaaggggatctgagttcgaagcaaacttgccccgaattctctccgaaaaccattcgagtggctggatttttgaagcgcagccatgggatcggatggttttgtctgtaaattatgtgattggttcttccggctacattatagcagcagtttgtttgtcctccttaatttagttggaggtttttttatcttcaccccccccccccccccccccccttccccttctgtatatcggtccgatgtgaagaatcgggcagtgagttttgtttccagaaaggattatttaagggctttatagggtgcatgggattgatggacatataatccatggattatatgatacttacaaggcattatatgtcccttgatcccatccaatctgcatgtaaccaaagtcataaggctgcggcaggcagtgaataataagatcgtgtacagatacaccttgatcctgggaatgggtggattagaattcaattcagcgtcgtcatgacccgtg

SEQ ID NO: 204116 - DNA, 2899 bp, Zea Mays
ctgatcttagcgagatgttgttgggacagctaggtaaaagccacccccctcgggcctcggcctctcgctcctcttccattgtataatcctcttccctcctccacccacttcacctggcacactagtggccactgcactggtagtagtagcccagtactggcaccgctctagcccagatcaaagctcgggagaagagggagaggaggtagtgcaacataaatcccgagtcccaccaaatcgcaagtcctagcagcttccggtctgcaactgcaacgccgcgggcttgagtgcgagagtgcgcgtgggggatgaggcgggtggcaccggcgatgaccgccgccagcagcgctgctggcggcgaggagacggcggtggtggagaagacgctgctcaacggggacgtctaccgcggcggctcgccgcacgggaagggcaggtacgtgtgggccgacggctgcatgtacgaggggaactggcggcggggcaaggcgtccgggaagggccgcttctcgtggccgtcgggcgccacgttcgaggggcagttccgcaggggccgcatcgacgggcagggcgtgttcgtcggcccagacggcgccacctaccgcggcgcgtgggtggcggaccgtcgccacggcctgggcaacaagacctacgccaacggggactgctacgagggccagtggcgccgcaacctccaggacggccacggccggtacgtctgggccaacggcaaccagtacatcggggagtggcgcgccggggtgctctccggccgcggcgcgcttatctgtgccaatggcagccgctacgacggcgtctgggagaacggcgtgcccaaagggtcaggggtcttcacgtggcccaccggcggctcctggcctgggagctcggtagacctgccggccatgagcgccactttcttcgcgcctcctggtgctgttgctgtgagtaggaggtcttctgtggagggcgtgggggacaaggcgaccccgcggatctgcatatgggagtcggagggcgaggctggagacattacctgcgacatcgtcgacgcgctcgaggcgtctatgcctatgctcttcaaggaagccgcggctatcgcgggtggagcaacttacatgcgatcagccagcggagtcccacgctgggcgtcggcggtggcaaccacgccgcagagtaaacgacccgggcggaccatatccaagcgacacaagaattacgagcttatgctgcagctgcaattaggcatcatgcattccgtggggaagtcttcggctgtgccgatgcgagaactggaacagggagattttgatccaagggaaaatgctttgtcctggacagagttcccaccagagggttcgaaggccacactgccgcattcaactgggtacttctgctggaaggactactgccccatggtgttcaggcatttgaggaagttgtttgctgtggatacaggggattacatgctttcgatctgtggcaatgatcctctgagggagctgtcttcgcctgggaaaagcgggagcttcttttaccttacccaagacgaccaattcatgattaagacagtgaagaaatcagaagtcaagctgctacttaagatgttaaatagctactgcaaacatgtcgatcgatacaagaactcattaatcacgaggttctatggtgtacactgtgtgaagcgccataatggacagaaggtccgattcattgtcatgggtaatctgttctgttctgaataccagattcatcgccgttttgatttgaaaggttcatcatatggacgaacagcagacaagtttgaagatgagattgatgagacaactacactcaaggacttggacctcaattttgtcttccggttgcagaaatcttggtacaccgatctccatgaacaattgagacgagactgcgatttcttggaatcagaagggattatggattacagtttcttgataggaattcacttttgtgatgacatctctgcctcaaagatgggatcctctacttttactgcttctccaaagcgtttaatcaagagtgaatcatttcaaggtggtggcacaacagagctttgcttctcagatgatgcttttgatatggtacctgattgcagccggaaatctttgattagactgggcgcacacatgccaggccgggcagagcaagcatccagaaggagcggcgtcaaaaagcggctcgagcatagttacaagtcattgcagacagaccccaactcgatctctgccgtggaacccaagctctactcgaggaggtttcaagagttcatcggcagaattttcgtggaagatggctaacacgcattgggtacagattaaccggtggagcagcagctcatcggcggctaggtaactaaccgtgaagcctcgggtcagcggtgaaggggatctgagttcgaagcaaacttgccccgaattctctccgaaaaccattcgagtggctggatttttgaagcgcagccatgggatcggatggttttgtctgtaaattatgtgattggttcttccggctacattatagcagcagtttgtttgtcctccttaatttagttggaggtttttttatcttcaccccccccccccccccccccccttccccttctgtatatcggtccgatgtgaagaatcgggcagtgagttttgtttccagaaaggattatttaagggctttatagggtgcatgggattgatggacatataatccatggattatatgatacttacaaggcattatatgtcccttgatcccatccaatctgcatgtaaccaaagtcataaggctgcggcaggcagtgaataataagatcgtgtacagatacaccttgatcctgggaatgggtggattagaattcaattcagcgtcgtcatgacccgtg

SEQ ID NO: 204117 - DNA, 2869 bp, Zea Mays
ctgatcttagcgagatgttgttgggacagctaggtaaaagccacccccctcgggcctcggcctctcgctcctcttccattgtataatcctcttccctcctccacccacttcacctggcacactagtggccactgcactggtagtagtagcccagtactggcaccgctctagcccagatcaaagctcgggagaagagggagaggaggtagtgcaacataaatcccgagtcccaccaaatcgcaagtcctagcagcttccggtctgcaactgcaacgccgcgggcttgagtgcgagagtgcgcgtgggggatgaggcgggtggcaccggcgatgaccgccgccagcagcgctgctggcggcgaggagacggcggtggtggagaagacgctgctcaacggggacgtctaccgcggcggctcgccgcacgggaagggcaggtacgtgtgggccgacggctgcatgtacgaggggaactggcggcggggcaaggcgtccgggaagggccgcttctcgtggccgtcgggcgccacgttcgaggggcagttccgcaggggccgcatcgacgggcagggcgtgttcgtcggcccagacggcgccacctaccgcggcgcgtgggtggcggaccgtcgccacggcctgggcaacaagacctacgccaacggggactgctacgagggccagtggcgccgcaacctccaggacggccacggccggtacgtctgggccaacggcaaccagtacatcggggagtggcgcgccggggtgctctccggccgcggcgcgcttatctgtgccaatggcagccgctacgacggcgtctgggagaacggcgtgcccaaagggtcaggggtcttcacgtggcccaccggcggctcctggcctgggagctcggtagacctgccggccatgagcgccactttcttcgcgcctcctggtgctgttgctgtgagtaggaggtcttctgtggagggcgtgggggacaaggcgaccccgcggatctgcatatgggagtcggagggcgaggctggagacattacctgcgacatcgtcgacgcgctcgaggcgtctatgcctatgctcttcaaggaagccgcggctatcgcgggtggagcaacttacatgcgatcagccagcggagtcccacgctgggcgtcggcggtggcaaccacgccgcagagtaaacgacccgggcggaccatatccaagcgacacaagaattacgagcttatgctgcagctgcaattaggcatcatgcattccgtggggaagtcttcggctgtgccgatgcgagaactggaacagggagattttgatccaagggaaaatgctttgtcctggacagagttcccaccagagggttcgaaggccacactgccgcattcaactgggtacttctgctggaaggactactgccccatggtgttcaggcatttgaggaagttgtttgctgtggatacaggggattacatgctttcgatctgtggcaatgatcctctgagggagctgtcttcgcctgggaaaagcgggagcttcttttaccttacccaagacgaccaattcatgattaagacagtgaagaaatcagaagtcaagctgctacttaagatgttaaatagctactgcaaacatgtcgatcgatacaagaactcattaatcacgaggttctatggtgtacactgtgtgaagcgccataatggacagaaggtccgattcattgtcatgggtaatctgttctgttctgaataccagattcatcgccgttttgatttgaaaggttcatcatatggacgaacagcagacaagtttgaagatgagattgatgagacaactacactcaaggacttggacctcaattttgtcttccggttgcagaaatcttggtacaccgatctccatgaacaattgagacgagactgcgatttcttggaatcagaagggattatggattacagtttcttgataggaattcacttttgtgatgacatctctgcctcaaagatgggatcctctacttttactgcttctccaagtggtggcacaacagagctttgcttctcagatgatgcttttgatatggtacctgattgcagccggaaatctttgattagactgggcgcacacatgccaggccgggcagagcaagcatccagaaggagcggcgtcaaaaagcggctcgagcatagttacaagtcattgcagacagaccccaactcgatctctgccgtggaacccaagctctactcgaggaggtttcaagagttcatcggcagaattttcgtggaagatggctaacacgcattgggtacagattaaccggtggagcagcagctcatcggcggctaggtaactaaccgtgaagcctcgggtcagcggtgaaggggatctgagttcgaagcaaacttgccccgaattctctccgaaaaccattcgagtggctggatttttgaagcgcagccatgggatcggatggttttgtctgtaaattatgtgattggttcttccggctacattatagcagcagtttgtttgtcctccttaatttagttggaggtttttttatcttcaccccccccccccccccccccccttccccttctgtatatcggtccgatgtgaagaatcgggcagtgagttttgtttccagaaaggattatttaagggctttatagggtgcatgggattgatggacatataatccatggattatatgatacttacaaggcattatatgtcccttgatcccatccaatctgcatgtaaccaaagtcataaggctgcggcaggcagtgaataataagatcgtgtacagatacaccttgatcctgggaatgggtggattagaattcaattcagcgtcgtcatgacccgtg

SEQ ID NO: 204118 - DNA, 398 bp, Zea Mays
atcctgtcatcatcagtttcactcctctggctgctccttgtgtgtgtgtgtccactaatgcgttcagcattgcaactgctgctgccaaatgctgagcattcgttgccaacatagatggtcactctgataaactgtcaccttcaatgggaggatgctcaggttttgagaccgaacctatatgtaccaccaaaacaatatcctaattgcaagcatttcgatggatgcaaagcagacttggttgtttgcgatggaggcttcggataaaatttggtggctggtggatctgcttaagaatcaaaagtcagacaaggtggacatcaccatccaaccggaggagtaggaagccatgaatgatgttctagcagccaggtgacgcctgatgtctttgttcagttgat

SEQ ID NO: 204119 - DNA, 652 bp, Zea Mays
gttatattatctctctatattttgaatgggagtcattgaagcctaggcaaggtacttgtatttggatctggcataattacaatcatcctgtcatcatcagtttcactcctctggctgctccttgtgtgtgtgtgtccactaatgcgttcagcattgcaactgctgctgccaaatgctgagcattcgttgccaacatagatggtcactctgataaactgtcaccttcaatgggaggatgctcaggttttgagaccgaacctatatgtaccaccaaaacaatatcctaattgcaaggaaggtgaccttcctctcatcatcgcgattgactagcaaccaatgaccctgataggtgttatgcaagtgtagggcgacatcactaatgctcggacaacggatgtggcatttcgatggatgcaaagcagacttggttgtttgcgatggaggcttcggatagtaagatatcatatgagtgcaagagaactactcccaccattaactataacaaattttgtcaccaaaatttggtggctggtggatctgcttaagaatcaaaagtcagacaaggtggacatcaccatccaaccggaggagtaggaagccatgaatgatgttctagcagccaggtgacgcctgatgtctttgttcagttgat

SEQ ID NO: 204120 - DNA, 844 bp, Zea Mays
gcgccccggccctcctgtcgcccttgctgtctcgggagtcggggccccgtaaaaaaggcaaactcgaccccgcgaccgcttcctctgctcctcttcctcctctcctctcgcatccgcagcttccccagccagctagggtttgcagatgacgaccgcggcgcgccccacctgggcgccggccaagggcggcaacgagcaggggggcacccgcatcttcggcccctcccagaagttctcctcccgcgacctcgccgcgcacacctccctcaagccaagagaaaagacggtcaacagacccaagaggagttacagaagaggaatctcagggaggaacttgaggaacgtgagcgcaagcactactcttccaaggataagtcctatgccgaagaaagagaccggcggaaaagctctagccatctactcttagaaggttcaaagagagagacagaggataagatagttccacgagaaatcgatgctgatgactccgatgtggagcctaaaagcgatgacgagagcgatgaagatgatgatgacgacgacactgaagctctaatggcagagcttgagaggattaagaaagaaagagccgaggagaagcttagaaaggagcggcaacaagcagaagaggaggccaagatgaaggaggctgaactgatgcggggaaacccgttgattaatatcaacaatgctggctccttcagtgttaagagaaggtgggacgacgacgtggtattcaagaatcaagcacgaggagagaccaagacaccgaaacggttcatcaacgacaccatcaggagtgatttccaccgtaaatttcttcagaggtacatgaaggtgggtg

SEQ ID NO: 204121 - DNA, 2032 bp, Zea Mays
atggcaaaattgcaaatggctcctattctgtgaccgaaatttcacaccaggcgctgcaagcgactgcaatggctatgtaccagcgctccaagcgggcagccgggaactagctcatcagtcattactgacggcgtaatcttcatccgagtggtcagtggcgtctacagtcgcagcagcttgtgcgcgcatggctagcaacatgtacggcaccacggtggcctgtaggatgtgctacagagaccagtacaggccgccgccgcgcgacttcacttgcgaggccaggaaatcggaggccaggaggtggggaaacgggtaccacctcatccccaggctctgccagtggaagcccagaggcagcaagtctgatggctcactgctcggcgacggccacggtggccgcgatgctcgctgccactcttgtggttcccataacagctgcgagtgcgaaactagagactgcgatgctatggaagatgctgctgcgagctcttaccgagatttcaagcaacattcaaggggaaatcctcaattttcagatgatcaagtttcatcgaagaataagtcagcctatgctagtcaagggttggctgaagcctgcaaatttgtttacaatgatgctaagtttgtaaatgaaagggctcaaaatgacattctattactttcacgtggcataacaaggctgaacaaacgcgcatgccaggatgctgctgttttgggcctggggtttctcaaacttgatgctcgtgcacggaaggatactcaaaagattgaccacacagtgaaggagagagcagcgcttcttaaccattttgccagagcatttaaggagcgagctcagtcagacttgaagaaagctgcagacaaacattggagtgatggtgccttggaggcagacctgcgacgagctgacttggttgttaaacgacgtgccatggaagacgctttcatggcattgaagtttgttcaggatatccatgacatgatggtgaacagattatatgagcagcttccgaaggacggttcatcttctcgtacaaattcaacagggtttattacgcttgagaagaacgggaaggctcttgaactgtttcctggtgaagtttctgctgatcagatttatgccatagaggaagcataccagagtatggcatctgccttttctgaagctgatggtattgactacacagatcctgaggagcttgaattgttggtagcaactctaattgacctggatgccatggatgggaaaaggagtgtttccttgattgctgaatgttcaagctctccagatgttaatactaggaaagccctagctaatgcattggctacagctccatctatgtggactcttgggaatgctggcatgggtgcattgcagaggctggctcaagatcccaactacgccgtagctagggctgcatcaagagccattgatgaactcaagaagcagtgggaacttgaagaaggtgacagtctgaggtttgtgatgaaccagaatctggcctccagggatactgaggatgacaattcaccagcggatgatgccgcatgagtcataaacaagatgaaagattccagtttcagtggcaatggatcaaagcacaaggaaccaccatgggcagcacataagcattcccattttacgtttaggactgaaaatcagatagatgtgttctagttgaggggggggggggggggggggatgtgttctggaacttgggtaaatgggggaattatgaaaacagtgtaaatagaagtctgctccctttggatattgttcatgcatgaagcaaaatgttatatctgaaaagcgcgtaccttgtaccagagtatctagtcttaggtgctccttgtttttatatatagtactgtaatatggcaaaaattatgtatctggataacacatgtagcttggttttgtcggcactgcatattgaggattgagtatgacttgtaccagcaattaataagtacctttattcgggtaacaattgcacacaggaacatggatccgttataggatggttcttgg

SEQ ID NO: 204122 - DNA, 1220 bp, Zea Mays
gtatgtatctgcatttaaggagcgagctcagtcagacttgaagaaagctgcagacaaacattggagtgatggtgccttggaggcagacctgcgacgagctgacttggttgttaaacgacgtgccatggaagacgctttcatggcattgaagtttgttcaggatatccatgacatgatggtgaacagattatatgagcagcttccgaaggacggttcatcttctcgtacaaattcaacagggtttattacgcttgagaagaacgggaaggctcttgaactgtttcctggtgaagtttctgctgatcagatttatgccatagaggaagcataccagagtatggcatctgccttttctgaagctgatggtattgactacacagatcctgaggagcttgaattgttggtagcaactctaattgacctggatgccatggatgggaaaaggagtgtttccttgattgctgaatgttcaagctctccagatgttaatactagccctagctaatgcattggctacagctccatctatgtggactcttgggaatgctggcatgggtgcattgcagaggctggctcaagatcccaactacgccgtagctagggctgcatcaagagccattgatgaactcaagaagcagtgggaacttgaagaaggtgacagtctgaggtttgtgatgaaccagaatctggcctccagggatactgaggatgacaattcaccagcggatgatgccgcatgagtcataaacaagatgaaagattccagtttcagtggcaatggatcaaagcacaaggaaccaccatgggcagcacataagcattcccattttacgtttaggactgaaaatcagatagatgtgttctagttgaggggggggggggggggggggatgtgttctggaacttgggtaaatgggggaattatgaaaacagtgtaaatagaagtctgctccctttggatattgttcatgcatgaagcaaaatgttatatctgaaaagcgcgtaccttgtaccagagtatctagtcttaggtgctccttgtttttatatatagtactgtaatatggcaaaaattatgtatctggataacacatgtagcttggttttgtcggcactgcatattgaggattgagtatgacttgtaccagcaattaataagtacctttattcgggtaacaattgcacacaggaacatggatccgttataggatggttcttgg

SEQ ID NO: 204123 - DNA, 1109 bp, Zea Mays
cacaccagaagttattcaacgcaacatgccaacatcgaagtttgttcaggatatccatgacatgatggtgaacagattatatgagcagcttccgaaggacggttcatcttctcgtacaaattcaacagggtttattacgcttgagaagaacgggaaggctcttgaactgtttcctggtgaagtttctgctgatcagatttatgccatagaggaagcataccagagtatggcatctgccttttctgaagctgatggtattgactacacagatcctgaggagcttgaattgttggtagcaactctaattgacctggatgccatggatgggaaaaggagtgtttccttgattgctgaatgttcaagctctccagatgttaatactagccctagctaatgcattggctacagctccatctatgtggactcttgggaatgctggcatgggtgcattgcagaggctggctcaagatcccaactacgccgtagctagggctgcatcaagagccattgatgaactcaagaagcagtgggaacttgaagaaggtgacagtctgaggtttgtgatgaaccagaatctggcctccagggatactgaggatgacaattcaccagcggatgatgccgcatgagtcataaacaagatgaaagattccagtttcagtggcaatggatcaaagcacaaggaaccaccatgggcagcacataagcattcccattttacgtttaggactgaaaatcagatagatgtgttctagttgaggggggggggggggggggggatgtgttctggaacttgggtaaatgggggaattatgaaaacagtgtaaatagaagtctgctccctttggatattgttcatgcatgaagcaaaatgttatatctgaaaagcgcgtaccttgtaccagagtatctagtcttaggtgctccttgtttttatatatagtactgtaatatggcaaaaattatgtatctggataacacatgtagcttggttttgtcggcactgcatattgaggattgagtatgacttgtaccagcaattaataagtacctttattcgggtaacaattgcacacaggaacatggatccgttataggatggttcttgg

SEQ ID NO: 204124 - DNA, 1091 bp, Zea Mays
ttattcaacgcaacatgccaacatcgaagtttgttcaggatatccatgacatgatggtgaacagattatatgagcagcttccgaaggacggttcatcttctcgtacaaattcaacagggtttattacgcttgagaagaacgggaaggctcttgaactgtttcctggtgaagtttctgctgatcagatttatgccatagagagtatggcatctgccttttctgaagctgatggtattgactacacagatcctgaggagcttgaattgttggtagcaactctaattgacctggatgccatggatgggaaaaggagtgtttccttgattgctgaatgttcaagctctccagatgttaatactaggaaagccctagctaatgcattggctacagctccatctatgtggactcttgggaatgctggcatgggtgcattgcagaggctggctcaagatcccaactacgccgtagctagggctgcatcaagagccattgatgaactcaagaagcagtgggaacttgaagaaggtgacagtctgaggtttgtgatgaaccagaatctggcctccagggatactgaggatgacaattcaccagcggatgatgccgcatgagtcataaacaagatgaaagattccagtttcagtggcaatggatcaaagcacaaggaaccaccatgggcagcacataagcattcccattttacgtttaggactgaaaatcagatagatgtgttctagttgaggggggggggggggggggggatgtgttctggaacttgggtaaatgggggaattatgaaaacagtgtaaatagaagtctgctccctttggatattgttcatgcatgaagcaaaatgttatatctgaaaagcgcgtaccttgtaccagagtatctagtcttaggtgctccttgtttttatatatagtactgtaatatggcaaaaattatgtatctggataacacatgtagcttggttttgtcggcactgcatattgaggattgagtatgacttgtaccagcaattaataagtacctttattcgggtaacaattgcacacaggaacatggatccgttataggatggttcttgg

SEQ ID NO: 204125 - DNA, 1545 bp, Zea Mays
ctcatggtgtgcgacaccatgacacgcagatgacaggaaggcggcaggcggggtgcttcatttggcccattgaatctggtgtacagccagggcctagggagaacccaatgcaatgctttatcatgcggaataagaactctacattctacctctaccttggcttcacaagttcacctgtgtataaagggaagtttctcatggctgctagaagattaaggcgtggtccccatactgagtacattatatctcttgatgcagaggacttatcacaagggagcaattcatacatgggaaaactgagatctgatttctgggggacaaacttcaaaatatatgatagcaagccaccatatgacggcgctaaagcatcaagtagtcgatctagtcgtcgtttcggaagcagaaggattagtccccaagtatcgtctggtaactatgaagttggacaggtttcatacaaatacaacttgctcaaatccagaggccccaggagaatgaattgcactcttgaatgcccttcagcgcaagagacctgggaaaactcactcaagacaaagttcaggaggcccttgggtcccacaactttacgaaacaaagcgccccgctggcatgagcagctgcagtgctggtgcttaaacttccatgggcgggtaacagttgcatcggtcaagaatttccagcttgtgactgctgccggccccagtgaccctactagcaacgtggacgaggaaacggttctgctgcagtttggtaaggtcgacgatgatattttcacaatggattaccggcaaccgctctctgcgttccaagcttttgccatcagccttagcagctttgggaacaagctagcctgtgaatagcgatacggttcgatgctcgtcgcgtggctatatggtttgcggtggtgggtgcttgctcgccgttgttacaatgtgatctgttctttttttttagttgagtatcgacgtactatttgtaccatgctgttgtacaagagatgcactatactgcattactgctgtcttgtcaaaaggacttgttcaagaaggaaatactgtgtcataaactttttgctctgattccatgcaaaaggcattccggtgctcatatatgctcatggtgaagtgatattttccccttcttgataaatattatttttgttttgtttgggtaactactgctactagtgctgggatgctgagcgcatcttagggaaatcttcttatgatttcactagtatagtgaccgtgcgttgctacggcatgtcaattatttgataaaatgttagttcacaacgattacaatgttttgtgacaatatgttaggatgaaaacagacaatttacattgacaatactttcttaaacatggagttggataggtagagggagactggtattgcagccaagaagcaagaaaataagaaaagagaggcaaaagtagccacctactgtttgtcccccaacaaatacaagcgtgaagtatggagaagtcgttgaatgtaacataaagagcagaacaaaaacatgcagaattatcatccatc

SEQ ID NO: 204126 - DNA, 1572 bp, Zea Mays
tatcattgcagtagcaatatggaaaagaaaacaggtcactggatgtccgtcataaaggtccaaatctgacgtactttgggcacaacaatctgtctcagaatttgcttttggagccagggcctagggagaacccaatgcaatgctttatcatgcggaataagaactctacattctacctctaccttggcttcacaagttcacctgtgtataaagggaagtttctcatggctgctagaagattaaggcgtggtccccatactgagtacattatatctcttgatgcagaggacttatcacaagggagcaattcatacatgggaaaactgagatctgatttctgggggacaaacttcaaaatatatgatagcaagccaccatatgacggcgctaaagcatcaagtagtcgatctagtcgtcgtttcggaagcagaaggattagtccccaagtatcgtctggtaactatgaagttggacaggtttcatacaaatacaacttgctcaaatccagaggccccaggagaatgaattgcactcttgaatgcccttcagcgcaagagacctgggaaaactcactcaagacaaagttcaggaggcccttgggtcccacaactttacgaaacaaagcgccccgctggcatgagcagctgcagtgctggtgcttaaacttccatgggcgggtaacagttgcatcggtcaagaatttccagcttgtgactgctgccggccccagtgaccctactagcaacgtggacgaggaaacggttctgctgcagtttggtaaggtcgacgatgatattttcacaatggattaccggcaaccgctctctgcgttccaagcttttgccatcagccttagcagctttgggaacaagctagcctgtgaatagcgatacggttcgatgctcgtcgcgtggctatatggtttgcggtggtgggtgcttgctcgccgttgttacaatgtgatctgttctttttttttagttgagtatcgacgtactatttgtaccatgctgttgtacaagagatgcactatactgcattactgctgtcttgtcaaaaggacttgttcaagaaggaaatactgtgtcataaactttttgctctgattccatgcaaaaggcattccggtgctcatatatgctcatggtgaagtgatattttccccttcttgataaatattatttttgttttgtttgggtaactactgctactagtgctgggatgctgagcgcatcttagggaaatcttcttatgatttcactagtatagtgaccgtgcgttgctacggcatgtcaattatttgataaaatgttagttcacaacgattacaatgttttgtgacaatatgttaggatgaaaacagacaatttacattgacaatactttcttaaacatggagttggataggtagagggagactggtattgcagccaagaagcaagaaaataagaaaagagaggcaaaagtagccacctactgtttgtcccccaacaaatacaagcgtgaagtatggagaagtcgttgaatgtaacataaagagcagaacaaaaacatgcagaattatcatccatc

SEQ ID NO: 204127 - DNA, 1356 bp, Zea Mays
atgtccgtcataaaggtccaaatctgacgtactttgggcacaacaatctgtctcagaatttgcttttggaggacttatcacaagggagcaattcatacatgggaaaactgagatctgatttctgggggacaaacttcaaaatatatgatagcaagccaccatatgacggcgctaaagcatcaagtagtcgatctagtcgtcgtttcggaagcagaaggattagtccccaagtatcgtctggtaactatgaagttggacaggtttcatacaaatacaacttgctcaaatccagaggccccaggagaatgaattgcactcttgaatgcccttcagcgcaagagacctgggaaaactcactcaagacaaagttcaggaggcccttgggtcccacaactttacgaaacaaagcgccccgctggcatgagcagctgcagtgctggtgcttaaacttccatgggcgggtaacagttgcatcggtcaagaatttccagcttgtgactgctgccggccccagtgaccctactagcaacgtggacgaggaaacggttctgctgcagtttggtaaggtcgacgatgatattttcacaatggattaccggcaaccgctctctgcgttccaagcttttgccatcagccttagcagctttgggaacaagctagcctgtgaatagcgatacggttcgatgctcgtcgcgtggctatatggtttgcggtggtgggtgcttgctcgccgttgttacaatgtgatctgttctttttttttagttgagtatcgacgtactatttgtaccatgctgttgtacaagagatgcactatactgcattactgctgtcttgtcaaaaggacttgttcaagaaggaaatactgtgtcataaactttttgctctgattccatgcaaaaggcattccggtgctcatatatgctcatggtgaagtgatattttccccttcttgataaatattatttttgttttgtttgggtaactactgctactagtgctgggatgctgagcgcatcttagggaaatcttcttatgatttcactagtatagtgaccgtgcgttgctacggcatgtcaattatttgataaaatgttagttcacaacgattacaatgttttgtgacaatatgttaggatgaaaacagacaatttacattgacaatactttcttaaacatggagttggataggtagagggagactggtattgcagccaagaagcaagaaaataagaaaagagaggcaaaagtagccacctactgtttgtcccccaacaaatacaagcgtgaagtatggagaagtcgttgaatgtaacataaagagcagaacaaaaacatgcagaattatcatccatc

SEQ ID NO: 204128 - DNA, 574 bp, Zea Mays
cagaaacttagatagtctctgttgtctgttctaactaaagcaagaggcacacccacatgacacttcattacagtttaggttccgtggtttcttttggaaggctgctaggataggtgaacgccttagcccctgggtagccattgggtgctctgtgatgggcatatcaattttattttggtgaaattggaagatttgtatggccttctttgcttacgattactccattaagagaagcatcagaattttgcagttacagtctgattcttcgagatgtcgcatgcttgtaatcttgtagctgtggtgtattattgtgctatgttatgcattttgactattgggcaccatcatgttatgttgttttattgtatttcaattatccggtttttatatatcatataaataggtatttgagattattatttaaatataattattgtttatttctaaacactgtacgtgtggtctgttggttaactctaaatttctgaagcaagggttgtaggtttgagtactcactttgcagtatttttatatataattattgtttatttctaaatattaagctagcttagag

SEQ ID NO: 204129 - DNA, 1062 bp, Zea Mays
tgttgctattgcactgccactgctttttgttgagacaggaattgaactaggaaacaacttctctgaagtcatagctcctcaagacgtggcagtctatggtgccctttgtgcacttgcttcttttgaccgttcagacctgaaggtttgccatttcagtacttatttgtcttgtggaatgtgttccattttatgccactgttctcgaaatgtgattgcttgcgcattttgcatagagcaaagtcattgacaatatcaacttccgtaactttctggagctggtgcctgaagtaagggagctggttaatgatttttatgcaagtcgctatggatcttgcttgggtcatcttgagaagctaaagcctaacctgctcctggatatccatttgcatcagcatgtagagactctgtatatggagattcgccacaaagcgatcatacagtacacacttccttttatatctgttgacctcaacacgatggcagccgcctttaagacttcggtctccatgctgcagaaggagctggccgcactgattactgaggacaaaatacaggcccggatagactcccacaacaagatcctttacgcaaggcatgctgaccagagaaatgcaactttccagcgtgtccttcaaaccggcaatgactttgagagagatgtcaagtccatgcttctgcgtgccaacctcctcaagcatgattacattcagaagacaagcggaccaaggaagatgtaaagattgcgggcgtcgctgctaggcaaggcttcctgctgcatgcctctccacttttttttttgaagaattgttctgtgacataaaagggaccgaagtctgtctaaatgccctccccctctttctttttattggttgatgaaagttattgtcgaagtaatgtatggttgagcatctggatgtgattatttgtcatgctcgttttctaggcaagatttagttttgaacttgccgggtacctaggaaaggggtacccaaggcgaggcccataaacctctctctggcctatttaccgaccaagttcttgtcgagcaagtcttcgaggcgg

SEQ ID NO: 204130 - DNA, 916 bp, Zea Mays
ctcacgcttcacaaggagagagaaaggcgtagcacacagccacacagcacgtagcagctgatccgcccggccgggagcgcaggcaaaggatggagcaatacgacggactctttccttccgcctacgcggactcctcctcatccctcctgatgcccaacggcagcaaggcgcagggggagaggccgagagcgcggcgcaggaggcgtcgagcagcgtggtgcggcggcggcgagctggacgggggaggggaccccaagaagcggcggctgagcgacgagcaggcagagatgctggagctgagcttccgggaggagcggaagctggagacgggccggaaggtgcacctggccgccgagctcgggctcgaccccaagcaggtcgccgtctggttccagaaccgccgcgcccgccacaagagcaagctgctcgaggaggagttcgccaagctcaagcaggcacacgacgccaccatcctccacaaatgccaccttgagaacgagttgatgagggtgaaggacagactggtgctcgccgaggaggagctggcgcgcttccgatccgtggggagccacgccatctccggcgatggcggagacgccatgatgggtcgtgccgtctgcagcgggagcccgagctcatcgttctcgacaggcacctgccagcagccgggggacgacgacctgctctactttcctgactatgcctacgctgacaacagcgtggtcgacgagtggtttcgcatgtatggactgatgtaagccaagtgatcagtgatgatggatggtatgccattgatgttctatttgtgctgaactgcttattaatcatatgtacataaatcaagttattagtggtaaaatatagccagctagcagcaattagtacttgaattcagatgtgtgctagtactactgcg

SEQ ID NO: 204131 - DNA, 928 bp, Zea Mays
gttcaccaatggcggcaatctctcccctgcgtcgtgtgtggatggttctaggaagtgtcaccagctgatgcgtctccaatctcgcctcactcctcctcccagaatctcaccttcccccgcgtgcaccgactgcttttctcccgcgtgcgctggctgcttttggccaccgatacgctgcgtcggcgctccaaagttccaggaaatcaaaatgccatagtttcacgggatagacggatcagcttggtctggggatgtcgtcagcgtggatggacggtcaatttcttcgtccgtcgcccaaccggcagcaacacatacgcgatgatttgattggttccttgtgtcctaaatgaaggtcaggagaggctagagttccaaatcgtagttcgtgtgaaccagtgtgaaccagttgaatctcatcaatcttatcaagtcatctaataaaaaaaggttcgacgcgtcttagagttctacgatgcatccaagaattcagagaacgttgacaaatatatagatcagctgaccaacaatgaattgtcatcaccacccaaaaagatgaagcacacccaggttaacaaagccattccagattctacatgttccaagaatgacaacagttagaccatcctgaaatacatcaaggttgggcggcttccgaagtcattcagacctgcgtccgagcctacatcatcatttggtttgaatcgcggaacgatgtcgttcgtcactgcgttgttctaataacaaactaacatgtgagatcagctcactccgcaataaagtgcaggaccgctccatccggagccagaccacgatggatgagccaaaccatcagaccaaacacgctattagtacctgcttgtcgtgatcagagggaaagataaaataaacatattcatagaagaggctccatcacctttggtcatgagac

SEQ ID NO: 204132 - DNA, 686 bp, Zea Mays
ctaggaagtgtcaccagctgatgcgtctccaatctcgcctcactcctcctcccagaatctcaccttcccccgcgtgcaccgactgcttttctcccgcgtgcgctggctgcttttggccaccgatacgctgcgtcggcgctccaaagttccaggaaatcaaaatgccatagtttcacgggatagacggatcagcttggtctggggatgtcgtcagcgtggatggacggtcaatttcttcgtccgtcgcccaaccggcagcaacacatacgcgatgatttgattggttccttgtgtcctaaatgaaggcaggtcaggagaggctagagttccaaatcgtagttcgtgtgaaccagtgtgaaccagttgaatctcatcaatcttatcaagtcatctaataaaaaaaggttcgacgcgtcttagagttctacgatgcatccaagaattcagagaacgttgacaaatatatagatcagctgaccaacaatgaattgtcatcaccacccaaaaagatgaagcacacccaggttaacaaagccattccagattctacatgttccaagaatgacaacagttagaccatcctgaaatacatcaaggttgggcggcttccgaagtcattcagacctgcgtccgagcctacatcatcatttggtttgaatcgcggaacgatgtcgttcgtcactgcg

SEQ ID NO: 204133 - DNA, 1642 bp, Zea Mays
ctccaatctcgcctcactcctcctcccagaatctcaccttcccccgcgtgcaccgactgcttttctcccgcgtgcgctggctgcttttggccaccgatacgctgcgtcggcgctccaaagttccaggaaatcaaaatgccatagtttcacgggatagacggatcagcttggtctggggatgtcgtcaggttcctgtgcttttttcccaatatctttgcttccgccagatcctagatccagtgtctttcgtcggctggctttgtttgcgccgctgaagaacaacaatagtcagccaatatctagtccaaagtccaagcgccgccttaagtttagttggttcaccatgcagcgtggatggacggtcaatttcttcgtccgtcgcccaaccggcagcaacacatacgcgatgatttgattggttccttgtgtcctaaatgaaggcaggtcaggagaggctagagttccaaatcgtagttcgtgtgaaccagtgtgaaccagttgaatctcatcaatcttatcaagtcatctaataaaaaaaggtttcattttttcccaaaaaatagtgcatctgatctttccattaatatatagtgttgtatttagacgttcatatagttccctactgcatttaactcatccataagctagatgcatctatgaatctatttataaattgctgctactatttttttccattgcataaatataaagatgctttcttcatatttacccatgtctgtcatcatgcggtaattgactaattccttatgtacaggtttcttcgtatttacccatacctctcatcacatgatcattttattactctgatgtatgtcctgtttattacaaaggaatagataaatattaggtcagtagtaactatttccttcagcaatttcatttacaacatcagccacaaatttctgaaattgtgtgcaagcatcccaagtgagaataactgttttaggatgcctaggctcttatgaaaattagtttgtctgaacatgcattcataaatgatgttcagtgaagtatctgcacaatacatatagagactttagcctgacgtgaaaaggctaaatcagttttgttagttgcatgtatgcttcaaagttctataagctataactaaagagatttggacagcaagctgtcgtactaaataaactcacatgttttctgtttgccggaactattctctccgagtaacaaccactctaccaaaatcatggaagacaaacctcggtaccatcttcaatgctcaactttgtagtcaccttaatatgtagccgccattgtatctttgaaatttacctttgtagtcacccttaatatgtcagaattctcagtgacaaacacggttcgacgcgtcttagagttctacgatgcatccaagaattcagagaacgttgacaaatatatagatcagctgaccaacaatgaattgtcatcaccacccaaaaagatgaagcacacccaggttaacaaagccattccagattctacatgttccaagaatgacaacagttagaccatcctgaaatacatcaaggttgggcggcttccgaagtcattcagacctgcgtccgagcctacatcatcatttggtttgaatcgcggaacgatgtcgttcgtcactgcg

SEQ ID NO: 204134 - DNA, 1561 bp, Zea Mays
ctccaatctcgcctcactcctcctcccagaatctcaccttcccccgcgtgcaccgactgcttttctcccgcgtgcgctggctgcttttggccaccgatacgctgcgtcggcgctccaaagttccaggaaatcaaaatgccatagtttcacgggatagacggatcagcttggtctggggatgtcgtcagcgtggatggacggtcaatttcttcgtccgtcgcccaaccggcagcaacacatacgcgatgatttgattggttccttgtgtcctaaatgaaggtcaggagaggctagagttccaaatcgtagttcgtgtgaaccagtgtgaaccagttgaatctcatcaatcttatcaagtcatctaataaaaaaaggtttcattttttcccaaaaaatagtgcatctgatctttccattaatatatagtgttgtatttagacgttcatatagttccctactgcatttaactcatccataagctagatgcatctatgaatctatttataaattgctgctactatttttttccattgcataaatataaagatgctttcttcatatttacccatgtctgtcatcatgcggtaattgactaattccttatgtacaggtttcttcgtatttacccatacctctcatcacatgatcattttattactctgatgtatgtcctgtttattacaaaggaatagataaatattaggtcagtagtaactatttccttcagcaatttcatttacaacatcagccacaaatttctgaaattgtgtgcaagcatcccaagtgagaataactgttttaggatgcctaggctcttatgaaaattagtttgtctgaacatgcattcataaatgatgttcagtgaagtatctgcacaatacatatagagactttagcctgacgtgaaaaggctaaatcagttttgttagttgcatgtatgcttcaaagttctataagctataactaaagagatttggacagcaagctgtcgtactaaataaactcacatgttttctgtttgccggaactattctctccgagtaacaaccactctaccaaaatcatggaagacaaacctcggtaccatcttcaatgctcaactttgtagtcaccttaatatgtagccgccattgtatctttgaaatttacctttgtagtcacccttaatatgtcagaattctcagtgacaaacacggtacaaaacttcttacataataatgtcttcaagtttctgtgaaccatcttgaagatacgtaacataatgaaacatatttgacaggttcgacgcgtcttagagttctacgatgcatccaagaattcagagaacgttgacaaatatatagatcagctgaccaacaatgaattgtcatcaccacccaaaaagatgaagcacacccaggttaacaaagccattccagattctacatgttccaagaatgacaacagttagaccatcctgaaatacatcaaggttgggcggcttccgaagtcattcagacctgcgtccgagcctacatcatcatttggtttgaatcgcggaacgatgtcgttcgtcactgcg

SEQ ID NO: 204135 - DNA, 435 bp, Zea Mays
cgcctcactcctcctcccagaatctcaccttcccccgcgtgcaccgactgcttttctcccgcgtgcgctggctgcttttggccaccgatacgctgcgtcggcgctccaaagttccaggtcaggagaggctagagttccaaatcgtagttcgtgtgaaccagtgtgaaccagttgaatctcatcaatcttatcaagtcatctaataaaaaaaggttcgacgcgtcttagagttctacgatgcatccaagaattcagaggatgaagcacacccaggttaacaaagccattccagattctacatgttccaagaatgacaacagttagaccatcctgaaatacatcaaggttgggcggcttccgaagtcattcagacctgcgtccgagcctacatcatcatttggtttgaatcgcggaacgatgtcgttcgtcactgcg

SEQ ID NO: 204136 - DNA, 1335 bp, Zea Mays
cactcctcctcccagaatctcaccttcccccgcgtgcaccgactgcttttctcccgcgtgcgctggctgcttttggccaccgatacgctgcgtcggcgctccaaagttccaggtcaggagaggctagagttccaaatcgtagttcgtgtgaaccagtgtgaaccagttgaatctcatcaatcttatcaagtcatctaataaaaaaaggtttcattttttcccaaaaaatagtgcatctgatctttccattaatatatagtgttgtatttagacgttcatatagttccctactgcatttaactcatccataagctagatgcatctatgaatctatttataaattgctgctactatttttttccattgcataaatataaagatgctttcttcatatttacccatgtctgtcatcatgcggtaattgactaattccttatgtacaggtttcttcgtatttacccatacctctcatcacatgatcattttattactctgatgtatgtcctgtttattacaaaggaatagataaatattaggtcagtagtaactatttccttcagcaatttcatttacaacatcagccacaaatttctgaaattgtgtgcaagcatcccaagtgagaataactgttttaggatgcctaggctcttatgaaaattagtttgtctgaacatgcattcataaatgatgttcagtgaagtatctgcacaatacatatagagactttagcctgacgtgaaaaggctaaatcagttttgttagttgcatgtatgcttcaaagttctataagctataactaaagagatttggacagcaagctgtcgtactaaataaactcacatgttttctgtttgccggaactattctctccgagtaacaaccactctaccaaaatcatggaagacaaacctcggtaccatcttcaatgctcaactttgtagtcaccttaatatgtagccgccattgtatctttgaaatttacctttgtagtcacccttaatatgtcagaattctcagtgacaaacacggtacaaaacttcttacataataatgtcttcaagtttctgtgaaccatcttgaagatacgtaacataatgaaacatatttgacaggttcgacgcgtcttagagttctacgatgcatccaagaattcagaggatgaagcacacccaggttaacaaagccattccagattctacatgttccaagaatgacaacagttagaccatcctgaaatacatcaaggttgggcggcttccgaagtcattcagacctgcgtccgagcctacatcatcatttggtttgaatcgcggaacgatgtcgttcgtcactgcg

SEQ ID NO: 204137 - DNA, 577 bp, Zea Mays
ctcctcccagaatctcaccttcccccgcgtgcaccgactgcttttctcccgcgtgcgctggctgcttttggccaccgatacgctgcgtcggcgctccaaagttccaggtcaggagaggctagagttccaaatcgtagttcgtgtgaaccagtgtgaaccagttgaatctcatcaatcttatcaagtcatctaataaaaaaaggtttcttcgtatttacccatacctctcatcacatgatcattttattactctgatgtatgtcctgtttattacaaaggaatagataaatattaggttcgacgcgtcttagagttctacgatgcatccaagaattcagagaacgttgacaaatatatagatcagctgaccaacaatgaattgtcatcaccacccaaaaagatgaagcacacccaggttaacaaagccattccagattctacatgttccaagaatgacaacagttagaccatcctgaaatacatcaaggttgggcggcttccgaagtcattcagacctgcgtccgagcctacatcatcatttggtttgaatcgcggaacgatgtcgttcgtcactgcg

SEQ ID NO: 204138 - DNA, 734 bp, Zea Mays
cccagaatctcaccttcccccgcgtgcaccgactgcttttctcccgcgtgcgctggctgcttttggccaccgatacgctgcgtcggcgctccaaagttccaggaaatcaaaatgccatagtttcacgggatagacggatcagcttggtctggggatgtcgtcaggttcctgtgcttttttcccaatatctttgcttccgccagatcctagatccagtgtctttcgtcggctggctttgtttgcgccgctgaagaacaacaatagtcagccaatatctagtccaaagtccaagcgccgccttaagtttagttggttcaccatgcagcgtggatggacggtcaatttcttcgtccgtcgcccaaccggcagcaacacatacgcgatgatttgattggttccttgtgtcctaaatgaaggtcaggagaggctagagttccaaatcgtagttcgtgtgaaccagtgtgaaccagttgaatctcatcaatcttatcaagtcatctaataaaaaaaggttcgacgcgtcttagagttctacgatgcatccaagaattcagaggatgaagcacacccaggttaacaaagccattccagattctacatgttccaagaatgacaacagttagaccatcctgaaatacatcaaggttgggcggcttccgaagtcattcagacctgcgtccgagcctacatcatcatttggtttgaatcgcggaacgatgtcgttcgtcactgcg

SEQ ID NO: 204139 - DNA, 1460 bp, Zea Mays
cagaatctcaccttcccccgcgtgcaccgactgcttttctcccgcgtgcgctggctgcttttggccaccgatacgctgcgtcggcgctccaaagttccaggaaatcaaaatgccatagtttcacgggatagacggatcagcttggtctggggatgtcgtcaggttcctgtgcttttttcccaatatctttgcttccgccagatcctagatccagtgtctttcgtcggctggctttgtttgcgccgctgaagaacaacaatagtcagccaatatctagtccaaagtccaagcgccgccttaagtttagttggttcaccatgcagcgtggatggacggtcaatttcttcgtccgtcgcccaaccggcagcaacacatacgcgatgatttgattggttccttgtgtcctaaatgaaggtcaggagaggctagagttccaaatcgtagttcgtgtgaaccagtgtgaaccagttgaatctcatcaatcttatcaagtcatctaataaaaaaaggtttcttcgtatttacccatacctctcatcacatgatcattttattactctgatgtatgtcctgtttattacaaaggaatagataaatattaggtcagtagtaactatttccttcagcaatttcatttacaacatcagccacaaatttctgaaattgtgtgcaagcatcccaagtgagaataactgttttaggatgcctaggctcttatgaaaattagtttgtctgaacatgcattcataaatgatgttcagtgaagtatctgcacaatacatatagagactttagcctgacgtgaaaaggctaaatcagttttgttagttgcatgtatgcttcaaagttctataagctataactaaagagatttggacagcaagctgtcgtactaaataaactcacatgttttctgtttgccggaactattctctccgagtaacaaccactctaccaaaatcatggaagacaaacctcggtaccatcttcaatgctcaactttgtagtcaccttaatatgtagccgccattgtatctttgaaatttacctttgtagtcacccttaatatgtcagaattctcagtgacaaacacggtacaaaacttcttacataataatgtcttcaagtttctgtgaaccatcttgaagatacgtaacataatgaaacatatttgacaggttcgacgcgtcttagagttctacgatgcatccaagaattcagagaacgttgacaaatatatagatcagctgaccaacaatgaattgtcatcaccacccaaaaagatgaagcacacccaggttaacaaagccattccagattctacatgttccaagaatgacaacagttagaccatcctgaaatacatcaaggttgggcggcttccgaagtcattcagacctgcgtccgagcctacatcatcatttggtttgaatcgcggaacgatgtcgttcgtcactgcg

SEQ ID NO: 204140 - DNA, 856 bp, Zea Mays
gcgtgcgctggctgcttttggccaccgatacgctgcgtcggcgctccaaagttccaggcaagcacacttcctcccctgctctccacctcattctggttcccattgctagggtttgtcgtgctagggtttaggtcgctccttctccaccacctggccgcccaccctccacctctcgtgcttcccggacgccgcggccgccgagacgagggccaggagcaggagccaccgagcagtcgtcgccaccgccataaaccaaactaactaaggcagctagaatctctgctttgagttcttccccgtcaccgcacgggctgcgatctctgctttttttggttccccaatcccattccgtgtcctcatgctgccattttggggttcaaggaaatcaaaatgccatagtttcacgggatagacggatcagcttggtctggggatgtcgtcagcgtggatggacggtcaatttcttcgtccgtcgcccaaccggcagcaacacatacgcgatgatttgattggttccttgtgtcctaaatgaaggtcaggagaggctagagttccaaatcgtagttcgtgtgaaccagtgtgaaccagttgaatctcatcaatcttatcaagtcatctaataaaaaaaggttcgacgcgtcttagagttctacgatgcatccaagaattcagagaacgttgacaaatatatagatcagctgaccaacaatgaattgtcatcaccacccaaaaagatgaagcacacccaggttaacaaagccattccagattctacatgttccaagaatgacaacagttagaccatcctgaaatacatcaaggcttcaagggttcgtttcttttccggaaaaaacga

SEQ ID NO: 204141 - DNA, 911 bp, Zea Mays
gcgtgcgctggctgcttttggccaccgatacgctgcgtcggcgctccaaagttccaggcaagcacacttcctcccctgctctccacctcattctggttcccattgctagggtttgtcgtgctagggtttaggtcgctccttctccaccacctggccgcccaccctccacctctcgtgcttcccggacgccgcggccgccgagacgagggccaggagcaggagccaccgagcagtcgtcgccaccgccataaaccaaactaactaaggcagctagaatctctgctttgagttcttccccgtcaccgcacgggctgcgatctctgctttttttggttccccaatcccattccgtgtcctcatgctgccattttggggttcaaggaaatcaaaatgccatagtttcacgggatagacggatcagcttggtctggggatgtcgtcagcgtggatggacggtcaatttcttcgtccgtcgcccaaccggcagcaacacatacgcgatgatttgattggttccttgtgtcctaaatgaaggtcaggagaggctagagttccaaatcgtagttcgtgtgaaccagtgtgaaccagttgaatctcatcaatcttatcaagtcatctaataaaaaaaggttcgacgcgtcttagagttctacgatgcatccaagaattcagagaacgttgacaaatatatagatcagctgaccaacaatgaattgtcatcaccacccaaaaagatgaagcacacccaggttaacaaagccattccagattctacatgttccaagaatgacaacagttagaccatcctgaaatacatcaaggttgggcggcttccgaagtcattcagacctgcgtccgagcctacatcatcatttggtttgaatcgcggaacgatgtcgttcgtcactgcg

SEQ ID NO: 204142 - DNA, 758 bp, Zea Mays
gcgtgcgctggctgcttttggccaccgatacgctgcgtcggcgctccaaagttccaggcaagcacacttcctcccctgctctccacctcattctggttcccattgctagggtttgtcgtgctagggtttaggtcgctccttctccaccacctggccgcccaccctccacctctcgtgcttcccggacgccgcggccgccgagacgagggccaggagcaggagccaccgagcagtcgtcgccaccgccataaaccaaactaactaaggcagctagaatctctgctttgagttcttccccgtcaccgcacgggctgcgatctctgctttttttggttccccaatcccattccgtgtcctcatgctgccattttggggttcaaggtcaggagaggctagagttccaaatcgtagttcgtgtgaaccagtgtgaaccagttgaatctcatcaatcttatcaagtcatctaataaaaaaaggttcgacgcgtcttagagttctacgatgcatccaagaattcagagaacgttgacaaatatatagatcagctgaccaacaatgaattgtcatcaccacccaaaaagatgaagcacacccaggttaacaaagccattccagattctacatgttccaagaatgacaacagttagaccatcctgaaatacatcaaggttgggcggcttccgaagtcattcagacctgcgtccgagcctacatcatcatttggtttgaatcgcggaacgatgtcgttcgtcactgcg

SEQ ID NO: 204143 - DNA, 1530 bp, Zea Mays
gcgtgcgctggctgcttttggccaccgatacgctgcgtcggcgctccaaagttccaggcaagcacacttcctcccctgctctccacctcattctggttcccattgctagggtttgtcgtgctagggtttaggtcgctccttctccaccacctggccgcccaccctccacctctcgtgcttcccggacgccgcggccgccgagacgagggccaggagcaggagccaccgagcagtcgtcgccaccgccataaaccaaactaactaaggcagctagaatctctgctttgagttcttccccgtcaccgcacgggctgcgatctctgctttttttggttccccaatcccattccgtgtcctcatgctgccattttggggttcaagataatgcttgctggaaaacaaggtcactgtggtataacttcagaggttattgccagaagttacggattgcaggtttggttagatccatggatcgtgaaaattttgtcattgtactgtgctttttcatgataggctgttgaactagaactggtttgctgtgtctttgtaacttagttaccagagtattattgttcagtcaggtcaagtgatgggataaagtggtgtagtctactgtactgtacttttaaatgacagctgctggaacaaatgatgttgtgcaggaaatcaaaatgccatagtttcacgggatagacggatcagcttggtctggggatgtcgtcaggttcctgtgcttttttcccaatatctttgcttccgccagatcctagatccagtgtctttcgtcggctggctttgtttgcgccgctgaagaacaacaatagtcagccaatatctagtccaaagtccaagcgccgccttaagtttagttggttcaccatgcagcgtggatggacggtcaatttcttcgtccgtcgcccaaccggcagcaacacatacgcgatgatttgattggttccttgtgtcctaaatgaaggcaggttgtctgaagatctggaatctccagtttcatccaagttattatgtttttcattttattcaattatctcccctgcttctttatcactcctattttctagatgacatatacataaaaacaggatggtctttgttggcttcctgctactgcatataacatactaatttcgctaaagaatatatgtatgtaccttaactgtggcagctactgatttggatttttcttcaaaacaggtcaggagaggctagagttccaaatcgtagttcgtgtgaaccagtgtgaaccagttgaatctcatcaatcttatcaagtcatctaataaaaaaaggttcgacgcgtcttagagttctacgatgcatccaagaattcagaggatgaagcacacccaggttaacaaagccattccagattctacatgttccaagaatgacaacagttagaccatcctgaaatacatcaaggttgggcggcttccgaagtcattcagacctgcgtccgagcctacatcatcatttggtttgaatcgcggaacgatgtcgttcgtcactgcg

SEQ ID NO: 204144 - DNA, 915 bp, Zea Mays
gcgtgcgctggctgcttttggccaccgatacgctgcgtcggcgctccaaagttccaggcaagcacacttcctcccctgctctccacctcattctggttcccattgctagggtttgtcgtgctagggtttaggtcgctccttctccaccacctggccgcccaccctccacctctcgtgcttcccggacgccgcggccgccgagacgagggccaggagcaggagccaccgagcagtcgtcgccaccgccataaaccaaactaactaaggcagctagaatctctgctttgagttcttccccgtcaccgcacgggctgcgatctctgctttttttggttccccaatcccattccgtgtcctcatgctgccattttggggttcaaggaaatcaaaatgccatagtttcacgggatagacggatcagcttggtctggggatgtcgtcagcgtggatggacggtcaatttcttcgtccgtcgcccaaccggcagcaacacatacgcgatgatttgattggttccttgtgtcctaaatgaaggcaggtcaggagaggctagagttccaaatcgtagttcgtgtgaaccagtgtgaaccagttgaatctcatcaatcttatcaagtcatctaataaaaaaaggttcgacgcgtcttagagttctacgatgcatccaagaattcagagaacgttgacaaatatatagatcagctgaccaacaatgaattgtcatcaccacccaaaaagatgaagcacacccaggttaacaaagccattccagattctacatgttccaagaatgacaacagttagaccatcctgaaatacatcaaggttgggcggcttccgaagtcattcagacctgcgtccgagcctacatcatcatttggtttgaatcgcggaacgatgtcgttcgtcactgcg

SEQ ID NO: 204145 - DNA, 1581 bp, Zea Mays
atgcttgctggaaaacaaggtcactgtggtataacttcagaggttattgccagaagttacggattgcaggaaatcaaaatgccatagtttcacgggatagacggatcagcttggtctggggatgtcgtcaggttcctgtgcttttttcccaatatctttgcttccgccagatcctagatccagtgtctttcgtcggctggctttgtttgcgccgctgaagaacaacaatagtcagccaatatctagtccaaagtccaagcgccgccttaagtttagttggttcaccatgcagcgtggatggacggtcaatttcttcgtccgtcgcccaaccggcagcaacacatacgcgatgatttgattggttccttgtgtcctaaatgaaggtcaggagaggctagagttccaaatcgtagttcgtgtgaaccagtgtgaaccagttgaatctcatcaatcttatcaagtcatctaataaaaaaaggtttcattttttcccaaaaaatagtgcatctgatctttccattaatatatagtgttgtatttagacgttcatatagttccctactgcatttaactcatccataagctagatgcatctatgaatctatttataaattgctgctactatttttttccattgcataaatataaagatgctttcttcatatttacccatgtctgtcatcatgcggtaattgactaattccttatgtacaggtttcttcgtatttacccatacctctcatcacatgatcattttattactctgatgtatgtcctgtttattacaaaggaatagataaatattaggtcagtagtaactatttccttcagcaatttcatttacaacatcagccacaaatttctgaaattgtgtgcaagcatcccaagtgagaataactgttttaggatgcctaggctcttatgaaaattagtttgtctgaacatgcattcataaatgatgttcagtgaagtatctgcacaatacatatagagactttagcctgacgtgaaaaggctaaatcagttttgttagttgcatgtatgcttcaaagttctataagctataactaaagagatttggacagcaagctgtcgtactaaataaactcacatgttttctgtttgccggaactattctctccgagtaacaaccactctaccaaaatcatggaagacaaacctcggtaccatcttcaatgctcaactttgtagtcaccttaatatgtagccgccattgtatctttgaaatttacctttgtagtcacccttaatatgtcagaattctcagtgacaaacacggttcgacgcgtcttagagttctacgatgcatccaagaattcagagaacgttgacaaatatatagatcagctgaccaacaatgaattgtcatcaccacccaaaaagatgaagcacacccaggttaacaaagccattccagattctacatgttccaagaatgacaacagttagaccatcctgaaatacatcaaggttgggcggcttccgaagtcattcagacctgcgtccgagcctacatcatcatttggtttgaatcgcggaacgatgtcgttcgtcactgcg

SEQ ID NO: 204146 - DNA, 1380 bp, Zea Mays
ccacatcttttcctatacagaagaaacgggcatcaagagaattccttaggaccgtagcccatctccgtcctcggacaaacacttttggtgcagttgcaagagtgagaaatactctggcatacgcaactcataaattctttcaagacaatggatttgtttgggtttcgagcccaattattacggcctcagattgtgaaggagctggggagcagttttacgtgactactttggatttcttctgcaaaccagcatttctgacagtgtctggacagcttaatggtgaaacatatgcttcagctctatctgatatttacacatttggtccaacgtttagggctgaaaattcaaacacttcaagacatctggctgaattttggatgattgaacctgagcttgcctttgcggatctgaacgatgacatggcttgtgcaactgcatatctccagtaaagtatattctggagaactgcaaagaggatatggatttcttcaatacttggattgaaaaaggcatcatagatcggttaaatgatgtagtagagaagaacttcgttcacctgtcttacactgatgctgttgagctacttcttgggtccaagaaggaattcgagttcccggtaaagtggggtttggatcttcaaagcgagcatgagcgatatatcacagaagttgcctttggtgggcgccctgtaataattagagattacccaaaggagatcaaagctttctatatgagagaaaatgatgatgggaagacagttgctgcaatggatctgttggttcctcgggttggtgaacttattggaggaagccagagggaagagcgtcttgattaccttgaagcccggttggacgagcaaaatctgaataaggagagctactggtggtatttggacctacgacgatatggatcagttccacacgctggtttcggtctcggatttgagcggcttgtacagtttgctactggaatggacaacatcagagacaccatcccatttcctcgagttcctggctctgccgagttttagcgccctgaaagtgttgtcgtatacgtatactttagaaacattctttcctaggatgtaatgtgagaaaggcatacgttgtactgtactactgtttcatcattgtacagagttaagctgagacttgtgattaatcggaggcaagcagtgctgtggcaagctttgtcgtttgttgtaattgtcgtcaaagaatgtcactggtggatgatgcaattttttcacgggtaagactgagaccaacacgaagacttgcatcagacaacgcaaacgcaaaatgagttgcgcagagtactgtgcgtggtgggagcatgcaaagggcgcaggacgatctaaaaatagaatcctctcttctc

SEQ ID NO: 204147 - DNA, 2244 bp, Zea Mays
cagataggccccccgcgacaggaaattaagttagtatttagttgagtgtcaacgagagatgggacaggatcaactctaggttaaccccgtcccttaatttttgaggtatggcctcatccatcatttttaaagaatattccttgaccctaactttgaatcttcaaaccaaacacatatcaaattaaaatgattctatctcatccctcttcatccatcctcgtccctgcatccaaacaccctataagcttacagccccacaccgccggccaccgccaccgcctcgctgccgatggcggccgccgccgccgcccggatcctccgcctggccccgcgccggattcaggttcccaagacctccccgctcgccgcactctcgttcccactccctcgaacggcgccgatcgccgctgcctcgggaaggcggcagcgcttctgcgccgtggcgcaggcccccgcccccgcagccgcggcgacaggggcggcgggagaggccgtgggggagttcaggaagcggctgcgggtggcggacgtgaagggcggggaggacgagggcgccgcgtgggtgggcaaggagctcgccgtgcgcgggtgggtgcgcacctgccgcgcccagaggaccataaccttcgtcgaggtcaatgatggctcttgcttatccaatatgcaatgtgtattgactcctgaaacagaaggctatgaccagactctgtcactactggagcatctgtactagttgagggagttgttgcaagcagccaaggcgattggtaagagtgaccccacatcttttcctatacagaagaaacgggcatcaagagaattccttaggaccgtagcccatctccgtcctcggacaaacacttttggtgcagttgcaagagtgagaaatactctggcatacgcaactcataaattctttcaagacaatggatttgtttgggtttcgagcccaattattacggcctcagattgtgaaggagctggggagcagttttacgtgactactttgctttcaaacagcgctgatggtggttctctactcaaagatattcctgctaccaaggatggaagggttgattggtcacaggatttcttctgcaaaccagcatttctgacagtgtctggacagcttaatggtgaaacatatgcttcagctctatctgatatttacacatttggtccaacgtttagggctgaaaattcaaacacttcaagacatctggctgaattttggatgattgaacctgagcttgcctttgcggatctgaacgatgacatggcttgtgcaactgcatatctccagtatgtagtaaagtatattctggagaactgcaaagaggatatggatttcttcaatacttggattgaaaaaggcatcatagatcggttaaatgatgtagtagagaagaacttcgttcacctgtcttacactgatgctgttgagctacttcttgggtccaagaaggaattcgagttcccggtaaagtggggtttggatcttcaaagcgagcatgagcgatatatcacagaagttgcctttggtgggcgccctgtaataattagagattacccaaaggagatcaaagctttctatatgagagaaaatgatgatgggaagacagttgctgcaatggatctgttggttcctcgggttggtgaacttattggaggaagccagagggaagagcgtcttgattaccttgaagcccggttggacgagcaaaatctgaataaggagagctactggtggtatttggacctacgacgatatggatcagttccacacgctggtttcggtctcggatttgagcggcttgtacagtttgctactggaatggacaacatcagagacaccatcccatttcctcgagttcctggctctgccgagttttagcgccctgaaagtgttgtcgtatacgtatactttagaaacattctttcctaggatgtaatgtgagaaaggcatacgttgtactgtactactgtttcatcattgtacagagttaagctgagacttgtgattaatcggaggcaagcagtgctgtggcaagctttgtcgtttgttgtaattgtcgtcaaagaatgtcactggtggatgatgcaattttttcacgggtaagactgagaccaacacgaagacttgcatcagacaacgcaaacgcaaaatgagttgcgcagagtactgtgcgtggtgggagcatgcaaagggcgcaggacgatctaaaaatagaatcctctcttctc

SEQ ID NO: 204148 - DNA, 2225 bp, Zea Mays
cagataggccccccgcgacaggaaattaagttagtatttagttgagtgtcaacgagagatgggacaggatcaactctaggttaaccccgtcccttaatttttgaggtatggcctcatccatcatttttaaagaatattccttgaccctaactttgaatcttcaaaccaaacacatatcaaattaaaatgattctatctcatccctcttcatccatcctcgtccctgcatccaaacaccctataagcttacagccccacaccgccggccaccgccaccgcctcgctgccgatggcggccgccgccgccgcccggatcctccgcctggccccgcgccggattcaggttcccaagacctccccgctcgccgcactctcgttcccactccctcgaacggcgccgatcgccgctgcctcgggaaggcggcagcgcttctgcgccgtggcgcaggcccccgcccccgcagccgcggcgacaggggcggcgggagaggccgtgggggagttcaggaagcggctgcgggtggcggacgtgaagggcggggaggacgagggcgccgcgtgggtgggcaaggagctcgccgtgcgcgggtgggtgcgcacctgccgcgcccagaggaccataaccttcgtcgaggtcaatgatggctcttgcttatccaatatgcaatgtgtattgactcctgaaacagaaggctatgaccagactctgtcactactggagcatctgtactagttgagggagttgttgcaagcagccaaggcgattggtaagagtgaccccacatcttttcctatacagaagaaacgggcatcaagagaattccttaggaccgtagcccatctccgtcctcggacaaacacttttggtgcagttgcaagagtgagaaatactctggcatacgcaactcataaattctttcaagacaatggatttgtttgggtttcgagcccaattattacggcctcagattgtgaaggagctggggagcagttttacgtgactactttgctttcaaacagcgctgatggtggttctctactcaaagatattcctgctaccaaggatggaagggttgattggtcacagcatttctgacagtgtctggacagcttaatggtgaaacatatgcttcagctctatctgatatttacacatttggtccaacgtttagggctgaaaattcaaacacttcaagacatctggctgaattttggatgattgaacctgagcttgcctttgcggatctgaacgatgacatggcttgtgcaactgcatatctccagtatgtagtaaagtatattctggagaactgcaaagaggatatggatttcttcaatacttggattgaaaaaggcatcatagatcggttaaatgatgtagtagagaagaacttcgttcacctgtcttacactgatgctgttgagctacttcttgggtccaagaaggaattcgagttcccggtaaagtggggtttggatcttcaaagcgagcatgagcgatatatcacagaagttgcctttggtgggcgccctgtaataattagagattacccaaaggagatcaaagctttctatatgagagaaaatgatgatgggaagacagttgctgcaatggatctgttggttcctcgggttggtgaacttattggaggaagccagagggaagagcgtcttgattaccttgaagcccggttggacgagcaaaatctgaataaggagagctactggtggtatttggacctacgacgatatggatcagttccacacgctggtttcggtctcggatttgagcggcttgtacagtttgctactggaatggacaacatcagagacaccatcccatttcctcgagttcctggctctgccgagttttagcgccctgaaagtgttgtcgtatacgtatactttagaaacattctttcctaggatgtaatgtgagaaaggcatacgttgtactgtactactgtttcatcattgtacagagttaagctgagacttgtgattaatcggaggcaagcagtgctgtggcaagctttgtcgtttgttgtaattgtcgtcaaagaatgtcactggtggatgatgcaattttttcacgggtaagactgagaccaacacgaagacttgcatcagacaacgcaaacgcaaaatgagttgcgcagagtactgtgcgtggtgggagcatgcaaagggcgcaggacgatctaaaaatagaatcctctcttctc

SEQ ID NO: 204149 - DNA, 708 bp, Zea Mays
caacataccgcctatccacctgcgctcttcccgttccccaactgcaacatcctctatctctctctctctctctctccctctctacctgccccgttcctcaccagtctcttccgccggcgtcgacgagagctgcgctaggtgatctcgactgcttcctcgccccccatggcgacggcgctcaaatcgttcctgaacagccccgtcggccccaagaccacccacttctggggccctgtcgccaactggggcttcgtcatcgcgggtttggttgacatgaacaagcctcctgaaatgatatctggcaatatgacagcagccccgaaattatttgcttctggcatgccatgcttccaatgaaagcgtccagctctatcagttatctcgctgggctaggtctcaggggtacctggagaagaaagaaccagaggccaaacagtaaagaggaaaaatacaatgactcaaagaagttcctaccacgaagatcagtcattgcgaaattttgctccggtcgctcggcaatgtcatcctggattcgaatatatgtaaatattgattgaaaaaaaatccatctttggtcacaatgtaccttttagacttagataaaattacaaaattcaagatagaaattgacaataagatgtttggttcaccccctccccccagcacaaatgcttggtttcttcggttctaaactgtgttgagttttct

SEQ ID NO: 204150 - DNA, 1315 bp, Zea Mays
gtagaataaataaattatgcaagaatttccaaaagattgttcgaatttgtgtatgttgtcctctctctctccaccgttggatggcaacataccgcctatccacctgcgctcttcccgttccccaactgcaacatcctctatctctctctctctctctctccctctctacctgccccgttcctcaccagtctcttccgccggcgtcgacgagagctgcgctaggtgatctcgactgcttcctcgccccccatggcgacggcgctcaaatcgttcctgaacagccccgtcggccccaagaccacccacttctggggccctgtcgccaactggggcttcgtcatcgcgggtttggttgacatgaacaagcctcctgaaatgatatctggcaatatgacagcagccatgtgtgtgtattctggactctttatgaggtttgcatggatggtacagccccgaaattatttgcttctggcatgccatgcttccaatgaaagcgtccagctctatcagttatctcgctgggctaggtctcaggggtacctggagaagaaagaaccagaggccaaacagtaaagagggtatccaacactgcagtcatttgttcaataaagaaaatatgctgtggaaaacattcattctgttgccaatgcagttttttttgtatgtttgcaaaatatgctgaggaaatttcatgatacctagcgcagttacaagtgtctgcttacttttatgtgcatttgtcaagacacatttgttttttacattgctgccttcctactatttggcactatttattttacctggctcatccgctcatgtgcccaaaatgcttagtaaaataaattcatgttcacttatacaacacaattccagattttattcaagtcaaggaatattttgacgttctgttcctagaccgaacgaaatacttagaatataatattctaattaattcctattatacaaaaagtccagatagactgaacaaaaagggcttcatttctattttccaatttggcaaatcacatatttgtttccttcgtatgaacagaaaaatacaatgactcaaagaagttcctaccacgaagatcagtcattgcgaaattttgctccggtcgctcggcaatgtcatcctggattcgaatatatgtaaatattgattgaaaaaaaatccatctttggtcacaatgtaccttttagacttagataaaattacaaaattcaagatagaaattgacaataagatgtttggttcaccccctccccccagcacaaatgcttggtttcttcggttctaaactgtgttgagttttct

SEQ ID NO: 204151 - DNA, 415 bp, Zea Mays
cctctatctctctctctctctctctccctctctacctgccccgttcctcaccagtctcttccgccggcgtcgacgagagctgcgctaggtgatctcgactgcttcctcgccccccatggcgacggcgctcaaatcgttcctgaacagccccgtcggccccaagaccacccacttctggggccctgtcgccaactggggcttcgtcatcgcgggtttggttgacatgaacaagcctcctgaaatgatatctggcaatatgacagcagccatgtgtgtgtattctggactctttatgaggtttgcatggatggtacagccccgaaattatttgcttctggcatgccatgcttccaatgaaagcgtccagctctatcagttatctcgctgggctaggtctcagggagtttgattttcg

SEQ ID NO: 204152 - DNA, 893 bp, Zea Mays
atcgttggatgcttgatagagcaatttttgttggaattttttttgcctccacctgtgtcaatcggtagccctaaaccagacactcaaaatgctatgtaattttccaatatagtgacaatggacaaaaggttgttcaggagaggtaagagttgcttgaatcgaatcaacagtctgaaatgtggaaagctgggcttactgatataagtttatcacagtaatttaaaataaaatctgatcgtgagtatgttaactgtttttactttataattgctctagtttggttacgtgagatttgctacatagctttttttcgcatgggttagctgttgattatatgattatgtacattgaataggtcgataatgcaagaggatgaatttcacaaattagcagatgagacaattcatgatttgcttgaaacacttgaggaatatggtgactccattcagatggatggtttcgacatagactatgggaaccaggttttgacattgaggcttggggatttggggacatatgttgtgaacaagcaatcaccaaacagacaaatctggctttcttcacctgtaagtgggccttctaggtttgactgggatgcagcaactaatggttggatatacaagcgaactggatcgaatcttgtgcaacttcttgagaaggagattggtgagctctgtggtactccagtacaactttcataatagtacaggaaatgccacacaactaggttggatggagagcagtgcacttgaggtacagtatgaatgagagtatgagacaaccctcctgtaatatggttattcacaagattttcttctggacatttgcacactgtttgggataaataatttcattcgctgataacaggacaaagtaaacatcagacatatatc

SEQ ID NO: 204153 - DNA, 2248 bp, Zea Mays
ccgactcgttcgttctctcgtgccgctaacacatcaaattctggccgtcgtcatgggcccacagtggcaagaagtgtagtacttgaggctgttaatgtggatcctgggagcagtgaactcccagcttttgttgcgcagattctccaaagtgtgcttggaacaatcaatgcacaatctacgggtacaccaacatcttctgacaccggatctttagatccttcacaatcttccatcccaaatactataagagttgaactcgaccagcaacaagctcctctgctttttcagtctgaacccgcacatgagtcatctcaaccaaatgtcatccctgatgctttgacaactatgtctcagtacattaactttatgagggactcatttaggagggagggctttagtcttaatggacaaacagagggtaatgtggaaaacagaactgcagagcctgaatcagcttctgtgcttgggcttcataatgcatcattgctagctgaaaatatgcactctactaggcaaattattgttgaacaggctggtgcattgctgtctcaactctcaactcagctgggagatctagagaatgtaactgattctgcaatacgaagggacattcaaagtagtgcagttcgcacgggttctctatttcagaaccttggttctttgcttctggaacttgggcgcaccacaatgctcctgcgtataaatccgtcatcttcagaagcggttgtaaactctggaccagctctttatatatctccatcagggccaaatcctcttatggttcaagaaggtctgtccaaatgggtactttgttttctagtctgggttcacaaggatctgttctacatccgagagatgttgatatccatgtccgcacaagtgggtccgtgcctggagccagtactaacccaagtgattcagctggtgcgcaagcgcatcaaaatgtgaataggccaggagatgcttcgcatgcaaatattggtgaagcgttttcaggggttgcaggtggcactcctttttcagttgagtccggagttagactattgccacttagaacagtggttgccatgcctgctggcatcagtcgtgctccatcagggtcgtctagtggtgggcttggtattatctatccatttctcactagggttcgacaaagggcaaacactaatggtaatgatgaaaggaatggtcaatctccaaatgaatcggctcgtagtagcacccatcttaatcagcaatcaattccgcagtcatctcaaactcatgaagcaggtaatctgagatctccagttgatgtcaatgttggagatggctctgagacctcacctgggcagcagaatggtctggtcactctctctcagataatggacttttttggatcaatgctcccaggcgaaaatgttcgaggaaatacttcaagccagcaaccaccaatggcttccaccgagcagggagagggtagaaatcttgcaacaccagaagtgtcaggagccagtgaggaggccctacgctttgctggcatggtcagacaaattatgccatttatctcccaagttgaaacacagaatcaaagtgccccaccagacagcagcagcacacctgcacaggctgcatctgggagtgcagacagagctagggatgtcccaaatgattctacgagttcccgtcaacataaccgcgaccaaattgatgagcctaattctaaaaggcaaagaactagtgactgattggaatctacttgtgagctgagaatcttgccagttcttgatttaccccagcggatgatcaaaataaggacttgagacaaatggtggcagtattgagacaaaaatggattagctgtggtatatacttggcactgagggcactagacgaggcacctatgccttttttttttgagggggcgcatcttataagctgttatttttttagtgcaacgagcatacatgctgctggcatccaatccccaatatgtacaagttttaattcaggttgtgatcatttacgcaacgaatcaaagcctccgctctggtcattgccgtagcatacggaggactgacgcaatcaatcatattgttacgagaatgtatagcttaagattgtatgtttttttttaccatcgcttaagacaatcagagcatatagttcatgcttattatagtatgatccaaataggactagtagtattgttcatgcttatcattagcattgcttaagagcttgtttgggagtaagagaattaaaaaga

SEQ ID NO: 204154 - DNA, 1423 bp, Zea Mays
gtcaatctctcccctcctctacggactacgaggctggagcacaagttgctggacaatatcttctctgtgctgtcatgcgttgtctccgtgcccttctacacgggattcctccctctcctcttctggagtggacacggcaggctggctaggcagatgaccctcctcatggctttctgtgactacctcggcaactctgtcaaggatatagtgtcagccgctcggccgtgctctcctcctgtaagacgagtgacggctacagaagacgagaaggaaaatgccatggaatatgggcttccatcatcgcatgctctcaataccgtttgtttgacgggatatttactacactacatcctcacgtttggagaacatggtagtgttacagttgctgcgggtttatctctagctttcttgcttgtcatgctagttggcatcgcgaggatatatctgggtatgcacagcttgaccgacgttgttgctggaattggttttggcgtcgtcatccttgcgttctggttggctgttcatgaccgtgtcgatgccttcgttgtctccggggaaaatgttgcgaccttctgggcaggcctttctctgttgctgtgctttgcgtacccgaagccggagttccctactcctagcttcgaataccacacagcattcaacggggttgctttcggaatcgtgtacggcatccagcaaacatacttccacttccacacccctgacgccccggtcgtcttcagcgccgagctgcccctgctcacgttcgccgggcgcgtcctcgtcgggatcccgaccatcctggccgtgaaattctgcagcaaggcgctgtccaagtggctgctgcccgtggtgtgcagcaccctgggcatccccaccgtgtcgtcctgctacgtcccggccctgagagccgacagcggcagcggcagcggcaagaacaggcagggccccgggcacctgcagcggctgctgttctcccacttcccccggaaggcgtacgacgtggacacgggcatcaggttcgtccagtacgccagcctcgcgtggtccgtggttgacttggtaccggccatgttcgcccatctgaatctgtagccagctgcgtagaatttctgcttctcttttcgatgagctcccaatgcggccccctcctgctcgtaagacatggatcagcttacgaggctgtaaatccgattgtctggctggctggcttctccttctcgtatcgtatgtacctagctgttctcaccaggggtgttgtttctatgcaagtttgtgtgtgtagtaagtagcaaccagtagtattgattgatgatggatagctgagacattcttgacgtcaaagggatgccttttcttgccttgtgtgtcctagcaccaacgtcgggtagatgatggatgcgatgcgagcgctcttcgcctcttg

SEQ ID NO: 204155 - DNA, 1489 bp, Zea Mays
aggaaaatgacctcctttttcagtaatgccatttaattggagaaaaaaacgtattcactttcatgatttcatgctgaatgtacatagtcgtcttcagatgcacaaaggtgtttcagatccccttgatgttgtagcagctgagatttcagatgaggccatcatattatgtcttgatgagtttatggtaactgatgttgctgatgctatgattctgaaccgtctgttcagacaattgttcagcaaaggcgttattcttgtttcgacttctaaccgtgctccagataagctttatgaaggtggcttacaacgggaccttttcttgccatttattgacaccttgaaagaaagatgcatcgtgcatgccattggatctgcggtggactatcgtcaactgggttctgctgaacaaggtttctattttgtcggaaaacattacagtacgcttctgaaacagaagctccagtctttaattggagatgagaaacccagcccacaaactgttgaagtaattatgggaaggaaattacaggttcccctaggagcaaatggttgtgcatattttccttttgaagacctttgtgataaacctttaggtgcagcagattactttggactctttaaaaaatttcacaccctggcacttgatggtattccaaagcttgggtctagtaacagaacagcagcttatcggttcgtcacactgattgatgttatgtacgagaacaaggcaaggctgttatgtacagccgaggctggaccagtaggactgttcgagaatatcgtgactgttgctgaagcacggaaggtttcaccaagatcttcacgctcacagaaaagcgacgacactgacctatgcgtggacaatgagcttggatttgccaaggatcgtacgattagcaggttgacagagatcaacagcagagaatatttggaggacttcgaaatgagattgaggcaacagcagcagctgcccttgcaaggtctagataaaaggtggtgatgctgtactaaacataagaagcagaaggcttctgcgcctcatcttgaaattcttgtattcacacccacctggcttacataggcaactgagaagctatgcttttccaacagtggtgcatgtaaatgtccaataaagctatgtaagggcatttttgctaacaggtgagtgatctataaaatggcccaacctgggggaggggggataccatatcgttttttttagtgtatcacatatttccaaacctttagagaggcctcctaaggctcaaaaacagcatgagttacactgcataaagccatatataggctgaaagctttcgctgaactttgtgaattgagggaaaaaaagtctaacaattgttcatgtttttctattgtacgagcttttctgacatgcttgacgtagtaaggaagatctggttattattgttgcgtcatgtctggagcagatttgctttattttccatggaaacctgccttttccaagaac

SEQ ID NO: 204156 - DNA, 2404 bp, Zea Mays
gcgcagtagcagtgtagcacccccacaattccagctcacgctgcactcctccatcccagtcgacctgttcccaacttcccatcccctcggcaccggcccgactaccggagcctcttgccgcatttttcagactgtcctgtttcgtgacgtcccaggattctaggagaagagaacaccctcgcccccctggggcatagtcgctgccgagccagtggtactggccgcgacggagcggtcagaagctgcggcggccggcgcggtttcggtttcggtttcctggctggcccgaggagtttgactcctctcctgatttgtggctcataacttctttatggtgtttggtgtgcctagaaagtggagaaataagatacacagtggaagatgagatcagttgttcggtcacttcgccagcttcgccgtttcactcagcaccatgcagaggggcactcacaagcaaccagattgttcgggcagcagaacgctttaatcatgtgcggttcgacatctggttcactgagcacgttacgttgtaatggtgaaattagcagatttgcaagccctggcgtcgagttgatgaggtccatgttctctactgtagtgactgatccgatcaaagatattggaagaggtggtccaatggtggaatatgagaggagaatagcatcaggagagctagtagacggtgatagctttcaggttgatacaattcaacaattacaaaggctctatgaggagttgattgagaatgaagaagactgtcagctggatagatataaatcatctgagaaatcaggccggagtcgatggctatggtcccgcctcattactcagccttctacgtatgctcctattaagggcctttacctctatggtggtgttggtacagggaagacaatgcttatggacttgttctatgaacagctgccatttaattggagaaaaaaacgtattcactttcatgatttcatgctgaatgtacatagtcgtcttcagatgcacaaaggtgtttcagatccccttgatgttgtagcagctgagatttcagatgaggccatcatattatgtcttgatgagtttatggtaactgatgttgctgatgctatgattctgaaccgtctgttcagacaattgttcagcaaaggcgttgtatgtggctactattttcttccattttcttatgggactaaactactcagataagctttatgaaggtggcttacaacgggaccttttcttgccatttattgacaccttgaaagaaagatgcatcgtgcatgccattggatctgcggtggactatcgtcaactgggttctgctgaacaaggtttctattttgtcggaaaacattacagtacgcttctgaaacagaagctccagtctttaattggagatgagaaacccagcccacaaactgttgaagtaattatgggaaggaaattacaggttcccctaggagcaaatggttgtgcatattttccttttgaagacctttgtgataaacctttaggtgcagcagattactttggactctttaaaaaatttcacaccctggcacttgatggtattccaaagcttgggtctagtaacagaacagcagcttatcggttcgtcacactgattgatgttatgtacgagaacaaggcaaggctgttatgtacagccgaggctggaccagtaggactgttcgagaatatcgtgactgttgctgaagcacggaaggtttcaccaagatcttcacgctcacagaaaagcgacgacactgacctatgcgtggacaatgagcttggatttgccaaggatcgtacgattagcaggttgacagagatcaacagcagagaatatttggaggacttcgaaatgagattgaggcaacagcagcagctgcccttgcaaggtctagataaaaggtggtgatgctgtactaaacataagaagcagaaggcttctgcgcctcatcttgaaattcttgtattcacacccacctggcttacataggcaactgagaagctatgcttttccaacagtggtgcatgtaaatgtccaataaagctatgtaagggcatttttgctaacaggtgagtgatctataaaatggcccaacctgggggaggggggataccatatcgttttttttagtgtatcacatatttccaaacctttagagaggcctcctaaggctcaaaaacagcatgagttacactgcataaagccatatataggctgaaagctttcgctgaactttgtgaattgagggaaaaaaagtctaacaattgttcatgtttttctattgtacgagcttttctgacatgcttgacgtagtaaggaagatctggttattattgttgcgtcatgtctggagcagatttgctttattttccatggaaacctgccttttccaagaac

SEQ ID NO: 204157 - DNA, 1641 bp, Zea Mays
cgggcctagagctctaactacgccgctacaggcaaaaagtaaaagacatagtgcaaggtgctctgtttccagaggttggtgtggataaaaggactggatctgctggtggaactggcgggcaagtagttgttcgagacattgaacttttctcctattgtgagtcatgcttgcttccattcagcatacagtgccatgtcgggtatgttccctcaggtggaagagtggttgggttaagcaagctttctagagtatctgatgtctttgccaagagattgcaaaaccctcaaagactagctaatgaaatctgtggtgcactgcatgctagcattcaacctgctggtgtggctgttgctctgcagtgctggcacattcctttaccagaaaacttggaatgcaagactttggaaggttggattagaacttcacattcatctcgctctggagtctttgaaggtgaaagcagcactttctggagtgacttcttggctcttgttaagcttaggggcatagacgtggaggctaaggaccgtactgtttctattccttggtgccctttaaggtctcatgaggttccactctctaacgggctctgcaagaaaaactcaactaatggcatggtttctgctgttacctcgatgctcttatcactcggagaggaccccctcaggaaagagcttttaggcactcctcagcgttatgtgcagtggctgatgaagttcaaagcatgtaatctactagacgtgaagctgaatggttttacacttagtaatgttagcttatatgagaggacaggtggaggcacaactgatcatggagcaatcagatcggagctgcacttgccattttgtgctcaatgtgaacaccatcttctgcccttctacggagtagttcacattgggtactttggcaatggaagcggagaaggcattgatcggtcgcattttcaggcgttggttcatttctacgggtgcaagcttcaggttcaagaaaggatgacaaggcagatagctgaagcggtttattcagtttcgcacaatggggccatggtcgttgttgaggccaaccacatttgcatgatctcaagggggatagagaaaataaggagcaacacggcaacaattgcagttttgggccagtttttggccgacccttctgccaaggcgtgcttcttacagaatgttttggattctgttggttctgcggtatgaatcgtatcgcaagcagcaaagaaaaaaatgtctagttggagtactatccagcaattgaaatttttagcaatctactggtctagcatgattcttctcgggtgcaaatttgtcacctgtgggactgtaccgaggatgtcacaagaaagcaccaaaagggttttggttctctcgtgttgtaccatgtcacttgtaaggcacttcaaataaaaaagaaatagtaatagttacaactgtgccaagaaggatatagtcattcgtacttttagatgttgtcaaaattgccatttgttcttgaaattttagtggagattactctggcttttgttgttgtaccgttgaatttgatgttacgccgatcgagatcagtaaaaaaaaaaaactcagatatctgttcgcttgaccatggtccaacgaaatgtaattcgttcttgca

SEQ ID NO: 204158 - DNA, 2497 bp, Zea Mays
tccccaccaccaccaccacctttctcctcactgcctagacggaaaagcatcgcgcgatcgccactgctccccccagagccagtcagccagccagccagcggcgcacgaaggaacgcacggtgcacttccgttccgtctcatcgtcatcagctatgcatcgcccgcgcagccatcgtctctgccgctcgcgcgtcgccgcagctgtttccgccgccatcatcatcggtctaggcgcggcgggcgtcggcgaagcggccaccggcacgttcatctacgccggctgctcgccgtccaagtaccagccgggcacccccttcgaggccaacctggagtcgctcctggcctccatggccggcgcggcgcccaaggccgggtacagcagcttcacggcgggtgccggcggcgttggcaacggcacgacggcgtacgggctgtaccagtgccgcggggacctggcgggggccgactgcgcggcgtgcgtgcgggacgcgctgggccagctgggccaggtgtgcgcggcggcgtacgcggcgtcgctgcagctggagggctgctacgtgcggtacgacggcaccgacttcctgggcacgcccgacgccgccatggtgtaccgcaagtgcagcaccagcagcagcagcgacggcgagttcctcagggaccgggacgccgtgctcgccggggacctgctgcagggcggcgcggccaataatggtagtagtaacgggtacaaggcgggcagctccggaagcgtgcagggcgtggcgcagtgcctcggcgacctcgcggcgcccgactgcgcggcgtgcctggcgcaggcggtcggccagctcaagggcacgtgcggcaccgccctggccgccgacgtctacctggcgcagtgctacgtcaggtactgggccgacggctactacttccgccccacacaagattattcgcaggacgacgtcgggaggactgtggccataatcgtcggaatcttagcagggctggcgatcttcgtggtgttcatctcgttcctcagaaaagctagcttggccactggaaacggcgggcttccacattccctctcagacggtggcacgaggacggcataggggagaaggagggatcgggaacgagattggcctgcatgcaaaatgcttcacaaagcacatgtagtctggttttgttagcaatagatttgggctatcgatcagaggagcactaccttgatttgggtcatcattttcggtccactgattatggcctacttgcgatcacccatcgcaacagcattcacatctgatcttttaatcatttcggtacttggatgaagatcagagttgagttggtattactactttacataggcacgagcacaagtgcatgatatgtacaaccgtcgatgggtccacagtccccagatgatacgagctcgctcacagggacatggggcagcagacctcggggggctttgctatttgatctttaccatcaagcactgtgtccccgagccatcgggctccacctcgccgagttgtagctgctgcaagcgctgatgctcgactccctcattttcatctcagatataccactgttgcagatgtttgcaaacgctctcatgtacttcatgccgtactgagtaagtgaaccacactgggactcgaaaatccgcacctaagcaaaagccaccaagtgaaatgagttaggcagcgcactgacaggatgggaatgtgcgcacagcagtaaggagcttcattttcatgtgcatgccttgtatcaagagtcgaataagaaaaatcaccatactcaccatcctcttcaaacagtcccagtcatcgactaatggttgaccagaggttctaacagcctcaagcatcgaaggccctttctcaaatccgaagacgagcctcccaacgaaatcgatactgctgtcaagatgcttcctgtgctgaacagtttctttaatctctatgagagccctcagcttctcttcggtccccccatttaactgctcgtactgaaagaaagaactgaacattaggaaacaagaataaaaggaggctactgactaccacaagtgattggtagaactccagcttggtattaggatatggccatcagatggtctatatatggtcatgtaaaacactgttttgcactgtttgcaaagtaaagtttaaaatgagagatagaacgagtaagctactggagatagctttagaggtgtgagcttgacatcgagatgagtgtacgagctctaacccctctcaagcatggtgctaacgcaacagcctctcaccaagaccacatccacaattgtattagaaagctagttcttcctccaatcttctctaataagaagcccatctacaagacttagttaagccataccaaacaagacacgatttcaacttttaatggtgattgtgtgaatggaaaagccacagcaccttttagccattgatggaacaagcgaaaccactttcttgaactgtattgtcaattattatctaaa

SEQ ID NO: 204159 - DNA, 1738 bp, Zea Mays
cctcgctcccgcaatcaacacgtcctcgccttaccatgccgatccagccccagctctccatggaaggcgcgacgaccgagccccaactctccatggcctcccgcaatcaatagtctctcgccccaccacgacaaccctgccctggctccccatggaaggccatggaaggtgtgactgagccccagctcaacaaggaaggcgcgatccactctcctcgccccaccatcggcgtccactatccatcgaaaagtcccgccttcctagtcccccttccccacctacgacgaccgccgcggacgtatcaaaaaagattcctcctcccagtgtcgcctccacgcgtggaggcggcgatccattccgccccctaggattttgctcctcccgatccggacgtcatatctcgcgtggcggcacgcggatctgggggtttctctagaggcggcggtggcggccggaacaggggcagatggcgctctcggggatgcgagggctcttggtcttcatcagcgacatacgcaactgccacaataaggagcaggagcacctccgcgtcgagagtggacaccacacttcacccattccttctcggcgctcgcccaggaagactatagccaggtacgatgatactatatattatgtagtgttccttgcacaatctagcagaccgggacgccagtggggaggcgacgggtgttcgtgtagatagagactggctgcattctcggcatgtacctggaccgcggggacaacatgcacaccgtcaagcgctacttgcagctcacgctcaacgtgcccagcggcgagaccttgctcaccttcgacgatcgcgtcctagaccaaaaatgcttgggtaaaggagtttggcttggaggctatgtggaagagcccaaatggcacaattaggaacattctgaatggcactgtgttcagagaaccaatcatctgcaaaaatgtcccatagcttgttgtagatatggaaggaagaccacaatcatagagggaaaagaagagcaagttgagctggaggtgttcaacttcactggtgtaggaggagttgccttatcaatgtacaacactgacgaggtgcacttggtgcttgctactattccattaagaaatggccattgtatcttcgcaccaagaacattattttgaagaaatattatggcaagttcaagtatctccagtttcttgttttaccatatccaatccaatttgtgcatgggcctccgacgatgccacggtgatcaaggtagacatcgtcaatagccatgacacgctgctcgccgtcgtccaggtcatcgccgacctcaacctaataatctggaaggcatacttctcctctgatggcagctgattcatggacgtgttcaatgtcaccgaccgtgaagtaacagggttctcgacgcccaatcatcctacatccagaagacgctgtaggtggatgactggtactatctggaggcacgcaacacggtgggcatcgtggcattggaggactacacctccatcgatctcatgggcacagacccgggcctgctattcgaggctatctgcccagttaacaagaagatggcttttgtcggttatgccagagcatgagcttgttcatgttggtccagatacccgcttgaactacaaagttatcgagctacgaacactctcaaaccaagccatattccagatctagtgtcaagttgaaaacaaagcgaatcgctgaatgaaggatagagacggc

SEQ ID NO: 204160 - DNA, 1745 bp, Zea Mays
atcaattgaaccaaccttttagctatttttggtccgctgtattgatgactcgtccttgtttgctaagactttccgagctgttcttcttgacgtatgatcgtcgtttcattcaagaatggttaagcgctggaaaccggacatgcccacagactcaacaagtcctttcgaacacaattatcaccccgaaccaccttgtgagaagcatgatctcacagtggtgcacagacaacgggatcactctgccaccggttgagaaccaagatgaagatctggttacaaacaatgagcgggagacatttcgtaaactgtttgagaggatcgtatcgtcgtcgtcagacctgtctgagcagagggaagccattaaagagctcaggctgcggactaagtgcaacagttcactaagagcagcgataggagagagaccggattcaatctcgcagatgatttccgtagcgtccagcccagagctagaaaacagtgcagaagttgtggaggatacggtgacagctatccttaatctctctatccacgagagcaacaagaagatcattggagacgacccactggcagtcccgttcctgatcaaggccttacagtcaggaaccatggaggcccggagcaacgccgccgccgccatcttcagcctatccgcgctggacggcaacaaggcgaggatcggcgagctcggcgcgatgaggccgctggtggagctcctcgagcacggcagcacggcagcgaggaaagacgcggcctcggccatcttcaacctgtgcacgctgcacgagaacaagtcgcgggccaccaagagcggggccgtcgacgtgacgctgagggccgtcgcctgcgccggggacggctctggctccggctcgctggtggacgagtctctggccgtcctcgcgctgctgtcgggcgaccacgaggcggtggaggaggtcggcgagacgggcggcgtggcctccatgctccacgtcgtgaaggacgacccgtgcaagcgcaacaaggagaacgcggcggccgtgctcttcgcggtctgcgtgtacgaccgcaccaggctgcgggaggtcgccgagcacgagaagctgaacgggtccctgggctggctcgcgcggaacggcacgtcgagggcgcggcgcaaggccgccgggatcctcgacaagatgaagaggtccatgcaccacccgcactactcctgctagtgctgccgccgtggctgtgtgtgatcagggggggaataagggtggtgtgtgttgtgttggactgctcgttgctttcgcgctgtatatatatatatatatatatatatatatatttcagcctgcgtatatagctctatactcttggtctctgtggtttggtacatatatgagggtacattttttttccgtctcgcggagtaagtggtggtggtttccccctctggaacgttcttgttcgtctgaaatttgcacttgatatgtttcttcagggtctttgcatgcacatggtcctgatgcgtatctggtgccgtatatggatttttatttttgtttgtttggtcacattatatgggtggtgtttcctgtggtaccttttttctgttgagatgagtcaacattcccccgtgctgctacagacgggtcgctgagacgtatgcttcacgcgttgtggaatcagatacctaatctgctgacttgtacatattgcaagtccctttcaggtctttctccggctttcgagataaccagcactcggttgtctgggat

SEQ ID NO: 204161 - DNA, 1682 bp, Zea Mays
ctgcaacacgagacccggattttatgacgtatgatcgtcgtttcattcaagaatggttaagcgctggaaaccggacatgcccacagactcaacaagtcctttcgaacacaattatcaccccgaaccaccttgtgagaagcatgatctcacagtggtgcacagacaacgggatcactctgccaccggttgagaaccaagatgaagatctggttacaaacaatgagcgggagacatttcgtaaactgtttgagaggatcgtatcgtcgtcgtcagacctgtctgagcagagggaagccattaaagagctcaggctgcggactaagtgcaacagttcactaagagcagcgataggagagagaccggattcaatctcgcagatgatttccgtagcgtccagcccagagctagaaaacagtgcagaagttgtggaggatacggtgacagctatccttaatctctctatccacgagagcaacaagaagatcattggagacgacccactggcagtcccgttcctgatcaaggccttacagtcaggaaccatggaggcccggagcaacgccgccgccgccatcttcagcctatccgcgctggacggcaacaaggcgaggatcggcgagctcggcgcgatgaggccgctggtggagctcctcgagcacggcagcacggcagcgaggaaagacgcggcctcggccatcttcaacctgtgcacgctgcacgagaacaagtcgcgggccaccaagagcggggccgtcgacgtgacgctgagggccgtcgcctgcgccggggacggctctggctccggctcgctggtggacgagtctctggccgtcctcgcgctgctgtcgggcgaccacgaggcggtggaggaggtcggcgagacgggcggcgtggcctccatgctccacgtcgtgaaggacgacccgtgcaagcgcaacaaggagaacgcggcggccgtgctcttcgcggtctgcgtgtacgaccgcaccaggctgcgggaggtcgccgagcacgagaagctgaacgggtccctgggctggctcgcgcggaacggcacgtcgagggcgcggcgcaaggccgccgggatcctcgacaagatgaagaggtccatgcaccacccgcactactcctgctagtgctgccgccgtggctgtgtgtgatcagggggggaataagggtggtgtgtgttgtgttggactgctcgttgctttcgcgctgtatatatatatatatatatatatatatatatttcagcctgcgtatatagctctatactcttggtctctgtggtttggtacatatatgagggtacattttttttccgtctcgcggagtaagtggtggtggtttccccctctggaacgttcttgttcgtctgaaatttgcacttgatatgtttcttcagggtctttgcatgcacatggtcctgatgcgtatctggtgccgtatatggatttttatttttgtttgtttggtcacattatatgggtggtgtttcctgtggtaccttttttctgttgagatgagtcaacattcccccgtgctgctacagacgggtcgctgagacgtatgcttcacgcgttgtggaatcagatacctaatctgctgacttgtacatattgcaagtccctttcaggtctttctccggctttcgagataaccagcactcggttgtctgggat

SEQ ID NO: 204162 - DNA, 1744 bp, Zea Mays
aaaaaattccgtctactagttttttacttttccatttgttacaactttctctttcggcgatactgttgcttttgtcgatcgattattgacgtatgatcgtcgtttcattcaagaatggttaagcgctggaaaccggacatgcccacagactcaacaagtcctttcgaacacaattatcaccccgaaccaccttgtgagaagcatgatctcacagtggtgcacagacaacgggatcactctgccaccggttgagaaccaagatgaagatctggttacaaacaatgagcgggagacatttcgtaaactgtttgagaggatcgtatcgtcgtcgtcagacctgtctgagcagagggaagccattaaagagctcaggctgcggactaagtgcaacagttcactaagagcagcgataggagagagaccggattcaatctcgcagatgatttccgtagcgtccagcccagagctagaaaacagtgcagaagttgtggaggatacggtgacagctatccttaatctctctatccacgagagcaacaagaagatcattggagacgacccactggcagtcccgttcctgatcaaggccttacagtcaggaaccatggaggcccggagcaacgccgccgccgccatcttcagcctatccgcgctggacggcaacaaggcgaggatcggcgagctcggcgcgatgaggccgctggtggagctcctcgagcacggcagcacggcagcgaggaaagacgcggcctcggccatcttcaacctgtgcacgctgcacgagaacaagtcgcgggccaccaagagcggggccgtcgacgtgacgctgagggccgtcgcctgcgccggggacggctctggctccggctcgctggtggacgagtctctggccgtcctcgcgctgctgtcgggcgaccacgaggcggtggaggaggtcggcgagacgggcggcgtggcctccatgctccacgtcgtgaaggacgacccgtgcaagcgcaacaaggagaacgcggcggccgtgctcttcgcggtctgcgtgtacgaccgcaccaggctgcgggaggtcgccgagcacgagaagctgaacgggtccctgggctggctcgcgcggaacggcacgtcgagggcgcggcgcaaggccgccgggatcctcgacaagatgaagaggtccatgcaccacccgcactactcctgctagtgctgccgccgtggctgtgtgtgatcagggggggaataagggtggtgtgtgttgtgttggactgctcgttgctttcgcgctgtatatatatatatatatatatatatatatatttcagcctgcgtatatagctctatactcttggtctctgtggtttggtacatatatgagggtacattttttttccgtctcgcggagtaagtggtggtggtttccccctctggaacgttcttgttcgtctgaaatttgcacttgatatgtttcttcagggtctttgcatgcacatggtcctgatgcgtatctggtgccgtatatggatttttatttttgtttgtttggtcacattatatgggtggtgtttcctgtggtaccttttttctgttgagatgagtcaacattcccccgtgctgctacagacgggtcgctgagacgtatgcttcacgcgttgtggaatcagatacctaatctgctgacttgtacatattgcaagtccctttcaggtctttctccggctttcgagataaccagcactcggttgtctgggat

SEQ ID NO: 204163 - DNA, 2003 bp, Zea Mays
tctctctcccctccctcctctccaccgccaccgcttcatccccttcatctccacctcctacgaggcggccgccgcctccatgctcggccgcgaccgcagggcctcagctctagcagcgttcaatactgtaggctagcggagaggtgggggatggcgaagccgacgccttcgacgaggctgcagaggcgctcgccaagctcagggacgccgagcttggcccccgcaaggacaggaccggcgacggccgggagaacaagcgcagcacggaggccgccgtgccggagcacttcctttgccccatctcctcagagatcatgagggatcccgtcgtcctcgcctccggccagacgtatgatcgtcgtttcattcaagaatggttaagcgctggaaaccggacatgcccacagactcaacaagtcctttcgaacacaattatcaccccgaaccaccttgtgagaagcatgatctcacagtggtgcacagacaacgggatcactctgccaccggttgagaaccaagatgaagatctggttacaaacaatgagcgggagacatttcgtaaactgtttgagaggatcgtatcgtcgtcgtcagacctgtctgagcagagggaagccattaaagagctcaggctgcggactaagtgcaacagttcactaagagcagcgataggagagagaccggattcaatctcgcagatgatttccgtagcgtccagcccagagctagaaaacagtgcagaagttgtggaggatacggtgacagctatccttaatctctctatccacgagagcaacaagaagatcattggagacgacccactggcagtcccgttcctgatcaaggccttacagtcaggaaccatggaggcccggagcaacgccgccgccgccatcttcagcctatccgcgctggacggcaacaaggcgaggatcggcgagctcggcgcgatgaggccgctggtggagctcctcgagcacggcagcacggcagcgaggaaagacgcggcctcggccatcttcaacctgtgcacgctgcacgagaacaagtcgcgggccaccaagagcggggccgtcgacgtgacgctgagggccgtcgcctgcgccggggacggctctggctccggctcgctggtggacgagtctctggccgtcctcgcgctgctgtcgggcgaccacgaggcggtggaggaggtcggcgagacgggcggcgtggcctccatgctccacgtcgtgaaggacgacccgtgcaagcgcaacaaggagaacgcggcggccgtgctcttcgcggtctgcgtgtacgaccgcaccaggctgcgggaggtcgccgagcacgagaagctgaacgggtccctgggctggctcgcgcggaacggcacgtcgagggcgcggcgcaaggccgccgggatcctcgacaagatgaagaggtccatgcaccacccgcactactcctgctagtgctgccgccgtggctgtgtgtgatcagggggggaataagggtggtgtgtgttgtgttggactgctcgttgctttcgcgctgtatatatatatatatatatatatatatatatttcagcctgcgtatatagctctatactcttggtctctgtggtttggtacatatatgagggtacattttttttccgtctcgcggagtaagtggtggtggtttccccctctggaacgttcttgttcgtctgaaatttgcacttgatatgtttcttcagggtctttgcatgcacatggtcctgatgcgtatctggtgccgtatatggatttttatttttgtttgtttggtcacattatatgggtggtgtttcctgtggtaccttttttctgttgagatgagtcaacattcccccgtgctgctacagacgggtcgctgagacgtatgcttcacgcgttgtggaatcagatacctaatctgctgacttgtacatattgcaagtccctttcaggtctttctccggctttcgagataaccagcactcggttgtctgggat

SEQ ID NO: 204164 - DNA, 2025 bp, Zea Mays
catccgccagccctcctggccccattcctctctctcccctccctcctctccaccgccaccgcttcatccccttcatctccacctcctacgaggcggccgccgcctccatgctcggccgcgaccgcagggcctcagctctagcagcgttcaatactgtaggctagcggagaggtgggggatggcgaagccttcgacgaggctgcagaggcgctcgccaagctcagggacgccgagcttggcccccgcaaggacaggaccggcgacggccgggagaacaagcgcagcacggaggccgccgtgccggagcacttcctttgccccatctcctcagagatcatgagggatcccgtcgtcctcgcctccggccagacgtatgatcgtcgtttcattcaagaatggttaagcgctggaaaccggacatgcccacagactcaacaagtcctttcgaacacaattatcaccccgaaccaccttgtgagaagcatgatctcacagtggtgcacagacaacgggatcactctgccaccggttgagaaccaagatgaagatctggttacaaacaatgagcgggagacatttcgtaaactgtttgagaggatcgtatcgtcgtcgtcagacctgtctgagcagagggaagccattaaagagctcaggctgcggactaagtgcaacagttcactaagagcagcgataggagagagaccggattcaatctcgcagatgatttccgtagcgtccagcccagagctagaaaacagtgcagaagttgtggaggatacggtgacagctatccttaatctctctatccacgagagcaacaagaagatcattggagacgacccactggcagtcccgttcctgatcaaggccttacagtcaggaaccatggaggcccggagcaacgccgccgccgccatcttcagcctatccgcgctggacggcaacaaggcgaggatcggcgagctcggcgcgatgaggccgctggtggagctcctcgagcacggcagcacggcagcgaggaaagacgcggcctcggccatcttcaacctgtgcacgctgcacgagaacaagtcgcgggccaccaagagcggggccgtcgacgtgacgctgagggccgtcgcctgcgccggggacggctctggctccggctcgctggtggacgagtctctggccgtcctcgcgctgctgtcgggcgaccacgaggcggtggaggaggtcggcgagacgggcggcgtggcctccatgctccacgtcgtgaaggacgacccgtgcaagcgcaacaaggagaacgcggcggccgtgctcttcgcggtctgcgtgtacgaccgcaccaggctgcgggaggtcgccgagcacgagaagctgaacgggtccctgggctggctcgcgcggaacggcacgtcgagggcgcggcgcaaggccgccgggatcctcgacaagatgaagaggtccatgcaccacccgcactactcctgctagtgctgccgccgtggctgtgtgtgatcagggggggaataagggtggtgtgtgttgtgttggactgctcgttgctttcgcgctgtatatatatatatatatatatatatatatatttcagcctgcgtatatagctctatactcttggtctctgtggtttggtacatatatgagggtacattttttttccgtctcgcggagtaagtggtggtggtttccccctctggaacgttcttgttcgtctgaaatttgcacttgatatgtttcttcagggtctttgcatgcacatggtcctgatgcgtatctggtgccgtatatggatttttatttttgtttgtttggtcacattatatgggtggtgtttcctgtggtaccttttttctgttgagatgagtcaacattcccccgtgctgctacagacgggtcgctgagacgtatgcttcacgcgttgtggaatcagatacctaatctgctgacttgtacatattgcaagtccctttcaggtctttctccggctttcgagataaccagcactcggttgtctgggat

SEQ ID NO: 204165 - DNA, 519 bp, Zea Mays
tcattacatgctctgcacagttccaacgaccccttgcaggctgattccattctacggaggggctgcataccatgactaccatcactatgcaggaggccgtagccaaagcaactttgcacccctgttcacctactgtgattatttatataggacagacaaaggctacagataccacaagctaaagcaagagaagctgaagagtctagcagaaaatagtgcggataaaggaggcaactactcattcgacgaagggaaaaagaacagatatttttgtgcctgagcgtacgaagaataatcaaggctattacttcgtcctgttcgaagggaagatttgcaaataaataattcgaatttactgcagaagctcttgattggtcgacgaacaaatatattgttgcaatccgtttcgtgtattctatatatctaatatgaaacttttttgtcggaatatatggatcatcccgatacattactttataagtaatgaataccacataagtttttgttggaagatggtct

SEQ ID NO: 204166 - DNA, 1205 bp, Zea Mays
gagctgccatgaggcccgaacagttgaagctactagcgtgtagctagggaagagaagcgcgcgagtagctagcagacgtacgtaggcagaagcctagctgggtttgaagggccccgatcgatgatcccctacgcgactgcggcggaggcggagggagcactggggcgcaccatgacgtgggctgagacagcatgcatcgccccgctgcccctgctactcctagagcagttcgctccgtccgtcgtgctgccgtacaagctgcagccccgggtacggctgcccccggcagcctccctcagctgctacatggacgcggcctgcatctttccgctcgccgttggccttcagttcgtctcctatcctgcggtcgccaagatactaaggacccgaatgggactgccgttgccgtcggtgagggagaccatcgcgcagctagtcgtatactctctagtggaggattacctcagctactggatgcaccgtctgctgcacacccagtggtgctacgagaagatccaccgcgtccaccacgagttcacggctcctacaggcttcgccatgtcgtacagccactgggccgagaacgtcgtcctttctatcccggccttggccggcccagtgctcgtgccatgccatgtcaccacgcagtggctatggttctccatccgcctaattgagggcattaacacgcacagcggttaccatttcccgttcagcccttgcaggctgattccattctacggaggggctgcataccatgactaccatcactatgcaggaggccgtagccaaagcaactttgcacccctgttcacctactgtgattatttatataggacagacaaaggctacagataccacaagctaaagcaagagaagctgaagagtctagcagaaaatagtgcggataaaggaggcaactactcattcgacgaagggaaaaagaacagatatttttgtgcctgagcgtacgaagaataatcaaggctattacttcgtcctgttcgaagggaagatttgcaaataaataattcgaatttactgcagaagctcttgattggtcgacgaacaaatatattgttgcaatccgtttcgtgtattctatatatctaatatgaaacttttttgtcggaatatatggatcatcccgatacattactttataagtaatgaataccacataagtttttgttggaagatggtct

SEQ ID NO: 204167 - DNA, 701 bp, Zea Mays
gagctgccatgaggcccgaacagttgaagctactagcgtgtagctagggaagagaagcgcgcgagtagctagcagacgtacgtaggcagaagcctagctgggtttgaagggccccgatcgatgatcccctacgcgactgcggcggaggcggagggagcactggggcgcaccatgacgtgggctgagacagcatgttaccatttcccgttcagcccttgcaggctgattccattctacggaggggctgcataccatgactaccatcactatgcaggaggccgtagccaaagcaactttgcacccctgttcacctactgtgattatttatataggacagacaaaggctacagataccacaagctaaagcaagagaagctgaagagtctagcagaaaatagtgcggataaaggaggcaactactcattcgacgaagggaaaaagaacagatatttttgtgcctgagcgtacgaagaataatcaaggctattacttcgtcctgttcgaagggaagatttgcaaataaataattcgaatttactgcagaagctcttgattggtcgacgaacaaatatattgttgcaatccgtttcgtgtattctatatatctaatatgaaacttttttgtcggaatatatggatcatcccgatacattactttataagtaatgaataccacataagtttttgttggaagatggtct

SEQ ID NO: 204168 - DNA, 1215 bp, Zea Mays
ctgctgcgtcgtcatcgttcatccacacgtcgacaagtcgtcgatgctggaggaggcgatcgagtacctgaagacgctgcagctgcaagtgcagatgatgtcgatggggaccgggctgtgcatgccaccggcggcgatgctgctgccagcgatgcagcagcagctcctgcaccaccaccccatggcgcacttcccccatctcggcatgggcctgggcttcggcatgggcgcggcggcggggttcgacatgctcccgttcccgtgcgtcgcggccggcgcccacttcccgtgcccgccgggggccatgttcggcgtgccggggcaggcgatgccctcgctgccggcggcgttcgctcacatgtacggcgctggcagtggcgccgggccggctgggcagacggaagctgctgatgcggctgctcctgcacggccaggagaggcagagcagggtgatcagcaggtgcagcacgcgaagcagacgtgatggcgaaggcgacgaggcggctgccccccgaacattcccgtttggttttatggtgattatgagaatctacccatcaaaatctgctaagagagagccaaacaaacaggatattacaccttggattctgtgcattatctcacaatcaaggttcaagttgattttcttggttaatgtgtagaatccaaaaatcggaaccaaacggcacagagtcctttcttttggttgctctggtgttaggtgagatgataagagatgcgcgcgcatgcatgaagtgttttttacccagctagccggctagcctgctataccttgcctcgtaaactgtaggagaatgtagaggaacgcttgttttcacccatgagactggtctttgatgtttcatgagcagaaaacgccgtcccctgcacggaagctggccatcaagattcaagaattgacatggtggtgtttggttaagtatttataatttgataggtaactgataacactaaactatgtttgtataagtccaatcgtaatgaaatattccctccgtttcgttttagttgtcgctgaatagtgcaaaattgaactatccagcgacaactaaaaagaaacgggggagtatcacgctaagaactagtatctgacattggtctactcaaacttgttgccgctggtacttagtgtaaattattattgttgccatttatattagggaaatttggatccataccattaaaagatcacca

SEQ ID NO: 204169 - DNA, 1274 bp, Zea Mays
cagcaggagcccggtgccacatttactcactcactccccaatccacccaccaaccaacccagaacctctctacattcctcttcctcctctatagtctatatacacacaccaagagcaggctgcagcaggctcacgccgcaacctagctagcctgcacgcactctcactgaccacgaccagcgctcagccttctgctccggaagctagctctccggccagccaccccaccccgtccacccgacaatggcggccgccgtggccctcctcctgctctccgccctcggcggagcggcggcgcaggtgttccctccgtggaacggcacgttcccgatggggcccgggttcggaggcgggagcagcagcggcggcgcggccgcgggcgcgggcgcggggacgggcgtgccggcgatgttctacgccaggcagctcgacgcgctctacggcctgggcgcccgcaggttcgtcatcgccggggtgggctccatggcctgcatccccaacatgcgcgcgcggagccccgtcaacatgtgctcgcccgacgtcgacgacctcatcatccctttcaacaccaaggtcaaggccatggtgaccagcctcaacgccaaccgcccggacgccaagttcatctacgtcgacaactacgccatgatctcccagatcctaagcaacccgtggtcctacgggttcagcgtggccgaccgcggctgctgcggcatcgggaggaaccggggcatgatcacctgcctgcccttcctgcgcccgtgcctcaaccgcaactcctacatcttctgggacgccttccacccgacggagagggtcaacgtgctcctcggcagggccgccttcagtggcggcaacgacgtcgtctaccccatgaacatccagcagctcgccgcatggcagccgtgactcagtgcaaagctatcgatcgatcgatgcgtcgttttgtagcgctacttactgctatagcgtgtgtgtgtggtcatgagtaggagggagctgagcggagagttatggtacggtgtgtatccgaccagtctcctgttgtttggggggtcaacatcgtgtctcttttgtttttggttcatcatatcagttagttatctatcagtgtttgttcgcttattacctgtactgcatcacggagataagtggagttctatattgggttttttaaattggtgccctcagttttggtggtatgctcacatataaccttagttgtgttttttcttatgtggttgtctccatgtttgccaaagttagctccgatt

SEQ ID NO: 204170 - DNA, 2839 bp, Zea Mays
ctatcagcagcctcacgatgacctctcccccctcctcctttcttgctcgagcctctctctattctttcgcatggtaattgttatgccaagaaaagattaatgccgctagattggatcttggacaaggtgaaggaggaggaggaagagacaggaaaggatgctgcagcgggcagcgagcaatgcatattcatggtggtgggcaagccacatccgcaccaaacagtcaaaatggctcgacaaccacctccaagatatggaacacagggtcaagtgcatgctcttgctccttggggaggaggccgattccttctcaaagagggcagagatgtactacaagaggcgacctgaggtgatcactcaggtggaagaggtataccgggcatacaaggctctggctgaccggtatgacatcatgtcaggggagctacacaaagcaaatcacaccattgccacagcctttcctgaccaggtccagtatgcaatgctggaagaggaggatgataacatcccaaaggcgttcaccccagtcgacccacgcaaaatccacaagtcaactgttgatggattgatgatgaagaagaagaagaaaggagagcatcctgggtccatggttggaggagcaacctcagctccagtcaacaaggagaatgcacgggaagagatcagcaggctacagaaagctatattggccatgcagactgagaaagagtttatcaaaagctcctatgagagcggcattgcaaagtactgggatctcgagaaggaaatccatgacatgcaggagcaagtttgtcacttccaagataagtttgatgaaagcgcggtgattgaagatgatgaagccagagccttgatgacagcgactgccctcaagtcctgcgaagacaccattgtcaaactgcaagaacagcggaaggcatctgcggagcaggcagtgggagaatcggaaagagtcaaggttttcagagagaagctcaaggctataatgaacaaacacggcaaatctctaccggtctctctggacctttcagagaagaacaccactcggaagagccatggcgcaggaatggagaatgtgtgctatgtcaaacaatgtgcaatagacgcggagtctatcattgacaagatcaaggaacacttcgagtctgactgcaacatctccatggcagaagttacagagaggatcgatgaaattgtcaacatggtcgttgacttggacctcatggtttcagcacaaacctcccagatcgatcgacttcgccaggaaaacaatgagctggaggattccctgcaaggcctggaggacgagaatactaccgagctgcccagcactggatcaaatgaattgatcgagaagcttaggcaagcagaagaggagcttgtcagggctcaggctctcgaaagctccttccacaaagatgaaagcacaatccgttccaacttcttagaagcaataagcagactccatgagatatcagagctgttgctatcgccggtctgtgattccgcatctgccgcacgcacgtcccaagaaattgagtctttagggccgtcgtcatcaaatgagtgctgtgacatggagaaggtggtggatgatcctaacgatgcacttgtggcagacagcgatgagtcgtcgtcaggtagcactaagcttattagtgagcaacagttagacgtcggccagcaggacagaatttcacgtgagaggggttcattggtacggcttcgtcacatttcttcaggtaaccttggtggaggttgcgatggacaggaaggcctgtcgtcttctgccgtgactgacatgatgaagctgcaggagaggctcacagatagtctagacgataaggagaaggtcctcttaggtgagtacacttcactccttgaggactacaaggacgccaagaggaagcttgtagagatggagaaaaagaaccaggactgcctgaatgagatccggacactgcgtgaaggaatcatcaaaagcagctctgcagcagcaggggaaggaggcagcgagggttcgtgcaagaggagcttctctcgccggggtcacaggaggaccccaagctactcgtctatccatcagaggagaccaagcgtttcttccatttcaaggctgataaggatgggctcggccatccaagaaggtgcagcagggagcggcaagcaaagtgacctactggacgacctgaggctgccggctatcgcggaggcagagaatgcctcgcctctggaagagaagttcagaagggacatcgacacgctcttggatgagaatctcgagttctggatgaagttcagctcgtcgctgcagcgggtgcaggagttccagaacaagcacgacggcctgcagcggaagctgcagctgataaacgaccaagacggcaagcaggacggcaagcaggagccgacaaggaggaggaggaggaggacgacagctcgtctggccatggcggcggcggcggcagcaagtccaaggtgccgttgcagtcgttcctcttcccggccaaacctaagaagacgtctctgctggcccgtgtcacgccagtgctcccgaagcagtcggtggacatgaagtttcttgccaagttgccaaggtagcaagcatgctctgttagataccatacatcttttgtgttgagtcagaccagatgctaagaaatgtaattcccgagtacgagacaattgagcttttcttttttttttctttctagtgagtgtagcatgcatacttcctccgtagtccgtatcaaatcaaagttcacctttagctctgcgatggcgttttttagaatattgatgcctataagttaattctctgtcataaaatattgcatga

SEQ ID NO: 204171 - DNA, 1599 bp, Zea Mays
ctggggagcccctcccaaacatggcctacgtctatgaacattgtgaatatttccgacaatctaacttttagaccaactacaattatttcctatcaagctgaaagtggcttagtcgagccgacaacactacttgatggcagtgaacaagcagttatattgctttgtcaggatattgatattatttctgttatccttattttgttaacgtcatttctatgttttgattagtgctgtatcatcgactggtggaggacttgtatgtaattgtgtgagacaatcttaaagccaggcttcaactgcactgtccgcataaggaacaagagaaataaagcaaaacgtcggaagaaatcaaactgttgtcagaacagtgtttcctatgcatgccatttctgtggagatcagaacctaatattgggtagtgggaagggtgttgttcagagcctgttactgtcaagagggcatgctaccatgaactcatcccatataattgtgagaggaaacggtagcaacacaagagcacatgataagaaagaagtgcttgagctttctcaagcagcaattttgcaagtggaatcgtcatctctgttgaggcagtcgactactgaaagtgacgagcatggcgaaaggttaaattgtaatcttgatgaacagatgcgtgaaactagccatatttttcctgagaaggttaggatatgtgaagctactttgcaagcagaacttgcacctggttcatcatttgtcacgcctcagaaaatgaaaccaccggtggtgactgttgcaaaagattcagcaggactactcaagacaggaagtggcatgatttctggctcagccattgacgccctctcaggctccagcaagtctgcctcgaatggctctagaaataatgtgaaatatgcagcaagagattcttctcaggtttctggcagctcaaggaagcgggcaaggaagggttggacaacgctgaaacagatggctgagaaggatgagctcgagaggaaggagaagatggggaattttgtaatcccgttcttcatgcagtaagtgggatgctaaaatatttgccggcattgtgatcgtttggtcattagtttatctattgagaaggacagtgtttttttttgccggctagattttgcagtattaaagatacgaggttaacaaagtttggttgaattaacaacatgtgattaaaggggaacacgtccaaggcgagccatcagccatagcaacattatatcctgttgcggtgcgattgcctacgttcagccggaactttgtaatccagctgcaaaatctaatagctcgctctacgcccaaaattacattgtcggcaacaaattctagacgaaccatgataacattgacgatgaacctaaaaacgcagaagcattttgagtcttcctcatcaatgagtagtaaactaagcaaaagaaaaatcacttccttgtcaaggagcttaggagttgtttggaagcaaagtatttttttgggttttcagataaaagtatgatattagagcatatcatgttattcttcgtcaggaggtgtttgactatattgtaaaaactcagttgtgaatatcattgtttaatagtt

SEQ ID NO: 204172 - DNA, 1799 bp, Zea Mays
ctcgccggagaagacagctatccccatggaccgaaggtccatgacaaacccttgcttcacttgcaacagcatatgaaagaaatcaatcacaaggttccactgaacaccaaggtcatagctactgtatcgtatcagattgtgccagctgacactcagtatgctgaaatacctctggcagttgtgagatcatcttatcaacgtgtgggtattggcaagctcttatataaggaactatcgcagaggcttcagaatgttggtgttacatccattttctgctgggcagataaggtctctgagggtttttggctaaaacagggttttgtatctgttggagaagtgaatactaaaggtaagattcgaaagattccagtaagggctgatataaagagagcattatgctttccaggaggatcaacacttatggttgcccaccttaataaagaattgccagtcatgcaaacatgggagaaaccccagacatcactccatactgtagtaccagatagtatctctcctggtgataccaatgtctcatgtgagaacatggtcctccaaacatataaacgtcgtgttgttagaaatactgcaaaggtggcaacaaatgaagtcagcaatgcttatagtgaaagttcattatctgagcaagagccaaagaaacgcatgtacaaaacatcgtcatcatcactaaagtcaaaaagaataagatgtagcaatcatgacgacaattgccaagacatgaatcaaattggtgtgcatgacaataacttgtgcagttcccctgagaattcactgcatgtaattcttaaagaacatcacattcctagcactggagctcatatttattctaatggtagtggaagccctacaattatgctcatgaatattgcagacgaacaaaagaaggcacgccttacaaaggttgttgaaacacttagggggtttgttacttgcgatggacattcatgcacacatgttgttactggaaaagctcgcaggactatgaatttctgtattgctttgtgctctggtgcttggataatttccccaaactggttaaaagaaagcttcagagaagggcagtttgtaggagaagcacaatatgttctggaagatgaagaatataggatgcaatataagtctgaacttagagatgcagttatgagagctaaagaaaggcctaactctttatttgctggttatactttctgtctgtcaaagtacatccagccctcttttgatgttctctcagccattattaaatctaccggaggcaagatcataaaaaaactgagtgagttagatgagctgtcccggacaatctttttggtgtgtgaagaggaggcagaacttgcattggttgcagcaaaaagtggcatcaaaacattcagcagtgactggttcatgagctgtgtcatgaaacaggaacttgaccttgaggcccctcagtttattgtatctctatgatgtgcctacagttcaagtcctcctaactcctaatatatctctttctttggttgggatataaattgtttctcctggttcttcgtggatatacaaattttctcatttccttagttacaaaagctgaagtagtgtcaaactagttatcatcctgtgacgatgatgacctgtttaaatggaaaaggttgcggtggagctattccaatttctgtataggcccatttgattcccttcattttgagtaaatggaaactaactaatggagtaggttatttcttttaaaatgtgtcattccatatctttccaaagtttatatataagtctatcttaaattcacc

SEQ ID NO: 204173 - DNA, 2363 bp, Zea Mays
tggacgcataaacattagccatttcttacttagttttttcatccgcggtggcatccacgagttgctgaagccagcccataaaatccatcctgcgcgcgtgcggcctctccattttccccgtcttcccgccaccccgaaaatttccgcccgaattccatttcaacattctcacatttcgcttcccagttgccacgaagaactcgaaatccaatccccggcgtcctagctcctccagattccgcagaccccgatccatcctcgacagcgactggcatagcagattccttcccagatcagatggggagaccgcggaagaccaaggccgagccggagccagcccccgccttcccgatcggcaactgcaaggtggagatccgtgggagcggactgcggtgcgagacgacagagcagggtctgacaatctccggacccaggggcgccaaggtcgtcgtctctggtgagggctctcagttcatccttctcaatccaagcgatgcagatagccaaaccaagtccttgcttgaggaagtgctaatgctttataagaaagaacttcctactatggactatgctgcagacactgggagaaagtcagggtttcttgaaacatgcacaactaatgggaaatacaagactctaattctgatgtctagctctgcagcacagcatgaagaggtcatagctactgtatcgtatcagattgtgccagctgacactcagtatgctgaaatacctctggcagttgtgagatcatcttatcaacgtgtgggtattggcaagctcttatataaggaactatcgcagaggcttcagaatgttggtgttacatccattttctgctgggcagataaggtctctgagggtttttggctaaaacagggttttgtatctgttggagaagtgaatactaaaggtaagattcgaaagattccagtaagggctgatataaagagagcattatgctttccaggaggatcaacacttatggttgcccaccttaataaagaattgccagtcatgcaaacatgggagaaaccccagacatcactccatactgtagtaccagatagtatctctcctggtgataccaatgtctcatgtgagaacatggtcctccaaacatataaacgtcgtgttgttagaaatactgcaaaggtggcaacaaatgaagtcagcaatgcttatagtgaaagttcattatctgagcaagagccaaagaaacgcatgtacaaaacatcgtcatcatcactaaagtcaaaaagaataagatgtagcaatcatgacgacaattgccaagacatgaatcaaattggtgtgcatgacaataacttgtgcagttcccctgagaattcactgcatgtaattcttaaagaacatcacattcctagcactggagctcatatttattctaatggtagtggaagccctacaattatgctcatgaatattgcagacgaacaaaagaaggcacgccttacaaaggttgttgaaacacttagggggtttgttacttgcgatggacattcatgcacacatgttgttactggaaaagctcgcaggactatgaatttctgtattgctttgtgctctggtgcttggataatttccccaaactggttaaaagaaagcttcagagaagggcagtttgtaggagaagcacaatatgttctggaagatgaagaatataggatgcaatataagtctgaacttagagatgcagttatgagagctaaagaaaggcctaactctttatttgctggttatactttctgtctgtcaaagtacatccagccctcttttgatgttctctcagccattattaaatctaccggaggcaagatcataaaaaaactgagtgagttagatgagctgtcccggacaatctttttggtgtgtgaagaggaggcagaacttgcattggttgcagcaaaaagtggcatcaaaacattcagcagtgactggttcatgagctgtgtcatgaaacaggaacttgaccttgaggcccctcagtttattgtatctctatgatgtgcctacagttcaagtcctcctaactcctaatatatctctttctttggttgggatataaattgtttctcctggttcttcgtggatatacaaattttctcatttccttagttacaaaagctgaagtagtgtcaaactagttatcatcctgtgacgatgatgacctgtttaaatggaaaaggttgcggtggagctattccaatttctgtataggcccatttgattcccttcattttgagtaaatggaaactaactaatggagtaggttatttcttttaaaatgtgtcattccatatctttccaaagtttatatataagtctatcttaaattcacc

SEQ ID NO: 204174 - DNA, 2480 bp, Zea Mays
atccgggagagaggggaagttaaaacagcagggcgatctgtactgtaccttccttccctgctgctccgccgtgatcgcgatccccttttgatcaatgaccccgggaggcacggcacgggccgcccggccggatcacactcctcaaagccgagcagaaagccccgcccgcccggcgcccggacgtccgattttattatataaatatcggcgctcccccgcaacggccaccgcttcctcgtcctcctcctcctcgtttcgctcacgagaaagcacgcaaacgcggtcctcgctcgagatcccccaccgcccgccccctaaagcctcgcggcgccgaccccgaccccccgtggatccaccctgcgcgcggcctctagagctagtccagatccgcggggcgcgcgccctcaccatcatcacatcgcgcgcccagctagccgcgccttggaggcaaggcatcgtgcgtgccaccgtacgtccaccgatcggtctcgatctcgggccctcccgctgacgccttcggctggcctaataggggcgccgccgggggatcggaggggggcgccgccgtcatgtggaaggggaagaagagcgggcctctggcgccgcggggccggaagcgggagttccccattcgtgcggcggactacgagctgctcgagcctatcggcgacggcgccaccgccgtcgtccgccgggcgcgctgcctgccgcacggcggcgagatcgtcgccgtcaaggtcatgaacatggcgcaccgcaccgagtccgacgtgaacaatgcctcagaggaagtgaagaccatgatcatgatcgaccacccaaaccttctcagcgcgtactgctcgttcacggaaggcgaagccctgtggatcgtaatgccctacatggccggaggttcgtgctaccacctgatgaaatcgtcgtaccccaagggattcgacgacgagaacttcatcgcgttcgtgctgcgcgaaacgctgaaaggtctggagtaccttcatgagaacggccacatacatcgggatgtaaaggctggaaacatactgcttgatcaagataaaggagtcaaactatcggattttggagttaccgccagcctttatgactcaataatcaatagacacggcaaaaggaagacacttgttgggacgccttgttggatggcccctgaagttatggagcaaaaggattacgatttcaaggcggatatttggtcatttggcattactgcacttgaacttgctattggtcatgcaccattttctagccaacctccagcaaaggtttttctcatgacgttgcaacatgcccctccatcacttcataacacgaaggagaagaagttttcagactcttttaaaagtatgattgccacttgtctcattaaagacccaacaaagaggccacctgcaaaaaagctattaaaacacccatttttcagaagagcaaggtcagaccataatgccgtgaaatgtatgctaaataagttgccgtcattggctgagcgaatgcaatttataaaggaaaacgaggcgaagttgcaggcagataaaaaacctcttgataactgcaaagagaaagcatcacaggaagagtatagaagaggtgtgagtgagtggaatttcgatattgcagatttaaaagcacaagcggcattgtaccccgatgagaacgaagcagaagacttcttacgttttctatttgaactggacattgttgatgaaacaacccagttaaaagatattagagcagaaagtcactctataaataatgatggaacgaatgttgctgatgatggcttaggaaaatcaaattcaacaagtccgatgtcttcatcccaaagtgtgaaacagcttgataaaggaagtcctaatggccttgtgcgcagtgaatcatttgaaattcattccatatcacccgctaagcaactgacaacagcagttctacgtgcaacgatgttgatgaatatttagagaaaacagcttttcagaagggtcgttttaaggtgatacatgattatagcaagcttgaaggagcaacgccaagagagaaggaattattagatcgtataagtagtttagagcaaatgcttcttgctacccaagacgaagttgagaggcttaaagcaaagggtaaatatgctataatgctggtatagtagcacttcattagacttttaatcatcaccgataaatgggttatattgtttatcagagtcataaggagcagaaggatgactgcaacaacaatagtagtgaagtggaagttaaattcaactgttacctagagcttgtaatgatagaaagcagttgtagtacgttttaaccataaaagagtacactaagttgatccgatggattatctattagaaatcatttgcgcattatgtattattttcaaatatttcttagatatttcctttcttattagatggatttaaaaatgagatttgttatatatgatggtctagtgttatgatg

SEQ ID NO: 204175 - DNA, 1866 bp, Zea Mays
agaaagtttactcagaagccaaatatgttaagacctagtatgtgttacctttatgccccatcagcacactgttccgcgcttgtatgagtcttgttaatttgcatgcctcgtgcatagtctctcatgtctcggtagcagtatcatattccttcaaccgtggtcaaaccaactgaaagattacaggacagtgggaaaacgaactcactataagtcgagacatttttgttctacacttctcctttacgtgagcaacatatatattatcttatcatcagctgctcttaccacaccatgctattcagagttcaagacaacaactccaacagaaatttcaaatccaagaacaacaaccagtgtaatgagatatatgctattgtaaaactgacaatataaactgttaaggacaaatcttcaagacctccagctttaattctcaagaaattaataaagaaaaaatatatattaaatttacaccagaacctccatgaatttcctgatcaaaacaaacttacaattttatacagagttgcatgaaatgtatggctttagcctcgttgaatcctttttgttttccatcctttttgttctcttgacatcagtttattcattggggagcatatacgtggaatgatgattaatgtttctgtatattaatgtattttatcataacatgttggcgccataaaaaacgtacgggtatacacctagtgacacgcattaatactgggagtcggaatatcagatccatcatgaccttgagtaacagtgcattaatatatgaaaaaatgtccgtgagtcggtctagcacttagtatataacaacttgaatcgttcaacagaattgctgagttcattcatggagtatatatggacagaactcagagcaggcgtaggtctatgcctcactgacttgccaactcttgagaaaatgaggccaacgacattcctatttgccataactaacctatcgacctaccagctagatcaaattgcctgcataatccaataaccgtacagagtagggaacatagtatctactgagaattcgacggagatgaatgaaggcatgacaccgagcagacgccagggaacgtgcagatctacacacggcccgagggaaggagctgcggcgaggaagaaaaaaaagggggcaaatcttacctgcagcgacggcgatcgggatccaatctaatcgaagccgaagggcaaggcgaagagatggggcttcgttggtaggtgggcttacccttgcgtgctctcctcggcgggggctttgacggctcctttacctggctgtctggctctcctggggcagatccgtagagggcagggcagcgcgaggcgggaggctcgtgagcagcggcaatggccagcgggcatgaaaaggcgctcgtccttggccccctcctcgccttcggtggtatagagacggggcgttcaggagcgacgggcggagcgcacgaggcgaggacggggaggaatgcagggggagggcttgaaggagcaacgccaagagagaaggaattattagatcgtataagtagtttagagcaaatgcttcttgctacccaagacgaagttgagaggcttaaagcaaaggagtcataaggagcagaaggatgactgcaacaacaatagtagtgaagtggaagttaaattcaactgttacctagagcttgtaatgatagaaagcagttgtagtacgttttaaccataaaagagtacactaagttgatccgatggattatctattagaaatcatttgcgcattatgtattattttcaaatatttcttagatatttcctttcttattagatggatttaaaaatgagatttgttatatatgatggtctagtgttatgatg

SEQ ID NO: 204176 - DNA, 1631 bp, Zea Mays
atgggcggcagaggaaggccgaggcaaaggcaatcaggtgtggggtcaacgtggcatccgtgggacccttcgcggattgcggagtggcattgggttggcagcacgcccctgcacacggtgacacgggccacggcgcggcgcggcgcggcacggggagcgagcgccgagcgagagcaagcaaccgctgtccgccgggccggccacggcgctgccccctgcttcgcgccttcgccggtgcgctcacgcctcacgcaggtgcatgcatcgacctacggtatcctagtctgggatcagaaaagaacacagcaacaacaaagaagaaaggcgcgagcgatggacggtgacgccggaccagagcaacacgggtgcgtgcactacaggagggggtgcaagataagggcgccgtgctgcggcgaggtatttggttgcaggcactgccacaacgaagccaaggactcgctggaggtcagcgtccacgaccgccacgtgcttccccgtcacgacatcaagctggttatctgctctctctgcaacaaagaacaggatgtgcagcaagactgtgcgaactgcggagcatgtctcggcaaatacttctgcgcgaaatgcaacttcttcgacgacgataagtgttccctcttctgttttctccggttttgttgtcgcgttccctggcatttcaggtgtcgaagaaccaatttcactgcgatgggtgcggcatatgcaggactggtggcgcagagaatttctatcactgtggcagatgtggatgctgctacaccactacgctgaaggattctcaccgctgcgtggacggagctatgcatcacaactgccctgtctgcatggagtatctattcgactcgatgaaagctatcagcgtgctccactgcggacacaccatccacctggaatgcctttacgagatgagagcgcaccagcagttttcatgcccggtgtgcctgaggtctgcctgcaacatgtccgacatctggcaaaagctggatcagcaggttgcagcgtccccgatgccagcgatctatcagaagaagatggtatggatcctttgcaacgactgtggcgtgacgtccaacgtgcagttccacatcttggcgcacaagtgccctggatgcagctcttacaacacccggcagacgaggggcgatccagccgcatgctctagagtttgagagcaaataaaactgcagtactgcactgcacataaactcgtggggttgtgcggtcgatcgataggtagcttgcatggaggaaattaaagactaccattgcgcatggacacgattggtgccggcagttgagtacgtgtattaggcctgtcatatgtagatgtatcatatgctatgccttcgcaaagaagaatttggcgcagcggacagggtatatacatttcttttgttgctatatatacacacatatttttgttgcgcggtgcttgtgccaatgatggagagttcgcacgttgtttttcttatatttaattgagcttgcttcaaccttgaatcaaataaattcaaatatctatagtgcgtaaatgctagcacagtaaaaagatgatcttgtacgaaaaatgataaaatattaaatagatgtgaacgacacaagtgaaaaggcag

SEQ ID NO: 204177 - DNA, 3903 bp, Zea Mays
taccggcttccaagccacaagtctttcgctctgtacttcacggccgggccaaagcagcagccacgaagaggcgttctttcctccctgtaccatcagcatttagaaattttgtctgctaccagatagtacgacagtatactggacacagacatgaaagtgacttgcatgagttcgtttttgcaaccggataaacacataagaagcaatcgcagcgccgaaataggatgaataaaaccagccacatgttccggtggtgtgtgttcatcagcactcgcacgcaagcagctcctccaatccatctccatctctgggctaaaagatatgaagagagttttagcctgataggccactcgtacctgctgctctaactccgggtcaccattttttgatgagtagagggggctccccgtctcggccctcctgccggttgaggccagcagagtgatgagtgaacggagtcatgcttgtgagattaggctttgtcgttgtagcctccgtcgcagctttaactcttcagagagctaacagtggggccaggcacagcaaagactatgtccaagcaaggaaaaggaaggataaggctaacaattctgaacatggggagaaagaagaagagaaggaagaggttaaaacaatcagcggcataatcaactcagcccgctcgctaggcgatgacgacgatgatatgctttccgagatcgaaagcctcctatcaggagacattgacatccctataccaagcgatcgcttcgacgttaatggacggtcacggtacaacaacgcttacatggctaacgaggcctctgagatagagaagctgcgcagcctggtgagggaaatggaagagagagaggcgaagcttgagggcgagctgctagagtactatggaatgaaggaaatggagactgacatcgccgaactgcaaaagcagctcaagatcaagacagcggagatcaacatgctcaacgacaccataaactcactgcaggcggagcggaagaagctgcaagatgacgttgcatgtggagaggttgccaataaagagcttgaagcggctagaggcaagatcaaggagctgcagcggcagatacagctagaagcaggccagacaaagggtcagctgatgttgctgaaacaacaggtcatcggattgaaggccaaggaggaagaggcggggaaaaaggaagctgaggttcaacggaagctgaagaagctcagggagttggaagtggaggtacttgagctaaggaggaagaacaaggagttgttgtatgagaagagagatctcattgtgaagttggatgcagctgaagggaaaataactgagagtgatgtagttgccaatgcaagagaagagataaacaagctgaggcatacaaatgaggacctcacaaagcaagtggaaggcctacagatgaacaggttcagtgaagtagaggagttggtatacctgcgctgggtcaatgcctgtctgagattcgagctccgcaattatcagactccatcagggaaggtctctgcacgtgatcttaacaggacactgagccccaaatcacaggagagggccaaacaactgatgttggagtacgcaggatctgaacggggtcagggtgacacagaccttgagagtgttgtttcttcaatgccttcttcacctggaagcgaagactttgacaacatgtcaattgacagttcttccagcagatacagcttcctaagcaaaaggtctaatctgatgcaaaaattcaaaaggtggggaaggagcaaggatgacagcagtagtttagcctcctccatcagtggctctccaaggaggaaaccaaagggcccactggaagctctaatgctaaaaaacgctggagatggtacagccataacaacatacggaaagagggatcccaatgatgtcttggatgacgaaaatgtcgcgtcctcattccaattgatgtccaagacagttgaaggttttgctgatgagaagtatcctgcttacaaagataggcacaaacttgcaactgaacgggagaaggctataaaagagaaggctgggcaagcaagagcacaaaggtttggtggtggccacagttcagctctaatttcctctccaaaaggtgcactccctccaaaacttgctcaaattaaggagagatcccctgcagctaatgctgaatccagtgagcaatccagtgacaaccaaaacaacaccctggtggtgagccagatgaagcttgccaacgttgagaagagagcaacaagagttcccagaccacctccccctcgatcaaccgctgcttcaggggctaccagtattgcaagtggagtacaaacgccacgggcaccaggtgcaccacctcctccaccaccacctccagggaaagttggtggcccaccgccaccaccgccacctccaggtgctctaccaaggaaccttggcgggggtgacaaggtacaccgtgcgccggagattgtagagttctatcaaagtctcatgaagcgtgaagcaaaaagggagacatctttagggtcaatatcatccaatgtatctgatgccagaagtaatatgattggagagattgagaacagatcaacattcctcttagctgtaaaagctgatgtggagacacaaggagaatttgttgaatctctagcaaatgaggtccgagcagcaagcttcataaatattgatgacgttgttgcatttgtaaattggttggatgaggagttgtctttcttggttgatgagagagcagtgctaaaacattttgattggccagagagcaaaacagatgcaataagagaagcagcttttgagtaccaggatctgataaagctacagaacagggtttcaacctttaccgatgatccacaacttgcgtgtgaagaagctctcaagaagatgtattctttgcttgaaaaagtggagcagagtgtctatgcactactccgtacaagagacatgaccgtctcacgctacaaggagtacgggatcccatttgactggctgtcagattctggagtagttggcaagatcaaagtggcatctgtccagcttgcaaacaagtatatgaagagggttgcctcagaacttgatgcattagaaggcactgagaaagagcccaatagagagtttttgcttctccagggtgtgaggttcgctttccgggttcatcagtttgctgggggctttgatgcagaaagcatgaaagcttttgaagagctaagaagcaagatgaccacacaggcatctgctccaccaatatctcaaggctgaagcataaattgagcacaggattcagcacacatctggtcttacttgctggagagtgatttttagttgtgtatattaagtgtacagactacagaagagagattcaaattccggtgttgtgtcaagcaagttgtatatgccaagataatacaagtcagctgcagcagtccaaacttgttgctttaatccgaagcaaacagttactaccaacatacatacagtgctagactagcagatctgacttgaagaatgacatatcaagaaaaaaaaaatccacctggacggagaaggtcgatgttgcggcgacgagctctacctgaacgtggaagtggaaccgaacacttcgagtggttggctgtggctgcctactagtcgccggggggccgggccccgcctctcggctggcttcagcgcctccgagcgcggtggcagtgtcgccgtcgcgtgggtggaagaactcgtcggttgggttccggctccgggcgcggccgcttgccggggaatccaaccgggagaccgtgaatcgtggttatattattacttgggccctatcaaggccaccacgtctatgactgtgagcttattgtttgggcttgggccgatattcctcttcatccattagatcagtttttaag

SEQ ID NO: 204178 - DNA, 4962 bp, Zea Mays
ctaccggcttccaagccacaagtctttcgctctgtacttcacggccgggccaaagcagcagccacgaagaggcgttctttcctccctgtaccatcagcatttagaaattttgtctgctaccagatagtacgacagtatactggacacagacatgaaagtgacttgcatgagttcgtttttgcaaccggataaacacataagaagcaatcgcagcgccgaaataggatgaataaaaccagccacatgttccggtggtgtgtgttcatcagcactcgcacgcaagcagctcctccaatccatctccatctctgggctaaaagatatgaagagagttttagcctgataggccactcgtacctgctgctctaactccgggtcaccattttttgatgagtagagggggctccccgtctcggccctcctgccggttgaggccagcagagtgatgagtgaacggagtcatgcttgtgagattaggctttgtcgttgtagcctccgtcgcagctttaactcttcagagagctaacagtggggccaggcacagcaaagactatgtccaagcaaggaaaaggaaggataaggctaacaattctgaacatggggagaaagaagaagagaaggaagaggttaaaacaatcagcggcataatcaactcagcccgctcgctaggcgatgacgacgatgatatgctttccgagatcgaaagcctcctatcaggagacattgacatccctataccaagcgatcgcttcgacgttaatggacggtcacggtacaacaacgcttacatggctaacgaggcctctgagatagagaagctgcgcagcctggtgagggaaatggaagagagagaggcgaagcttgagggcgagctgctagagtactatggaatgaaggaaatggagactgacatcgccgaactgcaaaagcagctcaagatcaagacagcggagatcaacatgctcaacgacaccataaactcactgcaggcggagcggaagaagctgcaagatgacgttgcatgtggagaggttgccaataaagagcttgaagcggctagaggcaagatcaaggagctgcagcggcagatacagctagaagcaggccagacaaagggtcagctgatgttgctgaaacaacaggtcatcggattgaaggccaaggaggaagaggcggggaaaaaggaagctgaggttcaacggaagctgaagaagctcagggagttggaagtggaggtacttgagctaaggaggaagaacaaggagttgttgtatgagaagagagatctcattgtgaagttggatgcagctgaagggaaaataactgaggtatcttagtattatgagtctctacaagttgcccttctcataaacagaaaacaaatctcatcaagatgactgcaaaattgaaatttcgtcttatacatgattatcattatgcaagatattacacagcatagaattaacatattttcagaccagtacaatgaaaatgcagttacctaaagtacttactaaagcatgatttcagaggtagcattacatttaacaactatgtcagaatttaaggttctctaagggttagtttggaaacttaaattccctccgggattcccggggattgatgggaaaatgggaaaatgagctaatttcccgctcaatttccgggaatcccggaggggatttaagtttccaaactagcctgagaggcaagaatgcacctagagatttctgcaaagtattcatatagtttgatatactttgagaagctggaacatgtgctaatgacacaccctactgtatatcatgcagagtgatgtagttgccaatgcaagagaagagataaacaagctgaggcatacaaatgaggacctcacaaagcaagtggaaggcctacagatgaacaggttcagtgaagtagaggagttggtatacctgcgctgggtcaatgcctgtctgagattcgagctccgcaattatcagactccatcagggaaggtctctgcacgtgatcttaacaggacactgagccccaaatcacaggagagggccaaacaactgatgttggagtacgcaggatctgaacggggtcagggtgacacagaccttgagagtgttgtttcttcaatgccttcttcacctggaagcgaagactttgacaacatgtcaattgacagttcttccagcagatacagcttcctaagcaaaaggtctaatctgatgcaaaaattcaaaaggtggggaaggagcaaggatgacagcagtagtttagcctcctccatcagtggctctccaaggaggaaaccaaagggcccactggaagctctaatgctaaaaaacgctggagatggtacagccataacaacatacggaaagagggatcccaatgatgtcttggatgacgaaaatgtcgcgtcctcattccaattgatgtccaagacagttgaaggttttgctgatgagaagtatcctgcttacaaagataggcacaaacttgcaactgaacgggagaaggctataaaagagaaggctgggcaagcaagagcacaaaggtttggtggtggccacagttcagctctaatttcctctccaaaaggtgcactccctccaaaacttgctcaaattaaggagagatcccctgcagctaatgctgaatccagtgagcaatccagtgacaaccaaaacaacaccctggtggtgagccagatgaagcttgccaacgttgagaagagagcaacaagagttcccagaccacctccccctcgatcaaccgctgcttcaggggctaccagtattgcaagtggagtacaaacgccacgggcaccaggtgcaccacctcctccaccaccacctccagggaaagttggtggcccaccgccaccaccgccacctccaggtgctctaccaaggaaccttggcgggggtgacaaggtacaccgtgcgccggagattgtagagttctatcaaagtctcatgaagcgtgaagcaaaaagggagacatctttagggtcaatatcatccaatgtatctgatgccagaagtaatatgattggagagattgagaacagatcaacattcctcttagctgtaagtattttctgctggcaccatcttgaacaaaaatcctgtgaaatttatgagttccactattaatgcataattaaaactagtaatcagatttcaataatgaaaagtgacaaatgttttataaaaacatggaatgtttcaggtaaaagctgatgtggagacacaaggagaatttgttgaatctctagcaaatgaggtccgagcagcaagcttcataaatattgatgacgttgttgcatttgtaaattggttggatgaggagttgtctttcttggtaagcagcccgaacatgcccttcatacaatacctctgtcatgaagtagcaattattgtacttatgacacatgttctagtactaaagaggatcaacaaaattttaggttgatgagagagcagtgctaaaacattttgattggccagagagcaaaacagatgcaataagagaagcagcttttgagtaccaggatctgataaagctacagaacagggtttcaacctttaccgatgatccacaacttgcgtgtgaagaagctctcaagaagatgtattctttgcttgaaaaagtggagcagagtgtctatgcactactccgtacaagagacatgaccgtctcacgctacaaggagtacgggatcccatttgactggctgtcagattctggagtagttggcaagatcaaagtggcatctgtccagcttgcaaacaagtatatgaagagggttgcctcagaacttgatgcattagaaggcactgagaaagagcccaatagagagtttttgcttctccagggtgtgaggttcgctttccgggttcatcagtttgctgggggctttgatgcagaaagcatgaaagcttttgaagagctaagaagcaagatgaccacacaggcatctgctccaccaatatctcaaggctgaagcataaattgagcacaggattcagcacacatctggtcttacttgctggagagtgatttttagttgtgtatattaagtgtacagactacagaagagagattcaaattccggtgttgtgtcaagcaagttgtatatgccaagataatacaagtcaggtttgttcatttgtataacagttttagctcaagcataacacttttcattttgaatgttgtaactgtaaacaggcagttccagaatcacagtagagatcagatgcatagttttgcaactgttttttttcagctgggcatgattttgctactacgactaataaaatgtcaaaaaacatccattctgctagtctggtacacatggagataattcctctacatgaaccttgctgtctttgttcaaaaaaaaaaaagtttccagcctgtccgcttggttttaatccgtaacagcttctacttctacagtatttttgtctctatggattacagctgcagcagtccaaacttgttgctttaatccgaagcaaacagttactaccaacatacatacagtgctagactagcagatctgacttgaagaatgacatatcaagaaaaaaaaaatccacctggacggagaaggtcgatgttgcggcgacgagctctacctgaacgtggaagtggaaccgaacacttcgagtggttggctgtggctgcctactagtcgccggggggccgggccccgcctctcggctggcttcagcgcctccgagcgcggtggcagtgtcgccgtcgcgtgggtggaagaactcgtcggttgggttccggctccgggcgcggccgcttgccggggaatccaaccgggagaccgtgaatcgtggttatattattacttgggccctatcaaggccaccacgtctatgactgtgagcttattgtttgggcttgggccgatattcctcttcatccattagatcagtttttaag

SEQ ID NO: 204179 - DNA, 4234 bp, Zea Mays
ggcctaccggcttccaagccacaagtctttcgctctgtacttcacggccgggccaaagcagcagccacgaagaggcgttctttcctccctgtaccatcagcatttagaaattttgtctgctaccagatagtacgacagtatactggacacagacatgaaagtgacttgcatgagttcgtttttgcaaccggataaacacataagaagcaatcgcagcgccgaaataggatgaataaaaccagccacatgttccggtggtgtgtgttcatcagcactcgcacgcaagcagctcctccaatccatctccatctctgggctaaaagatatgaagagagttttagcctgataggccactcgtacctgctgctctaactccgggtcaccattttttgatgagtagagggggctccccgtctcggccctcctgccggttgaggccagcagagtgatgagtgaacggagtcatgcttgtgagattaggctttgtcgttgtagcctccgtcgcagctttaactcttcagagagctaacagtggggccaggcacagcaaagactatgtccaagcaaggaaaaggaaggataaggctaacaattctgaacatggggagaaagaagaagagaaggaagaggttaaaacaatcagcggcataatcaactcagcccgctcgctaggcgatgacgacgatgatatgctttccgagatcgaaagcctcctatcaggagacattgacatccctataccaagcgatcgcttcgacgttaatggacggtcacggtacaacaacgcttacatggctaacgaggcctctgagatagagaagctgcgcagcctggtgagggaaatggaagagagagaggcgaagcttgagggcgagctgctagagtactatggaatgaaggaaatggagactgacatcgccgaactgcaaaagcagctcaagatcaagacagcggagatcaacatgctcaacgacaccataaactcactgcaggcggagcggaagaagctgcaagatgacgttgcatgtggagaggttgccaataaagagcttgaagcggctagaggcaagatcaaggagctgcagcggcagatacagctagaagcaggccagacaaagggtcagctgatgttgctgaaacaacaggtcatcggattgaaggccaaggaggaagaggcggggaaaaaggaagctgaggttcaacggaagctgaagaagctcagggagttggaagtggaggtacttgagctaaggaggaagaacaaggagttgttgtatgagaagagagatctcattgtgaagttggatgcagctgaagggaaaataactgagagtgatgtagttgccaatgcaagagaagagataaacaagctgaggcatacaaatgaggacctcacaaagcaagtggaaggcctacagatgaacaggttcagtgaagtagaggagttggtatacctgcgctgggtcaatgcctgtctgagattcgagctccgcaattatcagactccatcagggaaggtctctgcacgtgatcttaacaggacactgagccccaaatcacaggagagggccaaacaactgatgttggagtacgcaggatctgaacggggtcagggtgacacagaccttgagagtgttgtttcttcaatgccttcttcacctggaagcgaagactttgacaacatgtcaattgacagttcttccagcagatacagcttcctaagcaaaaggtctaatctgatgcaaaaattcaaaaggtggggaaggagcaaggatgacagcagtagtttagcctcctccatcagtggctctccaaggaggaaaccaaagggcccactggaagctctaatgctaaaaaacgctggagatggtacagccataacaacatacggaaagagggatcccaatgatgtcttggatgacgaaaatgtcgcgtcctcattccaattgatgtccaagacagttgaaggttttgctgatgagaagtatcctgcttacaaagataggcacaaacttgcaactgaacgggagaaggctataaaagagaaggctgggcaagcaagagcacaaaggtttggtggtggccacagttcagctctaatttcctctccaaaaggtgcactccctccaaaacttgctcaaattaaggagagatcccctgcagctaatgctgaatccagtgagcaatccagtgacaaccaaaacaacaccctggtggtgagccagatgaagcttgccaacgttgagaagagagcaacaagagttcccagaccacctccccctcgatcaaccgctgcttcaggggctaccagtattgcaagtggagtacaaacgccacgggcaccaggtgcaccacctcctccaccaccacctccagggaaagttggtggcccaccgccaccaccgccacctccaggtgctctaccaaggaaccttggcgggggtgacaaggtacaccgtgcgccggagattgtagagttctatcaaagtctcatgaagcgtgaagcaaaaagggagacatctttagggtcaatatcatccaatgtatctgatgccagaagtaatatgattggagagattgagaacagatcaacattcctcttagctgtaaaagctgatgtggagacacaaggagaatttgttgaatctctagcaaatgaggtccgagcagcaagcttcataaatattgatgacgttgttgcatttgtaaattggttggatgaggagttgtctttcttggttgatgagagagcagtgctaaaacattttgattggccagagagcaaaacagatgcaataagagaagcagcttttgagtaccaggatctgataaagctacagaacagggtttcaacctttaccgatgatccacaacttgcgtgtgaagaagctctcaagaagatgtattctttgcttgaaaaagtggagcagagtgtctatgcactactccgtacaagagacatgaccgtctcacgctacaaggagtacgggatcccatttgactggctgtcagattctggagtagttggcaagatcaaagtggcatctgtccagcttgcaaacaagtatatgaagagggttgcctcagaacttgatgcattagaaggcactgagaaagagcccaatagagagtttttgcttctccagggtgtgaggttcgctttccgggttcatcagtttgctgggggctttgatgcagaaagcatgaaagcttttgaagagctaagaagcaagatgaccacacaggcatctgctccaccaatatctcaaggctgaagcataaattgagcacaggattcagcacacatctggtcttacttgctggagagtgatttttagttgtgtatattaagtgtacagactacagaagagagattcaaattccggtgttgtgtcaagcaagttgtatatgccaagataatacaagtcaggtttgttcatttgtataacagttttagctcaagcataacacttttcattttgaatgttgtaactgtaaacaggcagttccagaatcacagtagagatcagatgcatagttttgcaactgttttttttcagctgggcatgattttgctactacgactaataaaatgtcaaaaaacatccattctgctagtctggtacacatggagataattcctctacatgaaccttgctgtctttgttcaaaaaaaaaaaagtttccagcctgtccgcttggttttaatccgtaacagcttctacttctacagtatttttgtctctatggattacagctgcagcagtccaaacttgttgctttaatccgaagcaaacagttactaccaacatacatacagtgctagactagcagatctgacttgaagaatgacatatcaagaaaaaaaaaatccacctggacggagaaggtcgatgttgcggcgacgagctctacctgaacgtggaagtggaaccgaacacttcgagtggttggctgtggctgcctactagtcgccggggggccgggccccgcctctcggctggcttcagcgcctccgagcgcggtggcagtgtcgccgtcgcgtgggtggaagaactcgtcggttgggttccggctccgggcgcggccgcttgccggggaatccaaccgggagaccgtgaatcgtggttatattattacttgggccctatcaaggccaccacgtctatgactgtgagcttattgtttgggcttgggccgatattcctcttcatccattagatcagtttttaag

SEQ ID NO: 204180 - DNA, 784 bp, Zea Mays
agaagccccgtccgtccttctccttcatgcgctgcccgaggagtgccttccgggcgacatcacggagcccgggaagctggacgaggtgttcgacgagatggacgccaacggcgacggcaaggtgagcttcgaggagttcaaggcggccatgcagaaggacagcgccctccaggacgtcgtcctctcgtccctccggccgccgccgccgccatagctagacggggagagagattccaactcgttcaacttcattcccacgagaacgcaccattgattacagtaccgttcgaatcatttaatcagtctccggcatgtgccgttgtccgatccggccggctagctgttggaaactacgggtcgtgggaaagcctcgatggatcctgctagatatggctgtgctgttatgtgtttctggatcctgctagattagctggctgtgttgttatgggtggcggccacagatgttttttttacatatggctagtttagaagttacaaaatcgaaaggggttcgagaggctaaaatcacttccttattcaactttgaatggaggagattttagtccctccaattcacttcggtttttgtactcctaaactagcttttaaggtagaaaaataaacgtgtcaagagtggtgaaatcacatgtggcaaaaaagacacgacgctgtcaaattttgaaaggataaaaaaggataacggtaagctattttgtattgtacttatcaatgttgttatggtgtcgcctaggcgacgtctaggcgtgtttttgacttagagggt

SEQ ID NO: 204181 - DNA, 3670 bp, Zea Mays
ggcttctatgccccgggtccacagtccacacccgccgaggccacccccgtcctcccccacgcgccgctcgcgtgatgctcgaatctacgctcgcgatggttatgccccgccgctcgctgccccagccccctcccctgcgtgcgtgcataaaaagggagagcgacgatggaaatattccgagcatggcttgaacacctggtcaatgctagatgatctgttggttgaaagactagcaagctgtccaagtggaactacgacggatcgagcaccggccaaatcccagctgacacggtgtggacacgagttctgcgctactcctgtggtcattgtttggagaagttttcctaaagcttctttatgtatattcttagtctttttttagaacaatgtcataacctactaatagttgtttatcactatattcttttgttcctactattccttgatatgccagatctcaacttttgtgctaatatacatctctaggcatgttgtatgtgcatcatttcaaaaaaaacacttaccaaaagagtggtctgtaccaaacattttgccttcaagacttcaactcataaccttgtatagtctgaaatccttaggattggttctgaacctcagtttgatggaggtgttacaaaacttagaagggatactaaatttctctttgtagtatgagtgaacagaagtaggatttgtcacaatctcactattttaccaagctaaccaaataacaaatttggccagtatgtatgtgcatcatttcaaaaaaaactgttaccaaaagggtggtatgtaccaaacattttgccttcaaggcttcaacccataaccttgtacagtctggaatccttaggatttgtactgaacctcagtaggtgttacagaacttagaagagatactggatttctctttgtagtaggagtgaacaaaagtaggatttgtcacaatctcacacttttaccaagctaactaaataccaaaattcggccagttacagacagtcagacactgatcttaacttgctcgaacagtcttaaacctttttgtatcaaaggctcatagcatatcaaacgcttctaatgaaaccttaacacaccgcaagaaaacaccaagcatcgaatttgttcagtgtgtgtgaagtagtagtgtatgatcatgccatacatatttttctacacatctcaaattctagatttaatttggttacatgttatacatgtatcttagatttttgataactggtcacagagcggttcaaattgaatttgacatggagttcagatgtcctttcatattctgttactgaggttatttccaaatagtgattcagatctaatgattttatgatgcaatttattctacaacatttaaatgccagaacgctcattagaggctgaacatttaatggttataggattaggcctaaaacggcgttttgcagcgattaaacgctacattttttgtgtttaaacgctttaagctagaaatgctgttgattttgtgtattatatttagagtatgacatttttccaagatctatgttttaaatgcaaggatattgagattttttagatattttattttaaatgctaattcatatatttttttccttgccgaatgtaacccctaagaagactgaagagactgctttgatatctgatgttgttgcaaattcaccacaacaaggttttcatagtgggcattgctggagtgatctcatctgagatgctcctacaagtccaacaatcagaagcccactttgttcaatgctagattttggcataactcctaaaagaggaggcgcttctgctcatgctaagaaagcaagctttgaccgtgaaacctaatggcagaaaaggtcagcaatagataaaggttttagataaatttgttaagtcctctgaacctactgccttccacagttccactcatctttctaccgtccttgattgcagtccttcctcccccaagtccctagagcctagacgaatggcgctgcagctcactgttccttcttcagttcactcatgtagtcctattcatgtatgaggtttttcccttttaaattcatatgcagaacatggtttgagcctcccatcactcagtccacactgtagttgacagacatcaactgtatttgtggttttaatagtttgtatcaggagagtgcatcttgatttactaaagttaatgtagtctcaagtttatgtataatcagttctaatcttgttttttattgaacaatatgtgtttctaggtccattaaccagactaaagtagtgcatattttaaattgaatatttttcttcttttcggtgagaagtgaaaagtggaagacatttcagttctgcacttgtaagtaaagtatttctcttatactcttgttccaatcactctgttattgattgtttaataaatcattcaatatgagcagagcccttttcttattcctggatacctgtgaggagtcttatatcattttgtgtttagtctatttatttatgattaaaatatttttttcataatggcaaagctaagttcgattaccatgaagccacaaaattacaagtgttaggtttgagacaatggtgatgcagagaaacggtagcaaaagccgtcacctttgaacagcaaaagccggcaagacaaattcccaaactaacaagcttaaatctagttacaactgaatacaaaggaccacaacagttgataaattccacagtccagaaacactagttacaagcccactgctaacaccacccacaacttgaaaaaacacatcatttttatatttgatctccaaatattgctatcatctattcagatttctggctaggcgaagacacagagcaatattgactctagagtgtgcacaagatatagaaatttgtaataaagctcccattgctttacttcccttttcattgtatcattcttgtgttgtatgcaacagcctgttctggcaccatcctcttttatgtcttattggcttatgggaattatgaaaagccttttgtttggactaaagaccacttggccaagctttattgaaagcataggaggagttactggagcaagccagtttacaagcaaaaaatgaaagaaaaacataactcaaactctgctacatgttgtccctctgttctatttagttatccacggtgtctattattcttatttccactaatgactagactaatgattatttgctcttgttaccatcctcacagtgtggttgaaattacctactatgcagtgtagttgaagttatcttcctgattggaagataaggaaggtttgaggagctcatttctgaagttgtagctggaagggagaagagctcatgttaatggtattttgactgctccaaaacactttcgacttgtgatattctttaacctatatgcgttgaagaatttttggagacaaagcatgcaagcacagagtctgctctggtggtaagataagtgaggtgacttctgaagaagcctacagagaatgtaaaaataagtgtgttattttcactgctttgacacagtctcaattgtgcaatgatttattatcacattgtaatttgacatatgctacatgatcctaaattatgttgtaatgaatgttctactccctatgtgtatttgttagatagcttgtccatgttcttaactattt

SEQ ID NO: 204182 - DNA, 337 bp, Zea Mays
cacagtccacacccgccgaggccacccccgtcctcccccacgcgccgctcgcgtgatgctcgaatctacgctcgcgatggttatgccccgccgctcgctgccccagccccctcccctgcgtgcgtgcataaaaagggagagcgacgatggaaatattccgagcatggcttgaacacctggtcaatgctagatgatctgttggttgaaagactagcaagctgtccaagtggaactacgacggatcgagcaccggccaaatcccagctgacacggggtgcaatgtcagagttttcatgtacccaagcagcatatatgattaggatccacaaacctctga

SEQ ID NO: 204183 - DNA, 274 bp, Zea Mays
tgcaaacataaccggccgttgtttctcttcttatctgtgtggattgggatacttctgtccgtttatctcttcttccactgcctccccaccacttcgtcctcgccggctcgcaactccttgatggcggccacggcgagtctcactaccactgctccctcccctccagctctcctcaaagcatcagctcctttgcttatctcctttcgccccgtctcccgccactgcaagaacctgtgcatcaagaccaagtttggtagaacagttggttcgggta

SEQ ID NO: 204184 - DNA, 878 bp, Zea Mays
aacatagtgccatagtggacacgatattcacccatttcagccggcagctaggtatttcttttttcaacaagccagaccgccaggcgccagtagccattgagtccttgacccgaagtcccacagccgccgccaaaagggttcctcaccatcttgaacgctcgccggaccaatcccaagcagtcctcgcagcagatggcagttcccggcggccgcaacggactcagggacgaggacgacgacatggcccagcacgccgaggccttcggcggcgtctctgacgacgaggacgtgcccccccaccttcgcgccctcgccaacgccgcccagtccggcgacgtcaccgcccttgtggctgccctcgataatcatgatggcagtattgatgttccagttgaagatggtgatactttgctccatctggcatgcttatatggtcatcttccttgtgtgcagctattgctggaacgtggagctagcttggaatgccaagacgaagaaggtgctattcctcttcacgatgcttgtgctggaggcttcactgagctggtccaatatattctcaactttgctgccaacaaggatggttgcgtagtgagaatgctcaacactattgattctgaaggcgatacgccgctccatcatgctgctagaggagaacatttggatgttgtcaagcttcttctccaggctggggcgtcccccaagaaggagaacacttacgggcagacacccgctgatatggctgaccaagacaccgaagttcgaaccctgttgactgccaagcaaattgaggcaagcacacacatgagtgatgattaagcggcattggaatccttagttgcaactgggatgggagagaaggggtccacagctacgag

SEQ ID NO: 204185 - DNA, 2736 bp, Zea Mays
aaacggatccccgacgaactactactgcacaggtgaggaactcgagacgaccatgcggcgcgcgtccccgtaccactgactcgcgggccccggcacgtacgtgcagccgctgtcacgatcaccacgtcggagaggaacggtggccggacgccggacagcgagaccgaataaccatgtcgaggaggagagcgcaggaggaggaggaagacgacgaggatgtggtggagtcggtagagcgggtgttcgaggggcgggaggtgccggggtggcgggagcaggtgacggcgcgggcgctggcggtgagcgcgctcctgggcgccatgttcagcgtcatcgtcatgaagctgaacctcaccacggggatcatcccctcgctcaacgtctctgcgggtctcctcggcttcttcctcctcacctcctggaccaagctcctcgccaaggccgggctcaccggcgtcaggcccttcacccgccaggagaacaccgtcgtccagacctgcgtcgtcgcctgctctggcatcgcgttcagcggagggttcgggagctacatgttcgcgatgagtgagaggattagcgagcaatcgggggagacatgggatgcgcacaacatcaagaaccccggtctgggctggatgatcggtttcctcttcatcgtcagcttcctcggcctcttctccgtcgtgcctctcaggaagataatgatcatcgactacaagctcatctacccgagcggcaccgcgactgcccacctcatcaacagcttccacactccccagggcgccaagcttgccaagagacaggtgaagacgctggggaagttcttcgccggcagcttcacctggggcttcttccagtggttctacaccgccggcgagggctgcggcttcatgtccttccccacgctgggcctcgaggcctacaggcagaagttctttttcgacttctcggcgacgtacgtcggcgtcggtatgatctgcccttatctcgtcaacgcctccgttctccttggaggagtggtctcgtggggcatcatgtggccgctcatcgagcagaagaagggcgactggtacccggccgacctcaaacccagcagcctccgtggcatcgtcggctaccgggtcttcgtctccatcgcgctgatcctgggcgacggcctctacaacttcctcaaggttatgacgaggaccgtgaccgcactggtggtgcaggtgcgcagaatgatgtcggagccgacgctccccatctctggcggcggcggggaaggcggaggtatcccgctgccggcgccggaggagacgttcgacgacaggcgtcgcacggagctgttcctcaaggaccagatccccaacacgctggcgctgggcgcgtacctggtgatcgccgtggtgtccatcgtcacggtgccgcacatcttccaccagctgcggtggtaccacgtggcggcgtcctacgtggtcgcgcccgttctggccttctgcaacgcgtacggctgcgggctcacggactggtccctggccacgacgtacggcaagctggccatcttcacggtaggcgcctgggcggcggccaccgacgacagcggcggcggcggcgggggcatcatcgcgggtctggcggcgtgcggcgtgatgatcggcatcgtgtcgacggcgtcggacctgacgcaggacttcaagaccgggtacatgacgctggcgtcgccgcggtccatgttcgtgagccaggtgatcggcacggccatgggctgcgtggtggcgccgtccgtgttctggctcttctacaacgcgttccgcgacatcggcatgccggggtccgagtacccgtccccgaacgcgctggtgtaccgcaacatggccatcctgggggtccagggcctgggctccctgccccgccactgcctcgacctctgcatcgccttcttcgccgccgccatcgccatcaacctggcacgcgacctcgcgggcgcccgcgccgccgcctacatcccgctgcccatggccatggccatccccttctacctcggcccctacttcggtatcgacatgtgcatcggcagcctggtgcgcctcgtgtgggaccgcctggacccggccagggccaaggcgttcgcgccccccgtcgcgtcgggcctcatctgcggcgacggcatctggacgctgccgcagtccgtgctggccctcgccggcgtcaagccgcccatctgcatgaagttcctgtcccgcagcaccaacgtcaaggtcgacgctttcctccgcagctagctcctagcgagctacctctacctcctgatggagcaggagactcaagacctgctgcttgctgatctgacaccaccagcagcaagcaacacacagcacagtgctctgctgctgctctggctgctgttgcaatgttgcatgccctgccatctaccgagttgtactagaatcagatgctttcaatgtgtcacacactgctgccgcatagctgctgaagggcagcaagtacgagcagtgctgaatttggggcggtgaaacaagcagatggctaggcagctgactgcgcttctgagcagagagaagtcccttcttcaccttcctcttctgtagcctgtaactaggagaactgaattcggtgcttgcattgcactgcatgaattggattggatccctggtatggtagcggcaatgttgttgatgctgccgtttcattcaccaaatgtaatgtaaataataatggtaagaagtttgaatagac

SEQ ID NO: 204186 - DNA, 1765 bp, Zea Mays
gtttgggttggcgcaagccgcgagggaagggagggccgggcggctgccgggtcgccgtcgaggcgtcctccctcccgagtcccacgagcacggagcaccggcctccggttcagattcggtgacacgcacggcacggacgaacccaacggggcactgctcacgggaaagagagaggattcctccgccgcgtccgcgttggactggacagctcacgccgctgcgaaagcaaccagccagagccagatccgtcggttccaacgaaacatccattcacgcccgccaccggcatccccatctccgatccgccgcagccgcagtcgcaggcacgtcctcctctccggccacccggagcgcggcagccagcgagcgagccactgtggtcgccgtgcaggcaatcaaaagatgtcgtcaaggcactaaagaaacggattggccacaagaatccaaaagttcaacttcttgcactaactctgttggaaactgttataaaaaattgtggggatatacttcacatgcatgttgcagagagagatatattgcatgatatggtgaagatagtgaagaaaaagtctgatcctcgtgttaaagagaaggtattggtgctgatagatacatggcaagacgtgtttgggggatcacatgcaagatatccacaatactatgcagcataccatgagttggtgcgtgctggagctgaattcccgaagagacccgagaaacctgcacctttgtttaatggccagtctcaggcagcaaggaatatgcgtagtcctgaccaacaggaagcggaatcttctgctgccaatgattttcctgctttgagcatgtcggagattcataacgcttgtggtattatggatgtacttgctgagatgctgaatgctttagacccaggaaacagagaggggctaaggcaggaggtaattgtggaacttgtggatcaatgccgcacttacaagcagagagtagtgcagctagttaattctaccacggacgaggaacttatgtcgcaggggctcacactgaatgatgatttgcagcgtgttctagcaaaacatgatgcaatagcagcaggcattgcagtccgagtggagaaaaaatcgaagtctttgcaagcacttgtagagaccaaggattcgacaaaccaggattccaaaaaggagcaaggactcatagatattgaggatcccacaagtcaagatgctgcaaaagatccaaatcaaagtacaagtgaccaatctccttttgagcaattagctcttccagcaccaccagtgtcaaatggcgcagcaacttcagcaccacaatctgatcttggcattgatcttctgagctgggatgatacccctgctacaacacaaaatccacttgctcttgttcctgtcacagatcctcttgctgactctacttcatcaaatcaaaatgcgctagcaattgttgacacattttcagaaaacagcaccacgaaccacaacgctcaaccagctgacccctttggtctcaatccgagttctgctattccaggatctcagctatacaacacgccaactcagcagcctttccagtcacaacagcctccgcagcaggcggcgctctatgcgaatgggggtgctgtggaccctggaacgtcttacgatcaggcatcccagtttaaaaatgttagttctgggtggaatggtcaagctgccaaccctgttgtgcccctgccagagcaagcactgaattacgaactctctgtattcatatgaatcttcttttctgcccg

SEQ ID NO: 204187 - DNA, 2544 bp, Zea Mays
cgccgtcgaggcgtcctccctcccgagtcccacgagcacggagcaccggcctccggttcagattcggtgacacgcacggcacggacgaacccaacggggcactgctcacgggaaagagagaggattcctccgccgcgtccgcgttggactggacagctcacgccgctgcgaaagcaaccagccagagccagatccgtcggttccaacgaaacatccattcacgcccgccaccggcatccccatctccgatccgccgcagccgcagtcgcaggcacgtcctcctctccggccacccggagcgcggcagccagcgagcgagccactgtggtcgccgtgcaggcaatcaaaagatgtcgtcaaggcactaaagaaacggattggccacaagaatccaaaagttcaacttcttgcactaactctgttggaaactgttataaaaaattgtggggatatacttcacatgcatgttgcagagagagatatattgcatgatatggtgaagatagtgaagaaaaagtctgatcctcgtgttaaagagaaggtattggtgctgatagatacatggcaagacgtgtttgggggatcacatgcaagatatccacaatactatgcagcataccatgagttggtgcgtgctggagctgaattcccgaagagacccgagaaacctgcacctttgtttaatggccagtctcaggcagcaaggaatatgcgtagtcctgaccaacaggaagcggaatcttctgctgccaatgattttcctgctttgagcatgtcggagattcataacgcttgtggtattatggatgtacttgctgagatgctgaatgctttagacccaggaaacagagagggacgaggaacttatgtcgcaggggctcacactgaatgatgatttgcagcgtgttctagcaaaacatgatgcaatagcagcaggcattgcagtccgagtggagaaaaaatcgaagtctttgcaagcacttgtagagaccaaggattcgacaaaccaggattccaaaaaggagcaaggactcatagatattgaggatcccacaagtcaagatgctgcaaaagatccaaatcaaagtacaagtgaccaatctccttttgagcaattagctcttccagcaccaccagtgtcaaatggcgcagcaacttcagcaccacaatctgatcttggcattgatcttctgagctgggatgatacccctgctacaacacaaaatccacttgctcttgttcctgtcacagatcctcttgctgactctacttcatcaaatcaaaatgcgctagcaattgttgacacattttcagaaaacagcaccacgaaccacaacgctcaaccagctgacccctttggtctcaatccgagttctgctattccaggatctcagctatacaacacgccaactcagcagcctttccagtcacaacagcctccgcagcaggcggcgctctatgcgaatgggggtgctgtggaccctggaacgtcttacgatcaggcatcccagtttaaaaatgttagttctgggtggaatggtcaagctgccaaccctgttgtgcccctgccagagcaagcactgaattacgatgatcaaagtggaaaccttccaccgcctccttgggaggctcagccagcgtcaaacaatgaattgccaaatggccaattgggaagcttgcaacctctcccaggttcagctggccagatcggtggcatgcagcagccactgcaaccacaagttaaccacatgggagttccacaaagccagccaatgtatagtaaccaaccaatgcaacccggtcaggttgccgccacaacacagatgcagcctggcttcggaaaccagcagttcggttcgctaccaccaacatccatgctgggcatgcaattcggtggcatgcagcctccgcagatgtatggcggatcgcagccagtcatgatgtacccgcaacaaatggcagtggcccagtatggagcaatgccgcggcagcagccgacgtatggtggtcgattggcgggttacatgcagcatcctgctgtggctgccgcacactactacaacaaccaggggatgtatggctaccccggtgcgaacgggctgtcacagagcatgtatggcctctcggtgcaggacaactcgtccatggggatgaggtcgtcttaccagactacgacggcgccaccctccacggggcaacctatgaagccgacgaagcccgaagacaagcttttcggtgacctcctgagcattgccaagacgaagaaagcttcatgagacgagctggagcgggagcggccttctgatatatcgtctccccttttttttgtggtttttcgtgctgtttgatcttacacttgtaacattatctgaatgtgtaaacttttttggggtccttttcttttattcccacgtcgtgtgtgatcctattgatcccattggattcgttataccgtgtgcgtgtactgatcacgagcgatgggaaactttggccgtaaatgatgattcaataaagggtgtgcagtacgtgattatgatattgttc

SEQ ID NO: 204188 - DNA, 2531 bp, Zea Mays
cgccgtcgaggcgtcctccctcccgagtcccacgagcacggagcaccggcctccggttcagattcggtgacacgcacggcacggacgaacccaacggggcactgctcacgggaaagagagaggattcctccgccgcgtccgcgttggactggacagctcacgccgctgcgaaagcaaccagccagagccagatccgtcggttccaacgaaacatccattcacgcccgccaccggcatccccatctccgatccgccgcagccgcagtcgcaggcacgtcctcctctccggccacccggagcgcggcagccagcgagcgagccactgtggtcgccgtgcaggcaatcaaaagatgtcgtcaaggcactaaagaaacggattggccacaagaatccaaaagttcaacttcttgcactaacttctgatcctcgtgttaaagagaaggtattggtgctgatagatacatggcaagacgtgtttgggggatcacatgcaagatatccacaatactatgcagcataccatgagttggtgcgtgctggagctgaattcccgaagagacccgagaaacctgcacctttgtttaatggccagtctcaggcagcaaggaatatgcgtagtcctgaccaacaggaagcggaatcttctgctgccaatgattttcctgctttgagcatgtcggagattcataacgcttgtggtattatggatgtacttgctgagatgctgaatgctttagacccaggaaacagagaggggctaaggcaggaggtaattgtggaacttgtggatcaatgccgcacttacaagcagagagtagtgcagctagttaattctaccacggacgaggaacttatgtcgcaggggctcacactgaatgatgatttgcagcgtgttctagcaaaacatgatgcaatagcagcaggcattgcagtccgagtggagaaaaaatcgaagtctttgcaagcacttgtagagaccaaggattcgacaaaccaggattccaaaaaggagcaaggactcatagatattgaggatcccacaagtcaagatgctgcaaaagatccaaatcaaagtacaagtgaccaatctccttttgagcaattagctcttccagcaccaccagtgtcaaatggcgcagcaacttcagcaccacaatctgatcttggcattgatcttctgagctgggatgatacccctgctacaacacaaaatccacttgctcttgttcctgtcacagatcctcttgctgactctacttcatcaaatcaaaatgcgctagcaattgttgacacattttcagaaaacagcaccacgaaccacaacgctcaaccagctgacccctttggtctcaatccgagttctgctattccaggatctcagctatacaacacgccaactcagcagcctttccagtcacaacagcctccgcagcaggcggcgctctatgcgaatgggggtgctgtggaccctggaacgtcttacgatcaggcatcccagtttaaaaatgttagttctgggtggaatggtcaagctgccaaccctgttgtgcccctgccagagcaagcactgaattacgatgatcaaagtggaaaccttccaccgcctccttgggaggctcagccagcgtcaaacaatgaattgccaaatggccaattgggaagcttgcaacctctcccaggttcagctggccagatcggtggcatgcagcagccactgcaaccacaagttaaccacatgggagttccacaaagccagccaatgtatagtaaccaaccaatgcaacccggtcaggttgccgccacaacacagatgcagcctggcttcggaaaccagcagttcggttcgctaccaccaacatccatgctgggcatgcaattcggtggcatgcagcctccgcagatgtatggcggatcgcagccagtcatgatgtacccgcaacaaatggcagtggcccagtatggagcaatgccgcggcagcagccgacgtatggtggtcgattggcgggttacatgcagcatcctgctgtggctgccgcacactactacaacaaccaggggatgtatggctaccccggtgcgaacgggctgtcacagagcatgtatggcctctcggtgcaggacaactcgtccatggggatgaggtcgtcttaccagactacgacggcgccaccctccacggggcaacctatgaagccgacgaagcccgaagacaagcttttcggtgacctcctgagcattgccaagacgaagaaagcttcatgagacgagctggagcgggagcggccttctgatatatcgtctccccttttttttgtggtttttcgtgctgtttgatcttacacttgtaacattatctgaatgtgtaaacttttttggggtccttttcttttattcccacgtcgtgtgtgatcctattgatcccattggattcgttataccgtgtgcgtgtactgatcacgagcgatgggaaactttggccgtaaatgatgattcaataaagggtgtgcagtacgtgattatgatattgttc

SEQ ID NO: 204189 - DNA, 1743 bp, Zea Mays
  misc_feature (1)..(2): n is a, c, g, or t
nnaaagagacaccaattgtccacgacctgatcaacgcctttcagatgttggccctccacttcctgtggatcggcctccgtcacctccgccgttgccatcatctcctccacctgtgccacctccacctgcccatgttcatcagagtgcacatatgcagcctaaattacagacgacatctgatcacattgggccacatcctccaagagctacatataatgttcaaagtcaacaaccccattctattgcagaccacccaggtaacatgaattcttccgttgcaccattgccacccccaccttttaataactcaggatatggagggcaaccaaatcagataccgcctcccccaccatcggcaccactcaatcctcctggtccccaaggcagtttccctgctctcccagcaccatatcatgggaataactatcatcggcctccaaccacatcaatgcctaatgagggatataatctgcaaccagcaccccctccaccgcctccaaatcaattcccttctgtgccaccagaacaccaacataggccgcatcactggggtaataactgtccaccgtgtcctgagagatatcggtacaatggacatgatcgaggtcatcacagacatgatcgaaggcatcatgcgcacgacagacaacaccattatgatgatagaggataccgctatgatgatagaggatatcactatgatgatagaggccattactttgatgatagaagacatcagtttgatgacagagggcatcacttcgatgagagagctattagggggtcaatgcacaatgaggctgctgacaggtcaggatatccttttccaccaggacctcctccgattcctgaccattttgaagctccaccaggcccaatgcactatgggcgaccatcagatcctccaccagggcattgtgcaggctggtctaggccgcctaggatatctaataactattctccctcaagacattctgtggagcctccagtttcccatgcagctggagctggaggacatggtggatggagacctagataaccttttggaatattgaagtggccctgacgcttttcttaagtctgtgggggatttaacctgggagagtccggtggtctctgcttcggattgaaggcactcacggaccactccaggaaagcgggagctgctggtacctgcctccttgtacatatgtatctcaatgattctatggcggtcgcgctgcctgatttgcccttgtatccatcctaccacacggggagctgaattgtagggataggggtgtcttagattgtacttactatttgttggtgccagtctccgattccattgctgatgtccgttcctgaattcctcctggcctcagccgaaactgttgagagtacaccgtacatatatgccaaaaaagagtgaaatacaagtcattttgccctttgcacctctgctgtgctggtgacttgaccgattcgtaaaaagcccctgcatctgctaagacctgcgtgcattgcattgcttgtcaaggtacagagaacaaactgatgttccatctggacagtttcagctctgattgttcatttattttcaaccctattctcgtgtgtgtatgtatatatagagagcgagttcatacggtggaactaatgacttgcgattgatcattattgtttccctagaaaactaaaatctttcgttccgtttaatttatgaatggtgatatggctggtgtcgttccaaagattgacaac

SEQ ID NO: 204190 - DNA, 1753 bp, Zea Mays
  misc_feature (1)..(2): n is a, c, g, or t
nnaaagagacaccaattgtccacgacctgatcaacgcctttcagatgttggccctccacttcctgtggatcggcctccgtcacctccgccgttgccatcatctcctccacctgtgccacctccacctgcccatgttcatcagagtgcacatatgcagcctaaattacagacgacatctgatcacattgggccacatcctccaagagctacatataatgttcaaagtcaacaaccccattctattgcagaccacccaggtaacatgaattcttccgttgcaccattgccacccccaccttttaataactcaggatatggagggcaaccaaatcagataccgcctcccccaccatcggcaccactcaatcctcctggtccccaaggcagtttccctgctctcccagcaccatatcatgggaataactatcatcggcctccaaccacatcaatgcctaatgagggatataatctgcaaccagcaccccctccaccgcctccaaatcaattcccttctgtgccaccagaacaccaacataggccgcatcactggggtaataactgtccaccgtgtcctgagagatatcggtacaatggacatgatcgaggtcatcacagacatgatcgaaggcatcatgcgcacgacagacaacaccattatgatgatagaggataccgctatgatgatagaggatatcactatgatgatagaggccattactttgatgatagaagacatcagtttgatgacagagggcatcacttcgatgagagagctattagggggtcaatgcacaatgaggctgctgacaggtcaggatatccttttccaccagtcatatgcaggacctcctccgattcctgaccattttgaagctccaccaggcccaatgcactatgggcgaccatcagatcctccaccagggcattgtgcaggctggtctaggccgcctaggatatctaataactattctccctcaagacattctgtggagcctccagtttcccatgcagctggagctggaggacatggtggatggagacctagataaccttttggaatattgaagtggccctgacgcttttcttaagtctgtgggggatttaacctgggagagtccggtggtctctgcttcggattgaaggcactcacggaccactccaggaaagcgggagctgctggtacctgcctccttgtacatatgtatctcaatgattctatggcggtcgcgctgcctgatttgcccttgtatccatcctaccacacggggagctgaattgtagggataggggtgtcttagattgtacttactatttgttggtgccagtctccgattccattgctgatgtccgttcctgaattcctcctggcctcagccgaaactgttgagagtacaccgtacatatatgccaaaaaagagtgaaatacaagtcattttgccctttgcacctctgctgtgctggtgacttgaccgattcgtaaaaagcccctgcatctgctaagacctgcgtgcattgcattgcttgtcaaggtacagagaacaaactgatgttccatctggacagtttcagctctgattgttcatttattttcaaccctattctcgtgtgtgtatgtatatatagagagcgagttcatacggtggaactaatgacttgcgattgatcattattgtttccctagaaaactaaaatctttcgttccgtttaatttatgaatggtgatatggctggtgtcgttccaaagattgacaac

SEQ ID NO: 204191 - DNA, 1720 bp, Zea Mays
  misc_feature (1)..(2): n is a, c, g, or t
nnaaagagacaccaattgtccacgacctgatcaacgcctttcagatgttggccctccacttcctgtggatcggcctccgtcacctccgccgttgccatcatctcctccacctgtgccacctccacctgcccatgttcatcagagtgcacatatgcagcctaaattacagacgacatctgatcacattgggccacatcctccaagagctacatataatgttcaaagtcaacaaccccattctattgcagaccacccaggtaacatgaattcttccgttgcaccattgccacccccaccttttaataactcaggatatggagggcaaccaaatcagataccgcctcccccaccatcggcaccactcaatcctcctggtccccaaggcagtttccctgctctcccagcaccatatcatgggaataactatcatcggcctccaaccacatcaatgcctaatgagggatataatctgcaaccagcaccccctccaccgcctccaaatcaattcccttctgtgccaccagaacaccaacataggccgcatcactggggtaataactgtccaccgtgtcctgagagatatcggtacaatggacatgatcgaggtcatcacagacatgatcgaaggcatcatgcgcacgacagacaacaccattatgatgatagaggataccgctatgatgatagaggatatcactatgatgatagaggccattactttgatgatagaagacatcagtttgatgacagagggcatcacttcgatgagagagctattagggggtcaatgcacaatgaggctgctgacaggacctcctccgattcctgaccattttgaagctccaccaggcccaatgcactatgggcgaccatcagatcctccaccagggcattgtgcaggctggtctaggccgcctaggatatctaataactattctccctcaagacattctgtggagcctccagtttcccatgcagctggagctggaggacatggtggatggagacctagataaccttttggaatattgaagtggccctgacgcttttcttaagtctgtgggggatttaacctgggagagtccggtggtctctgcttcggattgaaggcactcacggaccactccaggaaagcgggagctgctggtacctgcctccttgtacatatgtatctcaatgattctatggcggtcgcgctgcctgatttgcccttgtatccatcctaccacacggggagctgaattgtagggataggggtgtcttagattgtacttactatttgttggtgccagtctccgattccattgctgatgtccgttcctgaattcctcctggcctcagccgaaactgttgagagtacaccgtacatatatgccaaaaaagagtgaaatacaagtcattttgccctttgcacctctgctgtgctggtgacttgaccgattcgtaaaaagcccctgcatctgctaagacctgcgtgcattgcattgcttgtcaaggtacagagaacaaactgatgttccatctggacagtttcagctctgattgttcatttattttcaaccctattctcgtgtgtgtatgtatatatagagagcgagttcatacggtggaactaatgacttgcgattgatcattattgtttccctagaaaactaaaatctttcgttccgtttaatttatgaatggtgatatggctggtgtcgttccaaagattgacaac

SEQ ID NO: 204192 - DNA, 1656 bp, Zea Mays
aactagcctgtattaccgttgcgcaaaagcggccgttacccttgaactagcctgtattgcagcggagccaccgccgatccggaacaattgaatcgctgcatcggtgtttcgccgccgccgcaaaaagaggcggccgcggtgagttcaagggaggaggaggaagagggtgtgaggcgctgcagaactcctgtggatcggtgagccgagggcgatatggggatgttcttcagcaaggcggaaccgccgccgcccatggtgctggtgccgccgctcttcgactaccctcccatcgctgcccgcaccaggtgtctgctgctgctgatagaaacagtggaacagaagtaaaaggggatgctttatttcgctggcagagagagctggatgacccccatacctttgtggaccttcttgtgtcaacttcaaatcccttgctgcagctgagattatgtgcatatcatcctaagtatcgtattggtgcctttggaacattacctttgctaatggggaacagggtgcgttcagaagactatggggtcatgggtgtaagatatggttcagagaatttatctgttggagcatcctttgtgccaatttccttacccagtgaggtaccctttggtgcatggttggttgggagaaaagggagcttatctgcaggagtacaatacaagccacttagtggcagcaaatatcctatgccatttacagaattggagaactggaattatgcaatcagttatggtgttggctcaactagcccgctcagcccttcattcattttctccctggaacttgccagaagcacacagctaaccgcatcattctatcagcacctggttgttcaaagaagggtaaaaaatccttttgaagatgatcaggttgttggcattacaaactacatcgattttggacttgagttggctgccaaggttgataaagataaagtgagtggggatggcaactcgtttcagttggctgcaagttggcaagctaacaaaaactttctgctgaagggaaagcttggtccttccacgtcctctgtagctctggcattcaaatcatggtggagaccatcctttacatttagtgtaacagctgtgaatgatcattcaaagggcacaacatcgtatggatttggcctccgtgtcgaggaccttagacgagcgagttaccagcgagctgatccaaactacgtcatgctgacgccaagcaaggagcacttggcaccaggtgttctgcgcgagtacgggaagcggcccatgttccagacacaaatcgattcgggcaactacgaccatctgcctacagagctgaagcctcttggcaggattttctaactgtaggctggctgctcgtgctcgtggtcgtctttcgctaggagagattttttgttgttgttgttgtagatcttatccgtcttggtcctttagacatgctgctgtaacttgcattgactcgtgagcggattgcgtcatgatagctgcatggcttttggaagccagaaggatcatccaacgcttcttcttgcattgctatgtacttgggtggatatatataacggtatggtgcagtggacaggcggtcttgaatcctcattcacttgtatgatatcatcgggtcgcagtccagtacgtggatgaatcgcagtcagctggg

SEQ ID NO: 204193 - DNA, 3053 bp, Zea Mays
cttttggcagttgcttagtcctcacggattccgatgcacgagatttgggtcggggacaagccatgaacaacgcaaccaccagttgttaactaaccctcttttaaacttcaagcaaccaaagccaagagcagaaatggttttccaaaagtggtcgtcgtcgtcagagatggagtcgtgcggtggaggccaagtcccggagatgccacgcgttcccaagtccgcgaggggcaagagatcggtcaggaagaaggaggcccagagcccggcccagatgtctgcaatcgaccttctcgcaaccgtggcagggaagctgtttgacgagggggcggggtcgctggggaacacgagcgccggtgccccggccttggctgcgttcgcaaaggatgccctggtgaagcaggagcagtgtgatgagcaaatgaagctgttcaagcatgaggcgacggatcaggatagctgcaatgagagtgcaatcctcccccacattgtgctccagcgggtggtgaataatgctaggaatgaggatcctaaggcgaagtctgaggtccaggacaaggaatcctccatgatcagctatacgaaggctgaattgggttgtaattttggtgtgatcgcagacaggtggtcgcctgaatccgtggaatcaggagccttcacaggagatgcagtggcgagactgatgatgacggccccggcaggatttcataagaatgcacccgaaatgtatagtttgcttgattcaatggatgtggatgtcaagccgcctcctttggtcagctctgacagcaccggcgagatgccattgcatggcgataaaattcaccgctcaacctccttaccgagggccccaaagggggtggggttttttgctgtagatagagatgatgacgacgacaagtcctctgggtgcactcatccgagcaccgccactaacaaggatttcacatccaattgtaaagctgagtataatagggtaaggaagctgctcactagtaagcacaggaaagttgctccagcgaggattcacaaatctgatctttcctatagtgatgtcgagcggaagccttctttccggtacaaaaaaatgcatacacgacagaggacacaaaggagtacattcaagcggaggaagctctttgatcgccatttagctctagcatctgaatttggtacagcaaatggaaagggaaacacaaaggttgccggaagaaactccaatgctgtgtctttggaagcaaacaaggggactaattcaatgccattccagaaatcttgtgggtcaaatgattgccatgtgaaacttagaattaagtcttttaacgtgcctgaacttcttgttgaaatcccagacagtgcaactgttggctcactaaagaaaactgttctcgaggcagtgactgcgattcttggaggtggcctacgtgttggtgttcttcaccatggaaagaaagtcagagatgatagtaaaacgttaattcaggctgggattggtcaggatgatatgctggacaaccttggcttttcacttgaacccaactgtactcaaaacccacaagtacaagctcctgaagatgtcagtttcctcgaaaacattgatactaccgaacccctcgcaaggatcacacctgctgactcgtcttctaagcttggtgaagttgacgtatcacaggagcttgcattaaccccattagcaatgaactaccagggcagtgatcatgattccgtgcactcccctggggctgtctcgtcgcgcgataaagactcgcgagccttatttctggttccagctgcagatcccaatgcaggagctgtagttccagcaaataagactaagaggtcaccagagcagggacaccgcagaatcaggcggccgttctctgttgctgaagtagaagcacttgtgctcgcagtcgaaaagcttggaaccggaaggtggcgagatgttaaacttcgcgcttttgacaatgcaaagcaccgtacctacgttgaccttaaggacaaatggaagacgctggtacacacagcgagcatctcgccgcagcagcggcgtggcgagccggtgcctcaggagctgctcgaccgggtcctggcggcccaggcctactggtcccagcagcaagccaagctccagcctaagacgccctcgctggctgaggctcgcttgctcacccaataattcgatgatcccggctgatggcctcctctgaggccgttgcagcctttgtataaagtcagtaagtcccttcacaggaggtttaatgaaaatataatattaggggaaaaaaagaatgcatatataaggtacaagaagcattgaccgatttgttgtaatatctactcaccaccggttattctttaagccaggattctctctccttgtgaatttaaccaaaggaaagggcatttctttggcaattgtacattttgatgatggaagaagaagatgatccatgaactgagatctgcagtgtctacctactaatggctcacaatttttgcaattgtgattaagaaattcaaggtgctgcttgaccaagctcggctccggcttccagtttttggattctcttgtgaagaagttgctgcctcttttttatacagcagaagctgagagccgaacagtgtatttggcttgaattgcagcctatatagtttcatccactcatacagacggccacaaatgccgtaaaaggagggtagcttcttttgctgagtctagtcttgggagcaaagctcaggaccgaagtctagacttgagacggagcgggggccaaagcggcacccgaatgaaagcttcagattcttttgttcagttaaattcattctttggtagtggagactgacggaaggataggagattaggtggggtggatctttggttctctttttctttcttcttctattattacattattagttgtattaatgtactatattattttaccaatcttgtagttaccctcaaatttgtaattggtgaaattaacaaaattgaaggaaatacatttccaccacttcgctaccctttttaaattattattatgggtctcatc

SEQ ID NO: 204194 - DNA, 3143 bp, Zea Mays
caacccacaccaccgcaccacgcacctccaccaccagaagaaaaaaccaaggcggagggcggagaggagagcaagggggcagaagggaaataaaaataaaagaggagaggcgaagcaaggcgaggaggaggagggagcacccagaggcaggggagggggaataattccgcaggggctcgagggatctcgtcgggtctggccggagcagcacggcgaggcggcgatccgagggcgagcggaggcgggcgagcgtcgacgccggcgagatttgggtcggggacaagccatgaacaacgcaaccaccagttgttaactaaccctcttttaaacttcaagcaaccaaagccaagagcagaaatggttttccaaaagtggtcgtcgtcgtcagagatggagtcgtgcggtggaggccaagtcccggagatgccacgcgttcccaagtccgcgaggggcaagagatcggtcaggaagaaggaggcccagagcccggcccagatgtctgcaatcgaccttctcgcaaccgtggcagggaagctgtttgacgagggggcggggtcgctggggaacacgagcgccggtgccccggccttggctgcgttcgcaaaggatgccctggtgaagcaggagcagtgtgatgagcaaatgaagctgttcaagcatgaggcgacggatcaggatagctgcaatgagagtgcaatcctcccccacattgtgctccagcgggtggtgaataatgctaggaatgaggatcctaaggcgaagtctgaggtccaggacaaggaatcctccatgatcagctatacgaaggctgaattgggttgtaattttggtgtgatcgcagacaggtggtcgcctgaatccgtggaatcaggagccttcacaggagatgcagtggcgagactgatgatgacggccccggcaggatttcataagaatgcacccgaaatgtatagtttgcttgattcaatggatgtggatgtcaagccgcctcctttggtcagctctgacagcaccggcgagatgccattgcatggcgataaaattcaccgctcaacctccttaccgagggccccaaagggggtggggttttttgctgtagatagagatgatgacgacgacaagtcctctgggtgcactcatccgagcaccgccactaacaaggatttcacatccaattgtaaagctgagtataatagggtaaggaagctgctcactagtaagcacaggaaagttgctccagcgaggattcacaaatctgatctttcctatagtgatgtcgagcggaagccttctttccggtacaaaaaaatgcatacacgacagaggacacaaaggagtacattcaagcggaggaagctctttgatcgccatttagctctagcatctgaatttggtacagcaaatggaaagggaaacacaaaggttgccggaagaaactccaatgctgtgtctttggaagcaaacaaggggactaattcaatgccattccagaaatcttgtgggtcaaatgattgccatgtgaaacttagaattaagtcttttaacgtgcctgaacttcttgttgaaatcccagacagtgcaactgttggctcactaaagaaaactgttctcgaggcagtgactgcgattcttggaggtggcctacgtgttggtgttcttcaccatggaaagaaagtcagagatgatagtaaaacgttaattcaggctgggattggtcaggatgatatgctggacaaccttggcttttcacttgaacccaactgtactcaaaacccacaagtacaagctcctgaagatgtcagtttcctcgaaaacattgatactaccgaacccctcgcaaggatcacacctgctgactcgtcttctaagcttggtgaagttgacgtatcacaggagcttgcattaaccccattagcaatgaactaccagggcagtgatcatgattccgtgcactcccctggggctgtctcgtcgcgcgataaagactcgcgagccttatttctggttccagctgcagatcccaatgcaggagctgtagttccagcaaataagactaagaggtcaccagagcagggacaccgcagaatcaggcggccgttctctgttgctgaagtagaagcacttgtgctcgcagtcgaaaagcttggaaccggaaggtggcgagatgttaaacttcgcgcttttgacaatgcaaagcaccgtacctacgttgaccttaaggacaaatggaagacgctggtacacacagcgagcatctcgccgcagcagcggcgtggcgagccggtgcctcaggagctgctcgaccgggtcctggcggcccaggcctactggtcccagcagcaagccaagctccagcctaagacgccctcgctggctgaggctcgcttgctcacccaataattcgatgatcccggctgatggcctcctctgaggccgttgcagcctttgtataaagattctctctccttgtgaatttaaccaaaggaaagggcatttctttggcaattgtacattttgatgatggaagaagaagatgatccatgaactgagatctgcagtgtctacctactaatggctcacaatttttgcaattgtgattaagaaattcaaggtgctgcttgaccaagctcggctccggcttccagtttttggattctcttgtgaagaagttgctgcctcttttttatacagcagaagctgagagccgaacagtgtatttggcttgaattgcagcctatatagtttcatccactcatacagacggccacaaatgccgtaaaaggagggtagcttcttttgctgagtctagtcttgggagcaaagctcaggaccgaagtctagacttgagacggagcgggggccaaagcggcacccgaatgaaagcttcagattcttttgttcagttaaattcattctttggtagtggagactgacggaaggataggagattaggtggggtggatctttggttctctttttctttcttcttctattattacattattagttgtattaatgtactatattattttaccaatcttgtagttaccctcaaatttgtaattggtgaaattaacaaaattgaaggaaatacatttccaccacttcgctaccctttttaaattattattatgggtctcatc

SEQ ID NO: 204195 - DNA, 3291 bp, Zea Mays
caacccacaccaccgcaccacgcacctccaccaccagaagaaaaaaccaaggcggagggcggagaggagagcaagggggcagaagggaaataaaaataaaagaggagaggcgaagcaaggcgaggaggaggagggagcacccagaggcaggggagggggaataattccgcaggggctcgagggatctcgtcgggtctggccggagcagcacggcgaggcggcgatccgagggcgagcggaggcgggcgagcgtcgacgccggcgagatttgggtcggggacaagccatgaacaacgcaaccaccagttgttaactaaccctcttttaaacttcaagcaaccaaagccaagagcagaaatggttttccaaaagtggtcgtcgtcgtcagagatggagtcgtgcggtggaggccaagtcccggagatgccacgcgttcccaagtccgcgaggggcaagagatcggtcaggaagaaggaggcccagagcccggcccagatgtctgcaatcgaccttctcgcaaccgtggcagggaagctgtttgacgagggggcggggtcgctggggaacacgagcgccggtgccccggccttggctgcgttcgcaaaggatgccctggtgaagcaggagcagtgtgatgagcaaatgaagctgttcaagcatgaggcgacggatcaggatagctgcaatgagagtgcaatcctcccccacattgtgctccagcgggtggtgaataatgctaggaatgaggatcctaaggcgaagtctgaggtccaggacaaggaatcctccatgatcagctatacgaaggctgaattgggttgtaattttggtgtgatcgcagacaggtggtcgcctgaatccgtggaatcaggagccttcacaggagatgcagtggcgagactgatgatgacggccccggcaggatttcataagaatgcacccgaaatgtatagtttgcttgattcaatggatgtggatgtcaagccgcctcctttggtcagctctgacagcaccggcgagatgccattgcatggcgataaaattcaccgctcaacctccttaccgagggccccaaagggggtggggttttttgctgtagatagagatgatgacgacgacaagtcctctgggtgcactcatccgagcaccgccactaacaaggatttcacatccaattgtaaagctgagtataatagggtaaggaagctgctcactagtaagcacaggaaagttgctccagcgaggattcacaaatctgatctttcctatagtgatgtcgagcggaagccttctttccggtacaaaaaaatgcatacacgacagaggacacaaaggagtacattcaagcggaggaagctctttgatcgccatttagctctagcatctgaatttggtacagcaaatggaaagggaaacacaaaggttgccggaagaaactccaatgctgtgtctttggaagcaaacaaggggactaattcaatgccattccagaaatcttgtgggtcaaatgattgccatgtgaaacttagaattaagtcttttaacgtgcctgaacttcttgttgaaatcccagacagtgcaactgttggctcactaaagcatttccaatgcagaaaactgttctcgaggcagtgactgcgattcttggaggtggcctacgtgttggtgttcttcaccatggaaagaaagtcagagatgatagtaaaacgttaattcaggctgggattggtcaggatgatatgctggacaaccttggcttttcacttgaacccaactgtactcaaaacccacaagtacaagctcctgaagatgtcagtttcctcgaaaacattgatactaccgaacccctcgcaaggatcacacctgctgactcgtcttctaagcttggtgaagttgacgtatcacaggagcttgcattaaccccattagcaatgaactaccagggcagtgatcatgattccgtgcactcccctggggctgtctcgtcgcgcgataaagactcgcgagccttatttctggttccagctgcagatcccaatgcaggagctgtagttccagcaaataagactaagaggtcaccagagcagggacaccgcagaatcaggcggccgttctctgttgctgaagtagaagcacttgtgctcgcagtcgaaaagcttggaaccggaaggtggcgagatgttaaacttcgcgcttttgacaatgcaaagcaccgtacctacgttgaccttaaggacaaatggaagacgctggtacacacagcgagcatctcgccgcagcagcggcgtggcgagccggtgcctcaggagctgctcgaccgggtcctggcggcccaggcctactggtcccagcagcaagccaagctccagcctaagacgccctcgctggctgaggctcgcttgctcacccaataattcgatgatcccggctgatggcctcctctgaggccgttgcagcctttgtataaagtcagtaagtcccttcacaggaggtttaatgaaaatataatattaggggaaaaaaagaatgcatatataaggtacaagaagcattgaccgatttgttgtaatatctactcaccaccggttattctttaagccaggattctctctccttgtgaatttaaccaaaggaaagggcatttctttggcaattgtacattttgatgatggaagaagaagatgatccatgaactgagatctgcagtgtctacctactaatggctcacaatttttgcaattgtgattaagaaattcaaggtgctgcttgaccaagctcggctccggcttccagtttttggattctcttgtgaagaagttgctgcctcttttttatacagcagaagctgagagccgaacagtgtatttggcttgaattgcagcctatatagtttcatccactcatacagacggccacaaatgccgtaaaaggagggtagcttcttttgctgagtctagtcttgggagcaaagctcaggaccgaagtctagacttgagacggagcgggggccaaagcggcacccgaatgaaagcttcagattcttttgttcagttaaattcattctttggtagtggagactgacggaaggataggagattaggtggggtggatctttggttctctttttctttcttcttctattattacattattagttgtattaatgtactatattattttaccaatcttgtagttaccctcaaatttgtaattggtgaaattaacaaaattgaaggaaatacatttccaccacttcgctaccctttttaaattattattatgggtctcatc

SEQ ID NO: 204196 - DNA, 5015 bp, Zea Mays
acggtctcggcccctcggcgggcctccccgcctccctcgcccctgccttcgcctcattggtattggcgtccgcttgctcgctatggccgccgccccgtcgccgcggccgcgaatggcacaccgcaaaggcggagccgcccccatctccctcttccttgacaccgatctcggcacccacctcgccctgctcgtcgccccggacaccggcatccgcggcctcaagtgtggccgcggagcacgctgccgccttccccgacattggccccgtcatcaccaagtccttccaggtccggcggaagggtgtactgtatcgcctttctgattcaatgacagtgatgagttccttcaccaaaattgaaggtgggtgctttcttcacgtcaatatggcagaggctacagaagccacatactgctgccaagatgctccagcaattgatgataaaagattgagtgatgttagtcttggaattcatgtaaagaaccatattaaggagctgcctgtgatggcatcagatgttgcttgtgatttgctccctagagaccttgaaggtggtaatgatgacaccacgctgaataatgttcaagcacatgatgcattgcccaattgtaccttggtgccatcctcatcacagctaaatactgaaatactgaagaacaaagcagtgggtatggacagtgatgcagaagcaggaattgatcaagttattgacaaagcgaagagttacagtggccagataaaacatgctaatcaagctgaaggcacctacattagttccacatcaatggcatgtgttgataaatcttcaaatgagagtaatatgtcacatgctgtggcggagctacatgcaagtcgagaccatggcgttggtgatgatgtttctgacaaaaagcaagtcagggtagagcagcaactgctggaagagatacaatcaaaggatactctttcacaagtaaaggagcacaaaaaatctaggactggtttttttgacgcatcatgtacgtccctactgaaaacaggtactactcttgtggaatctttaaacacttctaatcatcaagaagtccatgaaaccttcaatgtggagtccatccagctagaaaatccaagcactgttggaaagaagaagaaaaggaaaaggcgtcaattgtccccttcaaaatctgcttctgctcaagagacaatagaaccatcagctacggcagtagatttattaaaacccacaggtgaaggtctgcctaataacagccttgggatacagattcataatatacttgcaatggataatctttcacaagaaaaggagcacaaaaaatctaggactagttctcctgacacatcaagtaggcatctactggaaacagaccctgcttctcttagggaacctttaaacacttcgaatcatcaagtccatgacactttacatcaggagtccatccagctagaaaacccaagtgctgctgggaagaagaaaaagagaaagcgtcaattgtccccttcaaaatctgtttctactcaaataacgacagaaccatcgcctggggcagccccagcagacttatcaagatccacaggcgacgaagcatataatgttgaattgaatggcaaagatgaaactatagtcgaagaatctggctgtcgtctttcatcatcagaacttaatgatgcaaaccaggggggcaaaagtgttcagtttgtgagcgatgctctggcatctatagatctaatctgtaaacaagagaagtttggtcattctctcaagggatgtaaggatccttcaattgcaaatgccatttattctacaagtgaaaatgtagctattgaaggaaaaactacaaaagaaagttgtgtccctttggatagaggggacaagcatgaagaaaaaaaacaacacaatgagggatgtcataatgaagctgtacctgaaataagccacatggagaaaggtggcagaagtacagatgtctctaacaagaggcacacaaatcaaattacttctcaagtgaagaagggcaaaaaatcaaaggttggttctgttggcatgcctaccgtggatgccactggtgaaaaagatcatatgtatagtgaaaatgctgccaaacaagatactgtttctactaaaaaggagattgcccatgaaccttctgtgcagcagatgtcaaacattgtgtatcaaggagattcaaatgtagtagaaaatccgagtggtgatggaaagaaaaagaaaaaaagaagacgccactcagaatccttaaagggtatgaatcctagtcaagatctgacatcatcttctggatttgtaacaaacaaaaactcgatacaatgtacagatgctgctccaatagatgcaaagcaaacaacccagggcattatagaaggagaaacagttaatgagcacatgaagcttagtagaagtctagatgtagcagcaacaaatattgttgatggggtattggcagatctacgacctaaagacagcttaagtaaggatctggatgaagatcttttaccaggacaaactcacctaggcagcaatcagaatggactagaagttcctgaatccattgctgttaaagttggtagcgttactgcagcattacctccaaaatgccctgcagcggttcactttgcttctcctgttagctcacctagacaaaagaagtctaaggggaaaaaatcgaaagtgctatcaaccatgactgactcttctcatcaatcaagtggtgtatccgaagaagatgctaatagagaattaacagaatctgattctttgaggtttgctgataaaacaagtgatcctgaggatatagtaactggaaatgtggttgcacaagctgatgataagcgcaaaaccactaagcgtcaaaggaagaagggctctgttaagcaggtatgtgatacattggcattgaaggaaacaaatgatgcagaagaaaatttggttcagggaggttatgtagttgacactcctttaagcactgttggggaagtagagcagaaaggcaagtcttctcagataccgactcctaaaatacgaaaaactaattgttctactcatgggctggatagtcacacaactaaggacaaccagggtgtgtatgtaactgacatcattgaaacccatgataatgaaaatgctgcaggaactccaaccttgcatgaagttcagaaatatgcaatggttctcaaatctgccaacactaattctcaaaagcaaaggaaaacatcttcgaattctgaacttcaaagtcaggattgtgccctggaacatggtttcactgcagatttggtgaacggcaggactgaaagggaagttagcactacaagttctgctagtgctgttaaacctgattaccacaccgtttttcatcgtgctaatgatggaatcaatttcctcgatcattttagctgcagcaatatgaatgatgatccatcaattgctgcagaaagtaagcaaaacaatgaagatgaacctttaagggaaatgaagaataaaaagaagaaatggaagcaaggtactagtagcattgaaccaaatgacattctagaatcttttccctcagagaaagctagcttaactggtcattttggtaccagcaaagctattgtgtcatctgttgcaaaagaaagcatgaacatagaaaatgagaatgtgaatgacggcaaggagaagaagagaaagggcaaagctaatatggaagtacctactgctgaaaaggacaattctaattgtgataatcaaggaattgatattagtacccaagaatcacttatttcttttgtacaaaatgaaaggacgggtcaggacaatggaaaagagagcaacagtaaagttactcagaatgccagtataatgcaacatggacgagaagatcccacttggaatcatactcctgagaagaatctccaccagagtgttgatgatgatcaaaacaagttgctcactgaaaaggatcatgcacatataagtaaagaagtggggaaattcacttctcagccaaagccccatgctaagattagaaagcctgatgagtttactatcaagggaaaggtggctccaaatcctaagcctgtaagcaaccttatgaaggatttttccacgagcccaggagcgtcaagtgacagcacagagggtatgccacaaagtgctaaccgatataaagtttcagtccagaaagtcccaagtaaaatgtatcaagagaccagtggaaactccaaaaaagcgagtaggaaaatagtctctggtgcaatatccaatgactctatcagggagggttgtggtgatgaattggacaccacaactgtcatggaaggatcatctgatagttcatctacctctgctgactcaggtatttcatctacagcctatgatgaaagtgaggcttccgatgatgatggggccatatcactatctcagaagagtctcaaaggtggtctgcacattagctccatcctccgtggttcccgtagctataagaaggcaagaaagaagctggaggagctgttagacgatgatgacaccattgtgcctgatagccagcccacggatggtcttcggggttgaacatgcgtcaaccttttgcaattatccacctaatacggtgcaagtttcatgcgagccccaaagccggtgtgctttgcaattgctgtagcttaacctcccacaatttgtctaaaacacatgcgcgccggcgttatccgttgaggattgcgtatttttatttattgttctcctctgtgcatactcttttcttttcgggagcaaaaaaacattgcatacacgatacatatagtgcctaaaatatacagatcatacatgagatgtaagagcatcagttcaagccgcagcattctatctactcatcatttgtacaaggctggaatagcatgtgatacggcatcgtcaaactaacaaacagacgatcacggggtgcgagacagtctcgtcatctgcgcttctgggtcttcatccctaatgttggcagtcttgcccatagatttctggctcaacatccgg

SEQ ID NO: 204197 - DNA, 1853 bp, Zea Mays
cggagccgtccacgccgccacgggccacggcctactacgatggtagggattccctagaggccttgaccggttgaccccgcaacggctatttttttctcctccctgacctaatgggcgtactagccgttggtcctgcggtgcggcgggcgttccggcttcgctcttgcctcttgctacaaataaccattcacggccgatccctaaaccccacaaagcaaagcagcctctctctctctgtctctctctctcgcctccctctcgcctccctctcgacgacgatctcaggcgctcgcggggagtcgagtcgagaccagcttcgttccttcataaaaagctcacttagttgttgtccccgcctctttttttcgctgttcttgtttgattacatcatcttattttgtgcttgaatctaacctgccattaagtttttatcgcttcgttatttctctgttgtgcttgtcttgttcttttgttgctctaaccatggacgcaggctcccgctcgatctcctcggcgaagaaccgcgccgccgccgtcgccgccgcgccccggccaccgctgcaggaggcgggctcccgcccctacatgccatcgctgagctcgggaccccgcaacccgtcggccaagtgctacggcgacaggttcatcccggacaggtcggcgatggacatggacttggcgcactacttgcttactgagcccaggagggacaaggagaacgcgtcgggcatggcggcgtccccgtccaaggaggcgtaccggaggctgctcgcggagaagctgctcaacaaccggacacggatcctcgctttcaggagcaagccgccggagcccgagaacgtttcttttgcggacacgacttcctccaacctgcaggccaagccggccaaacagcggcgccacattccccagtctgccgagaggaccctagacgcaccagagctagttgacgactactacctcaacttgcttgactggggaagcaacaacgtgctatccattgctttgggagacacggtgtacctgtgggatgcatcgagcggatccacatccgagcttgtgaccgtcggcgaggacagtggtcctgttacaagcgttagctgggctcctgatggtcggcacatggccgtcgggctcaactcgtctgacgtccagctctgggacaccagctccaaccgactgttgagaacactcagaggtgcgcatgaggcaagggtaggctcgctggcatggaacaacagcgtcttgaccaccggttgcatggacggcaagatcgtgaacaatgacgtgtgcgctctgctgtggaacaagaacgagagggagctgctgagctcacatggattcacacagaaccaactcaccttgtggaagtacccatcgatggtgaagatggctgaacttaatggccatacctctcgcgtcctcttcatggctcagagtcctgatggatgcacagtagcgtcggctgctgctgacgagaccctccggttctggaacgtttttggaacccctgaaacgcccaagcctgcagccaaagcttcccacactgggatgttcaacagcttcaaacatatccgataggatgagtcaagactattattggatattgtctatacttgacttgatgatggcctgtcgttttcggaaggtcagaaatcaatgacacagggtttgcttcagaaatcagatgtaatgttttttcctcatttttggttggaacatcaagggcgcttgtttgatgtaccaattattgtaaatcaagacagcaatatatataaattgatattttgtcggttggatttggaaattgttgtaaatcggcaaccgtttgtttcaacatcaagagcacttgt

SEQ ID NO: 204198 - DNA, 1826 bp, Zea Mays
gaggccttgaccggttgaccccgcaacggctatttttttctcctccctgacctaatgggcgtactagccgttggtcctgcggtgcggcgggcgttccggcttcgctcttgcctcttgctacaaataaccattcacggccgatccctaaaccccacaaagcaaagcagcctctctctctctgtctctctctctcgcctccctctcgcctccctctcgacgacgatctcaggcgctcgcggggagtcgagtcgagaccagcttcgttccttcataaaaagctcacttagttgttgtccccgcctctttttttcgctgttcttgtttgattacatcatcttattttgtgcttgaatctaacctgccattaagtttttatcgcttcgttatttctctgttgtgcttgtcttgttcttttgttgctctaaccatggacgcaggctcccgctcgatctcctcggcgaagaaccgcgccgccgccgtcgccgccgcgccccggccaccgctgcaggaggcgggctcccgcccctacatgccatcgctgagctcgggaccccgcaacccgtcggccaagtgctacggcgacaggttcatcccggacaggtcggcgatggacatggacttggcgcactacttgcttactgagcccaggagggacaaggagaacgcgtcgggcatggcggcgtccccgtccaaggaggcgtaccggaggctgctcgcggagaagctgctcaacaaccggacacggatcctcgctttcaggagcaagccgccggagcccgagaacgtttcttttgcggacacgacttcctccaacctgcaggccaagccggccaaacagcggcgccacattccccagtctgccgagaggaccctagacgcaccagagctagttgacgactactacctcaacttgcttgactggggaagcaacaacgtgctatccattgctttgggagacacggtgtacctgtgggatgcatcgagcggatccacatccgagcttgtgaccgtcggcgaggacagtggtcctgttacaagcgttagctgggctcctgatggtcggcacatggccgtcgggctcaactcgtctgacgtccagctctgggacaccagctccaaccgactgttgagaacactcagaggtgcgcatgaggcaagggtaggctcgctggcatggaacaacagcgtcttgaccaccggttgcatggacggcaagatcgtgaacaatgacgtaaggattagagaccacgtcgtgcagaggtgtgcgctctgctgtggaacaagaacgagagggagctgctgagctcacatggattcacacagaaccaactcaccttgtggaagtacccatcgatggtgaagatggctgaacttaatggccatacctctcgcgtcctcttcatggctcagagtcctgatggatgcacagtagcgtcggctgctgctgacgagaccctccggttctggaacgtttttggaacccctgaaacgcccaagcctgcagccaaagcttcccacactgggatgttcaacagcttcaaacatatccgataggatgagtcaagactattattggatattgtctatacttgacttgatgatggcctgtcgttttcggaaggtcagaaatcaatgacacagggtttgcttcagaaatcagatgtaatgttttttcctcatttttggttggaacatcaagggcgcttgtttgatgtaccaattattgtaaatcaagacagcaatatatataaattgatattttgtcggttggatttggaaattgttgtaaatcggcaaccgtttgtttcaacatcaagagcacttgt

SEQ ID NO: 204199 - DNA, 1080 bp, Zea Mays
gaaagaagcaagtcttctcttgctccaggttctactacagatgcacatacaagaacgacatgaagtgccccgcgacgaagcaagtgcagcagaaggacagcagcgacccgccactgttctccgtcacttacttcaaccagcacacctgcagcagctcaagcgccctcggcagcgccagagacgtcgcgtcccagtcgtcttcaaagaaggcggtgtcgatctgcttcagcccgcacgccccctccgagcagacctcgttcctgacgacgactacggtcgcgccgccggttatgcactcctacggcgccaaccgacagcccgacaggagcgcctacaaccaacagccccagtggtggacaggcggtgtgccatctcccacaagcaacggccctgctaagatggaggtcgcggagtccacgcagaagccgagcggttcgtacggcagcaccaccggcaacgctccgtccaggacgctgctaccgatcggccagtccaggtgcatcgagtacttccatttcttgtgatgagcttccgggaaggcaagctggggctcgggcactgcagcttggtgtctgcttgtttggagtggcaagtggagtttgtatctggagctggaggcgaaggcgaaaatgttgctgccgtcgtcctggcctcctggcctgaactacacaggccgggcggggcccaatcagtatactgactgacctgcattgcattacatacagagactgcctgctgcttactgtactgtacatctttgcatttgggttcaagccacgttttggtgcttggatgatgtgaagaatggtattggactgttggggtttctttatctagcagtagcgtacatgatatgatacgacgtacagaatgactgcttgacagttgagatatatccatttgtttgttatgtgttgtttgctgtttgtttagagatgagactaggatgtctcatttctgacagcgggatattggccatggttcagtctgctgctacggaaatgctgaaggttatagattatgtacactaaacagtaacagtttcttattaacatgtcttctacagttttagaagcagaa

SEQ ID NO: 204200 - DNA, 1472 bp, Zea Mays
agaagttcatgtacccatgcatcggatggggaagtcataacttccgtttttgttcttatttaaagataacccactaccttgacgagctggcatctgctggttacattctgctcccttcatgtagcattatggatgaagttctttgagcataagccttttgattcaagaactgtcatgggatttggagtacttaacggaatctccattgggctcctcaacttgagtcttggcttcaactctgttgggttttaccagatgactaagctggcaatcatcccgtgcactgtcattttagagacacttttcttcaggaagaagttcagtcggagtatccagatgtccctttctgtgcttcttcttggtgttggtgttgcaactgtcactgatctgcaactcaatgctgtgggatccatactgtccttgctggcaattatcacgacttgcattgctcaaattatgacaaacactatccagaagaagttcaaggtctcatcaacccaactgctttaccagtcttgcccttaccaatcactgaccctgtttctcattggccccttccttgatggctttttgactaaccaaaatgtctttgcttttaattatacatctcaagttgtgtttttcatcgtcctgtcatgcttgatatctgtttcagtgaacttcagcactttccttgtgatcggaaagacatctcctgttacttaccaagtcctgggccatcttaaaacatgccttgttcttgcttttggttatgttttgcttcacgatccgtttagctggagaaacatacttggaatcctaattgctgtagttggaatggtcttgtattcatacttctgcacagtggagacccagcaaaaaaatgttgaagtctccccacaacaggtgaaagaaagcgaggcaggccctttgatcgcagactctatgagcaaagttgaaaacgggggtggtggtgttgatgacgagcctttgaaggtacccatgtggagctcaaagtactcgcgggagtgaaaaggtcacgatggcatggcaccatacaggattcaatttagtaggcagatagtagggttggaagccaacccagagtgtaatgaacatttcagttacatttttgggcttctttagtgtcgcagtctactagcagttaaaggatctgtttcttggaaggatcctaccttcagggctctcagacctaccttgaaactagacagcaggtattgtatgattgtatctcgatatgctccacatcctcttactgtaacttccaactggtacatggcgtgcctatatccaaagatagacctcattctttttgtatcaagaagatccggataagaagacttgtgcaagatttgtagcgtttagtgaaatttgtgactgtcagtcatgttcgctttaaaaaagtttagtaatttaaaagtcaattaagaaaactcccgtctttcctgcttccatgtaaagaaacatattag

SEQ ID NO: 204201 - DNA, 2229 bp, Zea Mays
ataatttggctaaggcttgtgctgcctatcgtgactttgtatcacaaaatgctataagagttaaaacttcttgttttttcttaaaaagttttggactagggtagtggggttttaaattttgctgagatacttctacctgcctccactaccttgacgagctggcatctgctggttacattctgctcccttcatgtagcattatggatgaagttctttgagcataagccttttgattcaagaactgtcatgggatttggagtacttaacggaatctccattgggctcctcaacttgagtcttggcttcaactctgttgggttttaccagatgactaagctggcaatcatcccgtgcactgtcattttagagacacttttcttcaggaagaagttcagtcggagtatccagatgtccctttctgtgcttcttcttggtgttggtgttgcaactgtcactgatctgcaactcaatgctgtgggatccatactgtccttgctggcaattatcacgacttgcattgctcaaattatgacaaacactatccagaagaagttcaaggtctcatcaacccaactgctttaccagtcttgcccttaccaatcactgaccctgtttctcattggccccttccttgatggctttttgactaaccaaaatgtctttgcttttaattatacatctcaagttgtgtttttcatcgtcctgtcatgcttgatatctgtttcagtgaacttcagcactttccttgtgatcggaaagacatctcctgttacttaccaagtcctgggccatcttaaaacatgccttgttcttgcttttggttatgttttgcttcacgatccgtttagctggagaaacatacttggaatcctaattgctgtagttggaatggtcttgtattcatacttctgcacagtggagacccagcaaaaaaatgttgaagtctccccacaacaggtaactttctcatgcactacagcactagagaagttccagtgcgcaccattaaattctgttgccctttcagaattctgtcattggtagtgacccagtgtgtaagtatgatatactagtagccaatcctgaatgttgtgttatttgagcagcgaacattgagttttctgtgttcttttatttcatttttacaactttactacttggtcggtcctagtcatcctatttatatcaggactaatataccaaattgggttgcatttagggttgcaaattgggctgagaacatgagcccaagtggcctaagccatctaaaagcagctcatgtcttcagcttcccagtaattccattctgtttctggtcgttcactccctagttgtccaacttatcgtcattggtcgatgtctaatcggacatgattggtcaatgactaattggacaaccataaaactaatcgagtcggagcacctagttaagtccaggatactaactagggcaactaatcttgattaatcagatgacttggtaacactgtacttgtatatggaacaaactaggctctacgtttgtggtgtagtaagtggaattgaccttttttagcatattcagtttgtattaactagcattatagatttgtctcttcctgtctcttgtttgtaattcccggctgcgcttcttacattgcaggtgaaagaaagcgaggcaggccctttgatcgcagactctatgagcaaagttgaaaacgggggtggtggtgttgatgacgagcctttgaaggtacccatgtggagctcaaagtactcgcgggagtgaaaaggtcacgatggcatggcaccatacaggattcaatttagtaggcagatagtagggttggaagccaacccagagtgtaatgaacatttcagttacatttttgggcttctttagtgtcgcagtctactagcagttaaaggatctgtttcttggaaggatcctaccttcagggctctcagacctaccttgaaactagacagcaggtattgtatgattgtatctcgatatgctccacatcctcttactgtaacttccaactggtacatggcgtgcctatatccaaagatagacctcattctttttgtatcaagaagatccggataagaagacttgtgcaagatttgtagcgtttagtgaaatttgtgactgtcagtcatgttcgctttaaaaaagtttagtaatttaaaagtcaattaagaaaactcccgtctttcctgcttccatgtaaagaaacatattag

SEQ ID NO: 204202 - DNA, 1591 bp, Zea Mays
ataatttggctaaggcttgtgctgcctatcgtgactttgtatcacaaaatgctataagagttaaaacttcttgttttttcttaaaaagttttggactagggtagtggggttttaaattttgctgagatacttctacctgcctccactaccttgacgagctggcatctgctggttacattctgctcccttcatgtagcattatggatgaagttctttgagcataagccttttgattcaagaactgtcatgggatttggagtacttaacggaatctccattgggctcctcaacttgagtcttggcttcaactctgttgggttttaccagataataatcaatccacctaactgatgctgaaatgcctttaaatttagatgactaagctggcaatcatcccgtgcactgtcattttagagacacttttcttcaggaagaagttcagtcggagtatccagatgtccctttctgtgcttcttcttggtgttggtgttgcaactgtcactgatctgcaactcaatgctgtgggatccatactgtccttgctggcaattatcacgacttgcattgctcaaattatgacaaacactatccagaagaagttcaaggtctcatcaacccaactgctttaccagtcttgcccttaccaatcactgaccctgtttctcattggccccttccttgatggctttttgactaaccaaaatgtctttgcttttaattatacatctcaagttgtgtttttcatcgtcctgtcatgcttgatatctgtttcagtgaacttcagcactttccttgtgatcggaaagacatctcctgttacttaccaagtcctgggccatcttaaaacatgccttgttcttgcttttggttatgttttgcttcacgatccgtttagctggagaaacatacttggaatcctaattgctgtagttggaatggtcttgtattcatacttctgcacagtggagacccagcaaaaaaatgttgaagtctccccacaacaggtgaaagaaagcgaggcaggccctttgatcgcagactctatgagcaaagttgaaaacgggggtggtggtgttgatgacgagcctttgaaggtacccatgtggagctcaaagtactcgcgggagtgaaaaggtcacgatggcatggcaccatacaggattcaatttagtaggcagatagtagggttggaagccaacccagagtgtaatgaacatttcagttacatttttgggcttctttagtgtcgcagtctactagcagttaaaggatctgtttcttggaaggatcctaccttcagggctctcagacctaccttgaaactagacagcaggtattgtatgattgtatctcgatatgctccacatcctcttactgtaacttccaactggtacatggcgtgcctatatccaaagatagacctcattctttttgtatcaagaagatccggataagaagacttgtgcaagatttgtagcgtttagtgaaatttgtgactgtcagtcatgttcgctttaaaaaagtttagtaatttaaaagtcaattaagaaaactcccgtctttcctgcttccatgtaaagaaacatattag

SEQ ID NO: 204203 - DNA, 2939 bp, Zea Mays
cgcgctgcgcaatcgccgccctcctcccctcgcccaacggcaacgaatctgcctgccttcctgcagcctcaccggctcatcacttcgtcagccatcttcacagcccgcctggcgccccccagcatcagattcccctgctaaaccctcctgttgcggtttctatctggtccagataatcactcccttccctccaattatttttccactgctcgaaggcccggggcgcccaccggagccaatcagttccgttcacctttccaccggaatccaccccaccgccaccggtggatgatttgatggagttgccgttttgcggaccgtggtaactactctctcccaccaccaacaatcaagagtccgctctcctccaacctcctgccaacagcacgcctgcctctctctctctgtgtgtgtgtgtgtgtgtgtgtgtgtgtcaccgagggtccgaggcggtcctactccctctgtcttggtgtcttcttgcgcacgccgcttggtggttctcctcctcacggttccatctccgggtccttgggtctggatggaactggagacacggtagaggagcccgcggtttcccttttcccctcccaacaagggttgatagggaggattttttggattgatctataagccttttggtggctaacggttgggagctttggaggagaactcgagtccttgggctctaggttggtctggacgaggccggaggaagttgccaatggagccgccgactgggttctgggcctcgcttctgagcttcctcaagttcctcccctacttctgcggcctcctcgtccttggactcatcaaaggtgttttgttgtgcccttgggcatgtctgattatggcgattggaatatctgccctggtcctgggcttatggcctatgcatctgatttggacatactactgcattgtcagaaccaagctggttggacctgtggtaaagcttctgcttcttattgctgcgactgcagtcttgatcatatggttgataattggcatcccgggaagcatatttgctggattggtatatggttttctagcacccataatggctacatttgatgctgtaggagaaggcaaagaaaagccatttgttcattgctttgtggatggaacatggagtactatcactggaagctgtacagtagtcagggacgtgaaagatttgcttttccactcctatttttcacttatggatgaccttcgtcttcagaaacctcctgacggggagccatatgagataagattgcttgatattcctggtgcactaatagcggctgcatttgggcttctacttgatggaataatgttcacattaattgccttctataagtgccccgtgatgcttttcaaaggatggaaacgactgatccaggacatgattgggagagaagggccctttctggagactgcttgtgtgccatttgctggtcttgctattcttctttggccatttgctgtagtaggagccgttctggcatccatactctccagtgcccctttaggtgcttatgctgcagttgtagcttatcaggaatcctcccttatcctgggaattgcctatgtgttctcgtcggtgtctatatttgatgaatacacaaatgatgttcttgacatggcgcctggttcttgttttccaagatttaaatatcggaagggcaaagatgagtcttcacacgggcacagtgttccattatccagaccagcctcattcaatagggagaagcaagaagggaaaaggcctccgtctcgtgttacttcatttaagaacagcattgatgatttcaatccattcaagctgctggaccacctatttgccgaatgcaggaaccagggggaggatttggttaacagaggagtgataacaatgaaggacattgaagaaacgaagtctggcaaagttggcagcggtgttcttaatgttggtctaccagcgtatgttattcttaatgcactccttcggtctgcgaaagctgattctgtcgggctaatcttaagtgacggctctgagattacatctgacaatagacctaaaaacaccatctttgattggttctttgaccctcttatggttataaaggaacagatcaaagctgagaatctcactgacgaagaggaagagtatctgaaaatgcgagtgctattggctggtgatcccagtcgcctgaaaggctctctgcctcatgttccatccttgactgaacgtaaaaaggcagatatagacgcattcgctcgcaggttgcaaggaatcacaaagtcgatatctagatatcctacatcaaagcgccgcttcgacgtccttgtgaaggcgctcttgtcagagctggagaggacgatgggccaatctggcaatggatcccagtcccaggcgcagaggctgcgaaactcggtagcccggatgttgagccagaaatctatgggcaagactgccaacattagggatgaagacccagaagcgcagatgacgagactgtctcgcaccccgtgatcgtctgtttgttagtttgacgatgccgtatcacatgctattccagccttgtacaaatgatgagtagatagaatgctgcggcttgaactgatgctcttacatctcatgtatgatctgtatattttaggcactatatgtatcgtgtatgcaatgtttttttgctcccgaaaagaaaagagtatgcacagaggagaacaataaataaaaatacgcaatcctcaacggataacgccggcgcgcatgtgttttagacaaattgtgggaggttaagctacagcaattgcaaagcacaccggctttggggctcgcatgaaacttgcaccgtattaggtggataattgcaaaaggttgacgcatgttcaaccccgaagaccatccgtgggctggctatcaggcacaatggtgtcatcatcgtctaacagctcctccagcttctttc

SEQ ID NO: 204204 - DNA, 2950 bp, Zea Mays
gcgcaatcgccgccctcctcccctcgcccaacggcaacgaatctgcctgccttcctgcagcctcaccggctcatcacttcgtcagccatcttcacagcccgcctggcgccccccagcatcagattcccctgctaaaccctcctgttgcggtttctatctggtccagataatcactcccttccctccaattatttttccactgctcgaaggcccggggcgcccaccggagccaatcagttccgttcacctttccaccggaatccaccccaccgccaccggtggatgatttgatggagttgccgttttgcggaccgtggtaactactctctcccaccaccaacaatcaagagtccgctctcctccaacctcctgccaacagcacgcctgcctctctctctctgtgtgtgtgtgtgtgtgtgtgtgtgtgtcaccgagggtccgaggcggtcctactccctctgtcttggtgtcttcttgcgcacgccgcttggtggttctcctcctcacggttccatctccgggtccttgggtctggatggaactggagacacggtagaggagcccgcggtttcccttttcccctcccaacaaggaccggcgtggaggaagggttgatagggaggattttttggattgatctataagccttttggtggctaacggttgggagctttggaggagaactcgagtccttgggctctaggttggtctggacgaggccggaggaagttgccaatggagccgccgactgggttctgggcctcgcttctgagcttcctcaagttcctcccctacttctgcggcctcctcgtccttggactcatcaaaggtgttttgttgtgcccttgggcatgtctgattatggcgattggaatatctgccctggtcctgggcttatggcctatgcatctgatttggacatactactgcattgtcagaaccaagctggttggacctgtggtaaagcttctgcttcttattgctgcgactgcagtcttgatcatatggttgataattggcatcccgggaagcatatttgctggattggtatatggttttctagcacccataatggctacatttgatgctgtaggagaaggcaaagaaaagccatttgttcattgctttgtggatggaacatggagtactatcactggaagctgtacagtagtcagggacgtgaaagatttgcttttccactcctatttttcacttatggatgaccttcgtcttcagaaacctcctgacggggagccatatgagataagattgcttgatattcctggtgcactaatagcggctgcatttgggcttctacttgatggaataatgttcacattaattgccttctataagtgccccgtgatgcttttcaaaggatggaaacgactgatccaggacatgattgggagagaagggccctttctggagactgcttgtgtgccatttgctggtcttgctattcttctttggccatttgctgtagtaggagccgttctggcatccatactctccagtgcccctttaggtgcttatgctgcagttgtagcttatcaggaatcctcccttatcctgggaattgcctatgtgttctcgtcggtgtctatatttgatgaatacacaaatgatgttcttgacatggcgcctggttcttgttttccaagatttaaatatcggaagggcaaagatgagtcttcacacgggcacagtgttccattatccagaccagcctcattcaatagggagaagcaagaagggaaaaggcctccgtctcgtgttacttcatttaagaacagcattgatgatttcaatccattcaagctgctggaccacctatttgccgaatgcaggaaccagggggaggatttggttaacagaggagtgataacaatgaaggacattgaagaaacgaagtctggcaaagttggcagcggtgttcttaatgttggtctaccagcgtatgttattcttaatgcactccttcggtctgcgaaagctgattctgtcgggctaatcttaagtgacggctctgagattacatctgacaatagacctaaaaacaccatctttgattggttctttgaccctcttatggttataaaggaacagatcaaagctgagaatctcactgacgaagaggaagagtatctgaaaatgcgagtgctattggctggtgatcccagtcgcctgaaaggctctctgcctcatgttccatccttgactgaacgtaaaaaggcagatatagacgcattcgctcgcaggttgcaaggaatcacaaagtcgatatctagatatcctacatcaaagcgccgcttcgacgtccttgtgaaggcgctcttgtcagagctggagaggacgatgggccaatctggcaatggatcccagtcccaggcgcagaggctgcgaaactcggtagcccggatgttgagccagaaatctatgggcaagactgccaacattagggatgaagacccagaagcgcagatgacgagactgtctcgcaccccgtgatcgtctgtttgttagtttgacgatgccgtatcacatgctattccagccttgtacaaatgatgagtagatagaatgctgcggcttgaactgatgctcttacatctcatgtatgatctgtatattttaggcactatatgtatcgtgtatgcaatgtttttttgctcccgaaaagaaaagagtatgcacagaggagaacaataaataaaaatacgcaatcctcaacggataacgccggcgcgcatgtgttttagacaaattgtgggaggttaagctacagcaattgcaaagcacaccggctttggggctcgcatgaaacttgcaccgtattaggtggataattgcaaaaggttgacgcatgttcaaccccgaagaccatccgtgggctggctatcaggcacaatggtgtcatcatcgtctaacagctcctccagcttctttc

SEQ ID NO: 204205 - DNA, 2671 bp, Zea Mays
caatcgccgccctcctcccctcgcccaacggcaacgaatctgcctgccttcctgcagcctcaccggctcatcacttcgtcagccatcttcacagcccgcctggcgccccccagcatcagattcccctgctaaaccctcctgttgcggtttctatctggtccagataatcactcccttccctccaattatttttccactgctcgaaggcccggggcgcccaccggagccaatcagttccgttcacctttccaccggaatccaccccaccgccaccggtggatgatttgatggagttgccgttttgcggaccgtggaccggcgtggaggaagggttgatagggaggattttttggattgatctataagccttttggtggctaacggttgggagctttggaggagaactcgagtccttgggctctaggttggtctggacgaggccggaggaagttgccaatggagccgccgactgggttctgggcctcgcttctgagcttcctcaagttcctcccctacttctgcggcctcctcgtccttggactcatcaaaggtgttttgttgtgcccttgggcatgtctgattatggcgattggaatatctgccctggtcctgggcttatggcctatgcatctgatttggacatactactgcattgtcagaaccaagctggttggacctgtggtaaagcttctgcttcttattgctgcgactgcagtcttgatcatatggttgataattggcatcccgggaagcatatttgctggattggtatatggttttctagcacccataatggctacatttgatgctgtaggagaaggcaaagaaaagccatttgttcattgctttgtggatggaacatggagtactatcactggaagctgtacagtagtcagggacgtgaaagatttgcttttccactcctatttttcacttatggatgaccttcgtcttcagaaacctcctgacggggagccatatgagataagattgcttgatattcctggtgcactaatagcggctgcatttgggcttctacttgatggaataatgttcacattaattgccttctataagtgccccgtgatgcttttcaaaggatggaaacgactgatccaggacatgattgggagagaagggccctttctggagactgcttgtgtgccatttgctggtcttgctattcttctttggccatttgctgtagtaggagccgttctggcatccatactctccagtgcccctttaggtgcttatgctgcagttgtagcttatcaggaatcctcccttatcctgggaattgcctatgtgttctcgtcggtgtctatatttgatgaatacacaaatgatgttcttgacatggcgcctggttcttgttttccaagatttaaatatcggaagggcaaagatgagtcttcacacgggcacagtgttccattatccagaccagcctcattcaatagggagaagcaagaagggaaaaggcctccgtctcgtgttacttcatttaagaacagcattgatgatttcaatccattcaagctgctggaccacctatttgccgaatgcaggaaccagggggaggatttggttaacagaggagtgataacaatgaaggacattgaagaaacgaagtctggcaaagttggcagcggtgttcttaatgttggtctaccagcgtatgttattcttaatgcactccttcggtctgcgaaagctgattctgtcgggctaatcttaagtgacggctctgagattacatctgacaatagacctaaaaacaccatctttgattggttctttgaccctcttatggttataaaggaacagatcaaagctgagaatctcactgacgaagaggaagagtatctgaaaatgcgagtgctattggctggtgatcccagtcgcctgaaaggctctctgcctcatgttccatccttgactgaacgtaaaaaggcagatatagacgcattcgctcgcaggttgcaaggaatcacaaagtcgatatctagatatcctacatcaaagcgccgcttcgacgtccttgtgaaggcgctcttgtcagagctggagaggacgatgggccaatctggcaatggatcccagtcccaggcgcagaggctgcgaaactcggtagcccggatgttgagccagaaatctatgggcaagactgccaacattagggatgaagacccagaagcgcagatgacgagactgtctcgcaccccgtgatcgtctgtttgttagtttgacgatgccgtatcacatgctattccagccttgtacaaatgatgagtagatagaatgctgcggcttgaactgatgctcttacatctcatgtatgatctgtatattttaggcactatatgtatcgtgtatgcaatgtttttttgctcccgaaaagaaaagagtatgcacagaggagaacaataaataaaaatacgcaatcctcaacggataacgccggcgcgcatgtgttttagacaaattgtgggaggttaagctacagcaattgcaaagcacaccggctttggggctcgcatgaaacttgcaccgtattaggtggataattgcaaaaggttgacgcatgttcaaccccgaagaccatccgtgggctggctatcaggcacaatggtgtcatcatcgtctaacagctcctccagcttctttc

SEQ ID NO: 204206 - DNA, 2400 bp, Zea Mays
cgaatctgcctgccttcctgcagcctcaccggctcatcacttcgtcagccatcttcacagcccgcctggcgccccccagcatcagattcccctgctaaaccctcctgttgcggtttctatctggtccagataatcactcccttccctccaattatttttccactgctcgaaggcccggggcgcccaccggagccaatcagttccgttcacctttccaccggaatccaccccaccgccaccggtggatgatttgatggagttgccgttttgcggaccgtggtgttttgttgtgcccttgggcatgtctgattatggcgattggaatatctgccctggtcctgggcttatggcctatgcatctgatttggacatactactgcattgtcagaaccaagctggttggacctgtggtaaagcttctgcttcttattgctgcgactgcagtcttgatcatatggttgataattggcatcccgggaagcatatttgctggattggtatatggttttctagcacccataatggctacatttgatgctgtaggagaaggcaaagaaaagccatttgttcattgctttgtggatggaacatggagtactatcactggaagctgtacagtagtcagggacgtgaaagatttgcttttccactcctatttttcacttatggatgaccttcgtcttcagaaacctcctgacggggagccatatgagataagattgcttgatattcctggtgcactaatagcggctgcatttgggcttctacttgatggaataatgttcacattaattgccttctataagtgccccgtgatgcttttcaaaggatggaaacgactgatccaggacatgattgggagagaagggccctttctggagactgcttgtgtgccatttgctggtcttgctattcttctttggccatttgctgtagtaggagccgttctggcatccatactctccagtgcccctttaggtgcttatgctgcagttgtagcttatcaggaatcctcccttatcctgggaattgcctatgtgttctcgtcggtgtctatatttgatgaatacacaaatgatgttcttgacatggcgcctggttcttgttttccaagatttaaatatcggaagggcaaagatgagtcttcacacgggcacagtgttccattatccagaccagcctcattcaatagggagaagcaagaagggaaaaggcctccgtctcgtgttacttcatttaagaacagcattgatgatttcaatccattcaagctgctggaccacctatttgccgaatgcaggaaccagggggaggatttggttaacagaggagtgataacaatgaaggacattgaagaaacgaagtctggcaaagttggcagcggtgttcttaatgttggtctaccagcgtatgttattcttaatgcactccttcggtctgcgaaagctgattctgtcgggctaatcttaagtgacggctctgagattacatctgacaatagacctaaaaacaccatctttgattggttctttgaccctcttatggttataaaggaacagatcaaagctgagaatctcactgacgaagaggaagagtatctgaaaatgcgagtgctattggctggtgatcccagtcgcctgaaaggctctctgcctcatgttccatccttgactgaacgtaaaaaggcagatatagacgcattcgctcgcaggttgcaaggaatcacaaagtcgatatctagatatcctacatcaaagcgccgcttcgacgtccttgtgaaggcgctcttgtcagagctggagaggacgatgggccaatctggcaatggatcccagtcccaggcgcagaggctgcgaaactcggtagcccggatgttgagccagaaatctatgggcaagactgccaacattagggatgaagacccagaagcgcagatgacgagactgtctcgcaccccgtgatcgtctgtttgttagtttgacgatgccgtatcacatgctattccagccttgtacaaatgatgagtagatagaatgctgcggcttgaactgatgctcttacatctcatgtatgatctgtatattttaggcactatatgtatcgtgtatgcaatgtttttttgctcccgaaaagaaaagagtatgcacagaggagaacaataaataaaaatacgcaatcctcaacggataacgccggcgcgcatgtgttttagacaaattgtgggaggttaagctacagcaattgcaaagcacaccggctttggggctcgcatgaaacttgcaccgtattaggtggataattgcaaaaggttgacgcatgttcaaccccgaagaccatccgtgggctggctatcaggcacaatggtgtcatcatcgtctaacagctcctccagcttctttc

SEQ ID NO: 204207 - DNA, 2844 bp, Zea Mays
atctgcctgccttcctgcagcctcaccggctcatcacttcgtcagccatcttcacagcccgcctggcgccccccagcatcagattcccctgctaaaccctcctgttgcggtttctatctggtccagataatcactcccttccctccaattatttttccactgctcgaaggcccggggcgcccaccggagccaatcagttccgttcacctttccaccggaatccaccccaccgccaccggtggatgatttgatggagttgccgttttgcggaccgtggtaactactctctcccaccaccaacaatcaagagtccgctctcctccaacctcctgccaacagcacgcctgcctctctctctctgtgtgtgtgtgtgtgtgtgtgtgtgtgtcaccgagggtccgaggcggtcctactccctctgtcttggtgtcttcttgcgcacgccgcttggtggttctcctcctcacggttccatctccgggtccttgggtctggatggaactggagacacgggaggattttttggattgatctataagccttttggtggctaacggttgggagctttggaggagaactcgagtccttgggctctaggttggtctggacgaggccggaggaagttgccaatggagccgccgactgggttctgggcctcgcttctgagcttcctcaagttcctcccctacttctgcggcctcctcgtccttggactcatcaaaggtgttttgttgtgcccttgggcatgtctgattatggcgattggaatatctgccctggtcctgggcttatggcctatgcatctgatttggacatactactgcattgtcagaaccaagctggttggacctgtggtaaagcttctgcttcttattgctgcgactgcagtcttgatcatatggttgataattggcatcccgggaagcatatttgctggattggtatatggttttctagcacccataatggctacatttgatgctgtaggagaaggcaaagaaaagccatttgttcattgctttgtggatggaacatggagtactatcactggaagctgtacagtagtcagggacgtgaaagatttgcttttccactcctatttttcacttatggatgaccttcgtcttcagaaacctcctgacggggagccatatgagataagattgcttgatattcctggtgcactaatagcggctgcatttgggcttctacttgatggaataatgttcacattaattgccttctataagtgccccgtgatgcttttcaaaggatggaaacgactgatccaggacatgattgggagagaagggccctttctggagactgcttgtgtgccatttgctggtcttgctattcttctttggccatttgctgtagtaggagccgttctggcatccatactctccagtgcccctttaggtgcttatgctgcagttgtagcttatcaggaatcctcccttatcctgggaattgcctatgtgttctcgtcggtgtctatatttgatgaatacacaaatgatgttcttgacatggcgcctggttcttgttttccaagatttaaatatcggaagggcaaagatgagtcttcacacgggcacagtgttccattatccagaccagcctcattcaatagggagaagcaagaagggaaaaggcctccgtctcgtgttacttcatttaagaacagcattgatgatttcaatccattcaagctgctggaccacctatttgccgaatgcaggaaccagggggaggatttggttaacagaggagtgataacaatgaaggacattgaagaaacgaagtctggcaaagttggcagcggtgttcttaatgttggtctaccagcgtatgttattcttaatgcactccttcggtctgcgaaagctgattctgtcgggctaatcttaagtgacggctctgagattacatctgacaatagacctaaaaacaccatctttgattggttctttgaccctcttatggttataaaggaacagatcaaagctgagaatctcactgacgaagaggaagagtatctgaaaatgcgagtgctattggctggtgatcccagtcgcctgaaaggctctctgcctcatgttccatccttgactgaacgtaaaaaggcagatatagacgcattcgctcgcaggttgcaaggaatcacaaagtcgatatctagatatcctacatcaaagcgccgcttcgacgtccttgtgaaggcgctcttgtcagagctggagaggacgatgggccaatctggcaatggatcccagtcccaggcgcagaggctgcgaaactcggtagcccggatgttgagccagaaatctatgggcaagactgccaacattagggatgaagacccagaagcgcagatgacgagactgtctcgcaccccgtgatcgtctgtttgttagtttgacgatgccgtatcacatgctattccagccttgtacaaatgatgagtagatagaatgctgcggcttgaactgatgctcttacatctcatgtatgatctgtatattttaggcactatatgtatcgtgtatgcaatgtttttttgctcccgaaaagaaaagagtatgcacagaggagaacaataaataaaaatacgcaatcctcaacggataacgccggcgcgcatgtgttttagacaaattgtgggaggttaagctacagcaattgcaaagcacaccggctttggggctcgcatgaaacttgcaccgtattaggtggataattgcaaaaggttgacgcatgttcaaccccgaagaccatccgtgggctggctatcaggcacaatggtgtcatcatcgtctaacagctcctccagcttctttc

SEQ ID NO: 204208 - DNA, 2749 bp, Zea Mays
attatttttccactgctcgaaggcccggggcgcccaccggagccaatcagttccgttcacctttccaccggaatccaccccaccgccaccggtggatgatttgatggagttgccgttttgcggaccgtggtaactactctctcccaccaccaacaatcaagagtccgctctcctccaacctcctgccaacagcacgcctgcctctctctctctgtgtgtgtgtgtgtgtgtgtgtgtgtgtcaccgagggtccgaggcggtcctactccctctgtcttggtgtcttcttgcgcacgccgcttggtggttctcctcctcacggttccatctccgggtccttgggtctggatggaactggagacacggtagaggagcccgcggtttcccttttcccctcccaacaagaagggttgatagggaggattttttggattgatctataagccttttggtggctaacggttgggagctttggaggagaactcgagtccttgggctctaggttggtctggacgaggccggaggaagttgccaatggagccgccgactgggttctgggcctcgcttctgagcttcctcaagttcctcccctacttctgcggcctcctcgtccttggactcatcaaaggtgttttgttgtgcccttgggcatgtctgattatggcgattggaatatctgccctggtcctgggcttatggcctatgcatctgatttggacatactactgcattgtcagaaccaagctggttggacctgtggtaaagcttctgcttcttattgctgcgactgcagtcttgatcatatggttgataattggcatcccgggaagcatatttgctggattggtatatggttttctagcacccataatggctacatttgatgctgtaggagaaggcaaagaaaagccatttgttcattgctttgtggatggaacatggagtactatcactggaagctgtacagtagtcagggacgtgaaagatttgcttttccactcctatttttcacttatggatgaccttcgtcttcagaaacctcctgacggggagccatatgagataagattgcttgatattcctggtgcactaatagcggctgcatttgggcttctacttgatggaataatgttcacattaattgccttctataagtgccccgtgatgcttttcaaaggatggaaacgactgatccaggacatgattgggagagaagggccctttctggagactgcttgtgtgccatttgctggtcttgctattcttctttggccatttgctgtagtaggagccgttctggcatccatactctccagtgcccctttaggtgcttatgctgcagttgtagcttatcaggaatcctcccttatcctgggaattgcctatgtgttctcgtcggtgtctatatttgatgaatacacaaatgatgttcttgacatggcgcctggttcttgttttccaagatttaaatatcggaagggcaaagatgagtcttcacacgggcacagtgttccattatccagaccagcctcattcaatagggagaagcaagaagggaaaaggcctccgtctcgtgttacttcatttaagaacagcattgatgatttcaatccattcaagctgctggaccacctatttgccgaatgcaggaaccagggggaggatttggttaacagaggagtgataacaatgaaggacattgaagaaacgaagtctggcaaagttggcagcggtgttcttaatgttggtctaccagcgtatgttattcttaatgcactccttcggtctgcgaaagctgattctgtcgggctaatcttaagtgacggctctgagattacatctgacaatagacctaaaaacaccatctttgattggttctttgaccctcttatggttataaaggaacagatcaaagctgagaatctcactgacgaagaggaagagtatctgaaaatgcgagtgctattggctggtgatcccagtcgcctgaaaggctctctgcctcatgttccatccttgactgaacgtaaaaaggcagatatagacgcattcgctcgcaggttgcaaggaatcacaaagtcgatatctagatatcctacatcaaagcgccgcttcgacgtccttgtgaaggcgctcttgtcagagctggagaggacgatgggccaatctggcaatggatcccagtcccaggcgcagaggctgcgaaactcggtagcccggatgttgagccagaaatctatgggcaagactgccaacattagggatgaagacccagaagcgcagatgacgagactgtctcgcaccccgtgatcgtctgtttgttagtttgacgatgccgtatcacatgctattccagccttgtacaaatgatgagtagatagaatgctgcggcttgaactgatgctcttacatctcatgtatgatctgtatattttaggcactatatgtatcgtgtatgcaatgtttttttgctcccgaaaagaaaagagtatgcacagaggagaacaataaataaaaatacgcaatcctcaacggataacgccggcgcgcatgtgttttagacaaattgtgggaggttaagctacagcaattgcaaagcacaccggctttggggctcgcatgaaacttgcaccgtattaggtggataattgcaaaaggttgacgcatgttcaaccccgaagaccatccgtgggctggctatcaggcacaatggtgtcatcatcgtctaacagctcctccagcttctttc

SEQ ID NO: 204209 - DNA, 2750 bp, Zea Mays
attatttttccactgctcgaaggcccggggcgcccaccggagccaatcagttccgttcacctttccaccggaatccaccccaccgccaccggtggatgatttgatggagttgccgttttgcggaccgtggtaactactctctcccaccaccaacaatcaagagtccgctctcctccaacctcctgccaacagcacgcctgcctctctctctctgtgtgtgtgtgtgtgtgtgtgtgtgtgtcaccgagggtccgaggcggtcctactccctctgtcttggtgtcttcttgcgcacgccgcttggtggttctcctcctcacggttccatctccgggtccttgggtctggatggaactggagacacggtagaggagcccgcggtttcccttttcccctcccaacaaggaagggttgatagggaggattttttggattgatctataagccttttggtggctaacggttgggagctttggaggagaactcgagtccttgggctctaggttggtctggacgaggccggaggaagttgccaatggagccgccgactgggttctgggcctcgcttctgagcttcctcaagttcctcccctacttctgcggcctcctcgtccttggactcatcaaaggtgttttgttgtgcccttgggcatgtctgattatggcgattggaatatctgccctggtcctgggcttatggcctatgcatctgatttggacatactactgcattgtcagaaccaagctggttggacctgtggtaaagcttctgcttcttattgctgcgactgcagtcttgatcatatggttgataattggcatcccgggaagcatatttgctggattggtatatggttttctagcacccataatggctacatttgatgctgtaggagaaggcaaagaaaagccatttgttcattgctttgtggatggaacatggagtactatcactggaagctgtacagtagtcagggacgtgaaagatttgcttttccactcctatttttcacttatggatgaccttcgtcttcagaaacctcctgacggggagccatatgagataagattgcttgatattcctggtgcactaatagcggctgcatttgggcttctacttgatggaataatgttcacattaattgccttctataagtgccccgtgatgcttttcaaaggatggaaacgactgatccaggacatgattgggagagaagggccctttctggagactgcttgtgtgccatttgctggtcttgctattcttctttggccatttgctgtagtaggagccgttctggcatccatactctccagtgcccctttaggtgcttatgctgcagttgtagcttatcaggaatcctcccttatcctgggaattgcctatgtgttctcgtcggtgtctatatttgatgaatacacaaatgatgttcttgacatggcgcctggttcttgttttccaagatttaaatatcggaagggcaaagatgagtcttcacacgggcacagtgttccattatccagaccagcctcattcaatagggagaagcaagaagggaaaaggcctccgtctcgtgttacttcatttaagaacagcattgatgatttcaatccattcaagctgctggaccacctatttgccgaatgcaggaaccagggggaggatttggttaacagaggagtgataacaatgaaggacattgaagaaacgaagtctggcaaagttggcagcggtgttcttaatgttggtctaccagcgtatgttattcttaatgcactccttcggtctgcgaaagctgattctgtcgggctaatcttaagtgacggctctgagattacatctgacaatagacctaaaaacaccatctttgattggttctttgaccctcttatggttataaaggaacagatcaaagctgagaatctcactgacgaagaggaagagtatctgaaaatgcgagtgctattggctggtgatcccagtcgcctgaaaggctctctgcctcatgttccatccttgactgaacgtaaaaaggcagatatagacgcattcgctcgcaggttgcaaggaatcacaaagtcgatatctagatatcctacatcaaagcgccgcttcgacgtccttgtgaaggcgctcttgtcagagctggagaggacgatgggccaatctggcaatggatcccagtcccaggcgcagaggctgcgaaactcggtagcccggatgttgagccagaaatctatgggcaagactgccaacattagggatgaagacccagaagcgcagatgacgagactgtctcgcaccccgtgatcgtctgtttgttagtttgacgatgccgtatcacatgctattccagccttgtacaaatgatgagtagatagaatgctgcggcttgaactgatgctcttacatctcatgtatgatctgtatattttaggcactatatgtatcgtgtatgcaatgtttttttgctcccgaaaagaaaagagtatgcacagaggagaacaataaataaaaatacgcaatcctcaacggataacgccggcgcgcatgtgttttagacaaattgtgggaggttaagctacagcaattgcaaagcacaccggctttggggctcgcatgaaacttgcaccgtattaggtggataattgcaaaaggttgacgcatgttcaaccccgaagaccatccgtgggctggctatcaggcacaatggtgtcatcatcgtctaacagctcctccagcttctttc

SEQ ID NO: 204210 - DNA, 1789 bp, Zea Mays
ggacgacctcgtcctcccggcaaccgacggcgagtacgtgctcaagggctccgagctcgtggaccaatccccttcggcaggtccattttaccctgtcactgtcagcaacggcaaccagaagcaacagagcaggccgaaagagggcgcgcggcagccactgccaagagaccaatccgacccatcctccccgcctagcgtgacagtcagagaagccaaggcccggcggtcaccgtccgtgccttcgcaagacgaggaggatgacaccccgtctccgtgcagggatcgctccatgtcacagccacaggagctggagccccagcggaacgagaggaggacgcaaccgccagcgagcgggtctgcgagcccagtggagctcagagctcacaggcccaccaccggctgcacggacgccgcaacccagaccgacgatctcggcagaaggccggcgggccgcagggcgctcgagctgccgcgcaagaagagtctgagcacggaccacgacgccgtcgtccgtgagatcgcagagtaccggcagagccaccctcgccggtcggcagacctccacgggatctcccgggagctcctgcgccagtgcatcactactccgctgaccgtaccctcgacctgcgccaagtccgagagcctagagtcgctgatacgcgcggacaacgtgatgacggacagcttcaggatcctcgaagaggaggacgtcgtcgcgcgcacctgccccaagctgaggccggcgagcgtgctgatgcagctcgtcacctgtggctcgctctcggtgaagggtcacggggacgctggggtcgttcggacgtgcaagccgaggttccccaacctcaggttcctcccctcgccgctgatctcgcgcaccatgatgatgggcgagctcgactacctgtcggaaaaccccaggttgatggggatgaagctggaggagaaggagtacttcagcgggagccttgttgagaccaagaagacgcaaagagatggtccggctgagaggtattcggcgcttaaacggtcttcttcctacaatgcagaaagggccggcgaggctctggactgcacaagacgcgaagaggataaagccgacgacgtgtcgtcgcgcacgaggtgcctcccgcggacgccgatcctgtcatccttcctgcacccgaagggcgactcgctcaggtctcccgtctcggactgccggcggagctcctcggcccggcgggactacgacgcggcctccggggacgggagcaggaggttcgccgacgcctccgtcgcgtccgcgaccacaggggccgagtcgttcaggaaggaggagaaactcgtcaagatcgaggaaagttaagtgccgcccgtggcctttctttacctgaacctactgtgaactctttgtcagtgctcggctgtcgtccggagcccgtgtcgtgatccactacaccgtcccttgcaacgacagcgacgaaggctctgaacgctcggaggagtgacactgctgttcagctagacgacccattttttcttcccgttttttttttcactttctcccttagaaacattaggcccccttatcattgtataagtgcctgttataatgtatcattcatgtgtttcacttaaaaagatgtctcatgagactgcatggtagagtgtgtaaaatagaggacaagaaacggtttgtagaaacaagtttgaaatatgggatgaaatagaagatctggccatatgtgcagcccataggtccatggggcctcgcattttgatcagggctgagagaggcctgggcttcgag

SEQ ID NO: 204211 - DNA, 2693 bp, Zea Mays
gaaaaagtcattcccttgcctgcttctgctcgcccgaaaaggctcccgttctgcaggcccgccccgccccgattcaatgcagccattgccttgttgagctcgtctcgtcccgctgctttccctctcgtcgtgctcctccccacgcggccacgccacgcctcgctgtaaaccgaccctgttgaggcttggacgcacccgcgtgtccgcgcctgcctcccatcccacgccccctcccctccactccactccactcccgcgccgtcaccggccggggggaaagctccaaccgaggggtttttgtttgtacgcgcccgtttggcccttgctgtggtcacatcgcccgctcccccgctgcagcagcgccaaagatatgagaggaaagtttgggatcagttccccggtgccccgccccctcatgtgcccgcgccagtgacctcgaaaaggaccgcgcgccgcgccttgccccgtgcccagccgactctctctctctcttctcgtcccgattctgatctggttgccggcaccagcgaggtccagtctcggcgccgccggcgaatgcagggtctggaggcgcccgcccgctaatctcgacttggagctcgaggagggggaggagcgtgtgaaactcaggttgggcgaggatggagagccgggggcggcggccgcggagccccgagcgccggaggccggcggcgcggaaggtgccggtggtgtactacctcacccggagccgccacctcgagcacccgcacttcgtcgaggtgccgctggcctcgccggaggggctctatctcagagatgtgattaatcacctgaacatggtgcgcggcaagggcatggccgcgatgtactcgtggtcctgcaagaggagctacaagaacgggttcgtgtggcacgacctttcggaggacgacctcgtcctcccggcaaccgacggcgagtacgtgctcaagggctccgagctcgtggaccaatccccttcgggtccattttaccctgtcactgtcagcaacggcaaccagaagcaacagagcaggccgaaagagggcgcgcggcagccactgccaagagaccaatccgacccatcctccccgcctagcgtgacagtcagagaagccaaggcccggcggtcaccgtccgtgccttcgcaagacgaggaggatgacaccccgtctccgtgcagggatcgctccatgtcacagccacaggagctggagccccagcggaacgagaggaggacgcaaccgccagcgagcgggtctgcgagcccagtggagctcagagctcacaggcccaccaccggctgcacggacgccgcaacccagaccgacgatctcggcagaaggccggcgggccgcagggcgctcgagctgccgcgcaagaagagtctgagcacggaccacgacgccgtcgtccgtgagatcgcagagtaccggcagagccaccctcgccggtcggcagacctccacgggatctcccgggagctcctgcgccagtgcatcactactccgctgaccgtaccctcgacctgcgccaagtccgagagcctagagtcgctgatacgcgcggacaacgtgatgacggacagcttcaggatcctcgaagaggaggacgtcgtcgcgcgcacctgccccaagctgaggccggcgagcgtgctgatgcagctcgtcacctgtggctcgctctcggtgaagggtcacggggacgctggggtcgttcggacgtgcaagccgaggttccccaacctcaggttcctcccctcgccgctgatctcgcgcaccatgatgatgggcgagctcgactacctgtcggaaaaccccaggttgatggggatgaagctggaggagaaggagtacttcagcgggagccttgttgagaccaagaagacgcaaagagatggtccggctgagaggtattcggcgcttaaacggtcttcttcctacaatgcagaaagggccggcgaggctctggactgcacaagacgcgaagaggataaagccgacgacgtgtcgtcgcgcacgaggtgcctcccgcggacgccgatcctgtcatccttcctgcacccgaagggcgactcgctcaggtctcccgtctcggactgccggcggagctcctcggcccggcgggactacgacgcggcctccggggacgggagcaggaggttcgccgacgcctccgtcgcgtccgcgaccacaggggccgagtcgttcaggaaggaggagaaactcgtcaagatcgaggaaagttaagtgccgcccgtggcctttctttacctgaacctactgtgaactctttgtcagtgctcggctgtcgtccggagcccgtgtcgtgatccactacaccgtcccttgcaacgacagcgacgaaggctctgaacgctcggaggagtgacactgctgttcagctagacgacccattttttcttcccgttttttttttcactttctcccttagaaacattaggcccccttatcattgtataagtgcctgttataatgtatcattcatgtgtttcacttaaaaagatgtctcatgagactgcatggtagagtgtgtaaaatagaggacaagaaacggtttgtagaaacaagtttgaaatatgggatgaaatagaagatctggccatatgtgcagcccataggtccatggggcctcgcattttgatcagggctgagagaggcctgggcttcgag

SEQ ID NO: 204212 - DNA, 1494 bp, Zea Mays
aggtgccgctggcctcgccggaggggctctatctcagagatgtgattaatcacctgaacatggtgcgcggcaagggcatggccgcgatgtactcgtggtcctgcaagaggagctacaagaacgggttcgtgtggcacgacctttcggaggacgacctcgtcctcccggcaaccgacggcgagtacgtgctcaagggctccgagctcgtggaccaatccccttcgggtccattttaccctgtcactgtcagcaacggcaaccagaagcaacagagcaggccgaaagagggcgcgcggcagccactgccaagagaccaatccgacccatcctccccgcctagcgtgacagtcagagaagccaaggcccggcggtcaccgtccgtgccttcgcaagacgaggaggatgacaccccgtctccgtgcagggatcgctccatgtcacagccacaggagctggagccccagcggaacgagaggaggacgcaaccgccagcgagcgggtctgcgagcccagtggagctcagagctcacaggcccaccaccggctgcacggacgccgcaacccagaccgacgatctcggcagaaggccggcgggccgcagggcgctcgagctgccgcgcaagaagagtctgagcacggaccacgacgccgtcgtccgtgagatcgcagagtaccggcagagccaccctcgccggtcggcagacctccacgggatctcccgggagctcctgcgccagtgcatcactactccgctgaccgtaccctcgacctgcgccaagtccgagagcctagagtcgctgatacgcgcggacaacgtgatgacggacagcttcaggatcctcgaagaggaggacgtcgtcgcgcgcacctgccccaagctgaggccggcgagcgtgctgatgcagctcgtcacctgtggctcgctctcggtgaagggtcacggggacgctggggtcgttcggacgtgcaagccgaggttccccaacctcaggttcctcccctcgccgctgatctcgcgcaccatgatgatgggcgagctcgactacctgtcggaaaaccccaggttgatggggatgaagctggaggagaaggagtacttcagcgggagccttgttgagaccaagaagacgcaaagagatggtccggctgagaggtattcggcgcttaaacggtcttcttcctacaatgcagaaagggccggcgaggctctggactgcacaagacgcgaagaggataaagccgacgacgtgtcgtcgcgcacgaggtgcctcccgcggacgccgatcctgtcatccttcctgcacccgaagggcgactcgctcaggtctcccgtctcggactgccggcggagctcctcggcccggcgggactacgacgcggcctccggggacgggagcaggaggttcgccgacgcctccgtcgcgtccgcgaccacaggggccgagtcgttcaggaaggaggagaaactcgtcaagatcgaggaaaggctgtgct

SEQ ID NO: 204213 - DNA, 746 bp, Zea Mays
tgggctaggcttttcttctaagggagttggtcaacttcttgcgattgcaggtcttgggcttattgtgtatcaaatgttcatctacaggccagtccacagatatctcggaagtgtaaattcatgccgtgctgcatctgcgctatccataccacttatcgctgcttttcccttcatgacacacctgtcaggatcaaaacttggactagctctttattttgctactattttgaaagctgctcttgggataactatcctgacaggcacttcacttctgcagaactatgctgtgccacagcatcaaagaggcgccgcaaacggcgtagcggcgactgcaatgtccttctttaaggctattggacctgcaggagcaggcgctttattctcatggacccaaaaacgccaagatgctgccttctttccaggggatcacatgttgttcttcattctgaatttggtccaatgtattgggctcgtgctgacccttaaaccattcctagcagtaccgaaacactataaatgacagctgctcgaacccaagcaatggaataatgatggattagcaaaacatatgtgcccaaaaatacgtttttgagtggcatacaacggaattatgtaaaagctgtcaagaaaaagtagctacaatgattgtgtccgctatctttacatctccttacattgaagttttaatttgagcacattttgtgtccagtacatggtatccgctgtttcaattgaaatgctggttt

SEQ ID NO: 204214 - DNA, 851 bp, Zea Mays
gtacatacggttctgcctattccacccgggctcggcggccgcgtcgcagtctgctcgcttgtcctgtccctgtcctgactggagtagtggagtctgagagattctctagcggaatccctcgatcgagaggaacacaatccctttctcccactgccgctcccacagtaacaagtgactctaccctcgccggcagagaagaagacgatggacggtgacgccggcatgatcccatcctcgccctccgccgagacatcgccgtcctcgtccgactccgatatcgccactgagtccaccacggggtcgttcttccgggaccggagcacgacgctgggcacgctgatgggcgtgtccctcgccgacgaggagcgggaggatcaccaccactactcagggcaggacgcagtggaggaggggaccgggtcggggacgccgtgtgctccggtgcatgaggaggaggaaggggaggggcggaggtggcgccgcaggtggaggcgccggcactggcgcggcgccgcggccggctggtggaggctgtgcagggacgacgtccgcgtgcccacgtcgctcggccacttcctgggcatggagaggcagctctccggcgccgggctgctgtgcggcgacgacggccgcgcgggggagcgggacgctgccgcggctgaaacggggaggtggaagctgcggaggccggcgcatgggacctcgtcgtccttggcgaggctgccggtgctgctcacggcgatctgcagcggtggagccacttgacctgagtcgagcggttcggagatgaaatccgcggttttgtgactacttcacttatttattattcaatttcagttgctcgtcaataa

SEQ ID NO: 204215 - DNA, 3080 bp, Zea Mays
ccaacatgtgcgaaattaaaggaaatgatcgaaatcaattgcacacggcgccacaacgcaaaactttaatccgatcacaaaccaatctcgaactagactagaacgtgaaaccctaaaactaatgggtttactgctaattagggtgttatcatgtcgacgaacaatatcagacgtacacgtacacgtgtggtgcagagcgccgggcgcgtatggttcatgacgccgccgccgtgtccatcatggccttgaactcgtcgaagcagaccaccccgtcgccgtctatgtccaccaccgcgatcatctctgcgcaccgctcggccgtcatctcctccccgacgatccccagcctccacagagcgcggcgcagctcctccgcggtgatcacgccgtcgccgttctcgtcgtactcggcgaacgcagcgcgcaacgtgtctgaccggtcgccgtcctcaaacagcgcctcgagctcctcgaggctgatgaacccatctccatcgcggtccgcgacagctaccatctcgtctgcctccacggctgtgcacccgcacaactcgcgcatctcgtccgccgagatgcggccgtcgccgtccgcgtcgaagtggcggaacacgcggacgagggccggctccggtattgtgtacgtgggcgggggagtgctagccgcggctgggggaggcggacttgaggagcggcgtcggctgaagaagatatcgctgcaggacgcggtggcggagacgacgagacccattgccggccgggtgcgacagctttgaatttgattgacggccttgacagggttttgaccctgtttttatataggagtaggacccgccagatagatgaaactcctacgcggttagtttcggtcccatctggtcttatcgtatactggtgcggacctagttgccctctccgcatccaaccagctagcgcgtccgtccccatggcggccgccgccgcggggtttacgccggcgactgcaaggaaggccctcttcactactacagtcactctcctctcatcgtcactctcacgtagggccagcagcatccgcagccgcaacctctcctgctctgccgcgttcaccgccgccacgcgcctcgcgccgcagccgccggacctggtccggtgggtgcagcgcgagggcggattcgtccaccgtgccctccgcgtagcgaatcatccggaacacgggctcgggatctcagcctcttccgccgcggcctacggcgacatcccaattggggacgtcctcatcgcgctcccgagccagcttccattacgactacgccggcccaccagtgccgcggacgacgtgcttgtgcagctcgcccaacaagtcccggaagcttgcagcttcgactttcttccttgccgtccatatgtgctagacgaagcttctctccgcatttcttcggctattctgggcagcttcagctgaaggctagcttcgttcgccgttatctgtatacctgaaacacatttgttcacaccgaagtaaaagctttatgaggacctttggcagagtatgcccccaacagatagtatattgatttgaacaagattgtgttaaggttttcttattattgtattcctcgataatctgtgtgtaactgatgctacaatgttgttgagtttacggatgctgaaatgtgccatttttaccacaacccctcttttggatatataaggggatttctttctatttgtaaattcaaacaaggaataagttcaatcattttcacagatgaactatgggctatgaagctgggcttgaggttgcttcaagaaagggccaaatctgattcattttggtggccatatattgccaatttgccagagacatttactgttccaatcttctttcctggggaagacataaaaaatttgcagtatgcccctatcctccaccaggtcaataaaagatgtcgttttctcctcgagtttgagaaagaggtacagcagaagcttcatactgtgcccttggtagatcatcctttttatggacaagatgtaaattcatcttcccttggatgggctatgtcagctgcctcttctcgtgcattccgtttgcatggtgaagtcccaatgttgttgcctcttattgatatgtgcaatcatagtttcaacccaaatgctaggattgtccaggaaagaagtgtaaacagcttagacatgtcagtaaaggttcttgctgagaagaagattaagcaaaatgaagcaataacactgaactatggctgctacccaaatgatttctttcttcttgattatggatttgtgataacacagaatccttacgatcaagtggaactaagttacgatggagcccttcttgatgctgcaagcatggcagctggagtctcttctcccaatttttcagcgccagccaagtggcaacaagatatattgtcacagctaaacctacatggagagggtgccgttttaaaggtgagcttaggaggccctgacgttgttgatggacgcctgttagctgctctaagggtgcttcttgccgatgatccagaggctgtgcacaagcatgacctgaatacattgatgtctcttgacgtgcaagttcctttaggtcccactgttgaagcatcagcactccggacagttcttgcgctttgcgcgattgctctccaacactttcacacaaaaataatggacgaccaggccattctaggcggtgggccgcctcttatcacgcaactggccgtccagtttagattgcagaagaagttcacgatcgttgacgtgatgcagaatatcagcaggagaatcaagatgttatcgccgcagaaatccactgggtagttctttaatctgtcgtcagacagtcagttaccattctgtactggctactgcagatagcacaaatcccagttgtgattctgtaccatgttcttgttatgatacttccagtgcctgtcattgaaaagttacatctgcgtcgaacagttaattacttccctgtactgattattgcgtataataataagtcccgattttgagtcttgtaccatttcgttgtcttcctacttcctgtgtgctgatcatggattgcttgcgtcgcc

SEQ ID NO: 204216 - DNA, 2657 bp, Zea Mays
ccaacatgtgcgaaattaaaggaaatgatcgaaatcaattgcacacggcgccacaacgcaaaactttaatccgatcacaaaccaatctcgaactagactagaacgtgaaaccctaaaactaatgggtttactgctaattagggtgttatcatgtcgacgaacaatatcagacgtacacgtacacgtgtggtgcagagcgccgggcgcgtatggttcatgacgccgccgccgtgtccatcatggccttgaactcgtcgaagcagaccaccccgtcgccgtctatgtccaccaccgcgatcatctctgcgcaccgctcggccgtcatctcctccccgacgatccccagcctccacagagcgcggcgcagctcctccgcggtgatcacgccgtcgccgttctcgtcgtactcggcgaacgcagcgcgcaacgtgtctgaccggtcgccgtcctcaaacagcgcctcgagctcctcgaggctgatgaacccatctccatcgcggtccgcgacagctaccatctcgtctgcctccacggctgtgcacccgcacaactcgcgcatctcgtccgccgagatgcggccgtcgccgtccgcgtcgaagtggcggaacacgcggacgagggccggctccggtattgtgtacgtgggcgggggagtgctagccgcggctgggggaggcggacttgaggagcggcgtcggctgaagaagatatcgctgcaggacgcggtggcggagacgacgagacccattgccggccgggtgcgacagctttgaatttgattgacggccttgacagggttttgaccctgtttttatataggagtaggacccgccagatagatgaaactcctacgcggttagtttcggtcccatctggtcttatcgtatactggtgcggacctagttgccctctccgcatccaaccagctagcgcgtccgtccccatggcggccgccgccgcggggtttacgccggcgactgcaaggaaggccctcttcactactacagtcactctcctctcatcgtcactctcacgtagggccagcagcatccgcagccgcaacctctcctgctctgccgcgttcaccgccgccacgcgcctcgcgccgcagccgccggacctggtccggtgggtgcagcgcgagggcggattcgtccaccgtgccctccgcgtagcgaatcatccggaacacgggctcgggatctcagcctcttccgccgcggcctacggcgacatcccaattggggacgtcctcatcgcgctcccgagccagcttccattacgactacgccggcccaccagtgccgcggacgacgtgcttgtgcagctcgcccaacaagtcccggatgaactatgggctatgaagctgggcttgaggttgcttcaagaaagggccaaatctgattcattttggtggccatatattgccaatttgccagagacatttactgttccaatcttctttcctggggaagacataaaaaatttgcagtcaataaaagatgtcgttttctcctcgagtttgagaaagaggtacagcagaagcttcatactgtgcccttggtagatcatcctttttatggacaagatgtaaattcatcttcccttggatgggctatgtcagctgcctcttctcgtgcattccgtttgcatggtgaagtcccaatgttgttgcctcttattgatatgtgcaatcatagtttcaacccaaatgctaggattgtccaggaaagaagtgtaaacagcttagacatgtcagtaaaggttcttgctgagaagaagattaagcaaaatgaagcaataacactgaactatggctgctacccaaatgatttctttcttcttgattatggatttgtgataacacagaatccttacgatcaagtggaactaagttacgatggagcccttcttgatgctgcaagcatggcagctggagtctcttctcccaatttttcagcgccagccaagtggcaacaagatatattgtcacagctaaacctacatggagagggtgccgttttaaaggtgagcttaggaggccctgacgttgttgatggacgcctgttagctgctctaagggtgcttcttgccgatgatccagaggctgtgcacaagcatgacctgaatacattgatgtctcttgacgtgcaagttcctttaggtcccactgttgaagcatcagcactccggacagttcttgcgctttgcgcgattgctctccaacactttcacacaaaaataatggacgaccaggccattctaggcggtgggccgcctcttatcacgcaactggccgtccagtttagattgcagaagaagttcacgatcgttgacgtgatgcagaatatcagcaggagaatcaagatgttatcgccgcagaaatccactgggtagttctttaatctgtcgtcagacagtcagttaccattctgtactggctactgcagatagcacaaatcccagttgtgattctgtaccatgttcttgttatgatacttccagtgcctgtcattgaaaagttacatctgcgtcgaacagttaattacttccctgtactgattattgcgtataataataagtcccgattttgagtcttgtaccatttcgttgtcttcctacttcctgtgtgctgatcatggattgcttgcgtcgcc

SEQ ID NO: 204217 - DNA, 1208 bp, Zea Mays
gttgttgtaatataagagtgtcaattttgaatatcagattatgtcaataaaagatgtcgttttctcctcgagtttgagaaagaggtacagcagaagcttcatactgtgcccttggtagatcatcctttttatggacaagatgtaaattcatcttcccttggatgggctatgtcagctgcctcttctcgtgcattccgtttgcatggtgaagtcccaatgttgttgcctcttattgatatgtgcaatcatagtttcaacccaaatgctaggattgtccaggaaagaagtgtaaacagcttagacatgtcagtaaaggttcttgctgagaagaagattaagcaaaatgaagcaataacactgaactatggctgctacccaaatgatttctttcttcttgattatggatttgtgataacacagaatccttacgatcaagtggaactaagttacgatggagcccttcttgatgctgcaagcatggcagctggagtctcttctcccaatttttcagcgccagccaagtggcaacaagatatattgtcacagctaaacctacatggagagggtgccgttttaaaggtgagcttaggaggccctgacgttgttgatggacgcctgttagctgctctaagggtgcttcttgccgatgatccagaggctgtgcacaagcatgacctgaatacattgatgtctcttgacgtgcaagttcctttaggtcccactgttgaagcatcagcactccggacagttcttgcgctttgcgcgattgctctccaacactttcacacaaaaataatggacgaccaggccattctaggcggtgggccgcctcttatcacgcaactggccgtccagtttagattgcagaagaagttcacgatcgttgacgtgatgcagaatatcagcaggagaatcaagatgttatcgccgcagaaatccactgggtagttctttaatctgtcgtcagacagtcagttaccattctgtactggctactgcagatagcacaaatcccagttgtgattctgtaccatgttcttgttatgatacttccagtgcctgtcattgaaaagttacatctgcgtcgaacagttaattacttccctgtactgattattgcgtataataataagtcccgattttgagtcttgtaccatttcgttgtcttcctacttcctgtgtgctgatcatggattgcttgcgtcgcc

SEQ ID NO: 204218 - DNA, 2003 bp, Zea Mays
aaaaaacaaggcaacacaagttaagaagcctggaccttcgtcctcaagtaatccttcttcgaagtgttaattcgaggacgaatgtccttaaaaatatgtgaatgaaataacatcaattgagataataatgagtaatgaaatgtggaactcatctcatacgtcttagcataatccattttatcctctatcatattacaagaatttacaaacataccttcggcttcttgacacaagatagctcgaaagtacttcgaaggctaagcaagattaagcttgggcccttcaaaaggtgaatttatgcagggcactgtttacctatttataggggagaagtacaagtttgtataaaattacaagcatgccctcaaagtttacacacatgatttacaatgatataagggtattgttgtcctttctttttcttccttattgcgtaagtctcagacctcatttgcttcgtcacttctcacccgaaagcttgttcgtgcagaagcttgcagcttcgactttcttccttgccgtccatatgtgctagacgaagcttctctccgcatttcttcggctattctgggcagcttcagctgaaggctagcttcgttcgccgttatctgtatacctgaaacacatttgttcacaccgaagtaaaagctttatgaggacctttggcagaatgaactatgggctatgaagctgggcttgaggttgcttcaagaaagggccaaatctgattcattttggtggccatatattgccaatttgccagagacatttactgttccaatcttctttcctggggaagacataaaaaatttgcagtatgcccctatcctccaccaggtcaataaaagatgtcgttttctcctcgagtttgagaaagaggtacagcagaagcttcatactgtgcccttggtagatcatcctttttatggacaagatgtaaattcatcttcccttggatgggctatgtcagctgcctcttctcgtgcattccgtttgcatggtgaagtcccaatgttgttgcctcttattgatatgtgcaatcatagtttcaacccaaatgctaggattgtccaggaaagaagtgtaaacagcttagacatgtcagtaaaggttcttgctgagaagaagattaagcaaaatgaagcaataacactgaactatggctgctacccaaatgatttctttcttcttgattatggatttgtgataacacagaatccttacgatcaagtggaactaagttacgatggagcccttcttgatgctgcaagcatggcagctggagtctcttctcccaatttttcagcgccagccaagtggcaacaagatatattgtcacagctaaacctacatggagagggtgccgttttaaaggtgagcttaggaggccctgacgttgttgatggacgcctgttagctgctctaagggtgcttcttgccgatgatccagaggctgtgcacaagcatgacctgaatacattgatgtctcttgacgtgcaagttcctttaggtcccactgttgaagcatcagcactccggacagttcttgcgctttgcgcgattgctctccaacactttcacacaaaaataatggacgaccaggccattctaggcggtgggccgcctcttatcacgcaactggccgtccagtttagattgcagaagaagttcacgatcgttgacgtgatgcagaatatcagcaggagaatcaagatgttatcgccgcagaaatccactgggtagttctttaatctgtcgtcagacagtcagttaccattctgtactggctactgcagatagcacaaatcccagttgtgattctgtaccatgttcttgttatgatacttccagtgcctgtcattgaaaagttacatctgcgtcgaacagttaattacttccctgtactgattattgcgtataataataagtcccgattttgagtcttgtaccatttcgttgtcttcctacttcctgtgtgctgatcatggattgcttgcgtcgcc

SEQ ID NO: 204219 - DNA, 1898 bp, Zea Mays
ccttaaaaatatgtgaatgaaataacatcaattgagataataatgagtaatgaaatgtggaactcatctcatacgtcttagcataatccattttatcctctatcatattacaagaatttacaaacataccttcggcttcttgacacaagatagctcgaaagtacttcgaaggctaagcaagattaagcttgggcccttcaaaaggtgaatttatgcagggcactgtttacctatttataggggagaagtacaagtttgtataaaattacaagcatgccctcaaagtttacacacatgatttacaatgatataagggtattgttgtcctttctttttcttccttattgcgtaagtctcagacctcatttgcttcgtcacttctcacccgaaagcttgttcgtgcagaagcttgcagcttcgactttcttccttgccgtccatatgtgctagacgaagcttctctccgcatttcttcggctattctgggcagcttcagctgaaggctagcttcgttcgccgttatctgtatacctgaaacacatttgttcacaccgaagtaaaagctttatgaggacctttggcagactgggcttgaggttgcttcaagaaagggccaaatctgattcattttggtggccatatattgccaatttgccagagacatttactgttccaatcttctttcctggggaagacataaaaaatttgcagtatgcccctatcctccaccaggtcaataaaagatgtcgttttctcctcgagtttgagaaagaggtacagcagaagcttcatactgtgcccttggtagatcatcctttttatggacaagatgtaaattcatcttcccttggatgggctatgtcagctgcctcttctcgtgcattccgtttgcatggtgaagtcccaatgttgttgcctcttattgatatgtgcaatcatagtttcaacccaaatgctaggattgtccaggaaagaagtgtaaacagcttagacatgtcagtaaaggttcttgctgagaagaagattaagcaaaatgaagcaataacactgaactatggctgctacccaaatgatttctttcttcttgattatggatttgtgataacacagaatccttacgatcaagtggaactaagttacgatggagcccttcttgatgctgcaagcatggcagctggagtctcttctcccaatttttcagcgccagccaagtggcaacaagatatattgtcacagctaaacctacatggagagggtgccgttttaaaggtgagcttaggaggccctgacgttgttgatggacgcctgttagctgctctaagggtgcttcttgccgatgatccagaggctgtgcacaagcatgacctgaatacattgatgtctcttgacgtgcaagttcctttaggtcccactgttgaagcatcagcactccggacagttcttgcgctttgcgcgattgctctccaacactttcacacaaaaataatggacgaccaggccattctaggcggtgggccgcctcttatcacgcaactggccgtccagtttagattgcagaagaagttcacgatcgttgacgtgatgcagaatatcagcaggagaatcaagatgttatcgccgcagaaatccactgggtagttctttaatctgtcgtcagacagtcagttaccattctgtactggctactgcagatagcacaaatcccagttgtgattctgtaccatgttcttgttatgatacttccagtgcctgtcattgaaaagttacatctgcgtcgaacagttaattacttccctgtactgattattgcgtataataataagtcccgattttgagtcttgtaccatttcgttgtcttcctacttcctgtgtgctgatcatggattgcttgcgtcgcc

SEQ ID NO: 204220 - DNA, 2019 bp, Zea Mays
aatatgtgaatgaaataacatcaattgagataataatgagtaatgaaatgtggaactcatctcatacgtcttagcataatccattttatcctctatcatattacaagaatttacaaacataccttcggcttcttgacacaagatagctcgaaagtacttcgaaggctaagcaagattaagcttgggcccttcaaaaggtgaatttatgcagggcactgtttacctatttataggggagaagtacaagtttgtataaaattacaagcatgccctcaaagtttacacacatgatttacaatgatataagggtattgttgtcctttctttttcttccttattgcgtaagtctcagacctcatttgcttcgtcacttctcacccgaaagcttgttcgtgcagaagcttgcagcttcgactttcttccttgccgtccatatgtgctagacgaagcttctctccgcatttcttcggctattctgggcagcttcagctgaaggctagcttcgttcgccgttatctgtatacctgaaacacatttgttcacaccgaagtaaaagctttatgaggacctttggcagagtatgcccccaacagatagtatattgatttgaacaagattgtgttaaggttttcttattattgtattcctcgataatctgtgtgtaactgatgctacaatgttgttgagtttacggatgctgaaatgtgccatttttaccacaacccctcttttggatatataaggggatttctttctatttgtaaattcaaacaaggaataagttcaatcattttcacagatgaactatgggctatgaagctgggcttgaggttgcttcaagaaagggccaaatctgattcattttggtggccatatattgccaatttgccagagacatttactgttccaatcttctttcctggggaagacataaaaaatttgcagtcaataaaagatgtcgttttctcctcgagtttgagaaagagctgcctcttctcgtgcattccgtttgcatggtgaagtcccaatgttgttgcctcttattgatatgtgcaatcatagtttcaacccaaatgctaggattgtccaggaaagaagtgtaaacagcttagacatgtcagtaaaggttcttgctgagaagaagattaagcaaaatgaagcaataacactgaactatggctgctacccaaatgatttctttcttcttgattatggatttgtgataacacagaatccttacgatcaagtggaactaagttacgatggagcccttcttgatgctgcaagcatggcagctggagtctcttctcccaatttttcagcgccagccaagtggcaacaagatatattgtcacagctaaacctacatggagagggtgccgttttaaaggtgagcttaggaggccctgacgttgttgatggacgcctgttagctgctctaagggtgcttcttgccgatgatccagaggctgtgcacaagcatgacctgaatacattgatgtctcttgacgtgcaagttcctttaggtcccactgttgaagcatcagcactccggacagttcttgcgctttgcgcgattgctctccaacactttcacacaaaaataatggacgaccaggccattctaggcggtgggccgcctcttatcacgcaactggccgtccagtttagattgcagaagaagttcacgatcgttgacgtgatgcagaatatcagcaggagaatcaagatgttatcgccgcagaaatccactgggtagttctttaatctgtcgtcagacagtcagttaccattctgtactggctactgcagatagcacaaatcccagttgtgattctgtaccatgttcttgttatgatacttccagtgcctgtcattgaaaagttacatctgcgtcgaacagttaattacttccctgtactgattattgcgtataataataagtcccgattttgagtcttgtaccatttcgttgtcttcctacttcctgtgtgctgatcatggattgcttgcgtcgcc

SEQ ID NO: 204221 - DNA, 1902 bp, Zea Mays
caagaatttacaaacataccttcggcttcttgacacaagatagctcgaaagtacttcgaaggctaagcaagattaagcttgggcccttcaaaaggtgaatttatgcagggcactgtttacctatttataggggagaagtacaagtttgtataaaattacaagcatgccctcaaagtttacacacatgatttacaatgatataagggtattgttgtcctttctttttcttccttattgcgtaagtctcagacctcatttgcttcgtcacttctcacccgaaagcttgttcgtgcagaagcttgcagcttcgactttcttccttgccgtccatatgtgctagacgaagcttctctccgcatttcttcggctattctgggcagcttcagctgaaggctagcttcgttcgccgttatctgtatacctgaaacacatttgttcacaccgaagtaaaagctttatgaggacctttggcagagtatgcccccaacagatagtatattgatttgaacaagattgtgttaaggttttcttattattgtattcctcgataatctgtgtgtaactgatgctacaatgttgttgagtttacggatgctgaaatgtgccatttttaccacaacccctcttttggatatataaggggatttctttctatttgtaaattcaaacaaggaataagttcaatcattttcacagatgaactatgggctatgaagctgggcttgaggttgcttcaagaaagggccaaatctgattcattttggtggccatatattgccaatttgccagagacatttactgttccaatcttctttcctggggaagacataaaaaatttgcagtcaataaaagatgtcgttttctcctcgagtttgagaaagaggtacagcagaagcttcatactgtgcccttggtagatcatcctttttatggacaagatgtaaattcatcttcccttggatgggctatgtcagctgcctcttctcgtgcattccgtttgcatggtgaagtcccaatgttgttgcctcttattgatatgtgcaatcatagtttcaacccaaatgctaggattgtccaggaaagaagtgtaaacagcttagacatgtcagtaaagaatccttacgatcaagtggaactaagttacgatggagcccttcttgatgctgcaagcatggcagctggagtctcttctcccaatttttcagcgccagccaagtggcaacaagatatattgtcacagctaaacctacatggagagggtgccgttttaaaggtgagcttaggaggccctgacgttgttgatggacgcctgttagctgctctaagggtgcttcttgccgatgatccagaggctgtgcacaagcatgacctgaatacattgatgtctcttgacgtgcaagttcctttaggtcccactgttgaagcatcagcactccggacagttcttgcgctttgcgcgattgctctccaacactttcacacaaaaataatggacgaccaggccattctaggcggtgggccgcctcttatcacgcaactggccgtccagtttagattgcagaagaagttcacgatcgttgacgtgatgcagaatatcagcaggagaatcaagatgttatcgccgcagaaatccactgggtagttctttaatctgtcgtcagacagtcagttaccattctgtactggctactgcagatagcacaaatcccagttgtgattctgtaccatgttcttgttatgatacttccagtgcctgtcattgaaaagttacatctgcgtcgaacagttaattacttccctgtactgattattgcgtataataataagtcccgattttgagtcttgtaccatttcgttgtcttcctacttcctgtgtgctgatcatggattgcttgcgtcgcc

SEQ ID NO: 204222 - DNA, 1765 bp, Zea Mays
tcggcttcttgacacaagatagctcgaaagtacttcgaaggctaagcaagattaagcttgggcccttcaaaaggtgaatttatgcagggcactgtttacctatttataggggagaagtacaagtttgtataaaattacaagcatgccctcaaagtttacacacatgatttacaatgatataagggtattgttgtcctttctttttcttccttattgcgtaagtctcagacctcatttgcttcgtcacttctcacccgaaagcttgttcgtgcagaagcttgcagcttcgactttcttccttgccgtccatatgtgctagacgaagcttctctccgcatttcttcggctattctgggcagcttcagctgaaggctagcttcgttcgccgttatctgtatacctgaaacacatttgttcacaccgaagtaaaagctttatgaggacctttggcagaatgaactatgggctatgaagctgggcttgaggttgcttcaagaaagggccaaatctgattcattttggtggccatatattgccaatttgccagagacatttactgttccaatcttctttcctggggaagacataaaaaatttgcagtcaataaaagatgtcgttttctcctcgagtttgagaaagaggtacagcagaagcttcatactgtgcccttggtagatcatcctttttatggacaagatgtaaattcatcttcccttggatgggctatgtcagctgcctcttctcgtgcattccgtttgcatggtgaagtcccaatgttgttgcctcttattgatatgtgcaatcatagtttcaacccaaatgctaggattgtccaggaaagaagtgtaaacagcttagacatgtcagtaaaggttcttgctgagaagaagattaagcaaaatgaagcaataacactgaactatggctgctacccaaatgatttctttcttcttgattatggatttgtgataacacagaatccttacgatcaagtggaactaagttacgatggagcccttcttgatgctgcaagcatggcagctggagtctcttctcccaatttttcagcgccagccaagtggcaacaagatatattgtcacagctaaacctacatggagagggtgccgttttaaaggtgagcttaggaggccctgacgttgttgatggacgcctgttagctgctctaagggtgcttcttgccgatgatccagaggctgtgcacaagcatgacctgaatacattgatgtctcttgacgtgcaagttcctttaggtcccactgttgaagcatcagcactccggacagttcttgcgctttgcgcgattgctctccaacactttcacacaaaaataatggacgaccaggccattctaggcggtgggccgcctcttatcacgcaactggccgtccagtttagattgcagaagaagttcacgatcgttgacgtgatgcagaatatcagcaggagaatcaagatgttatcgccgcagaaatccactgggtagttctttaatctgtcgtcagacagtcagttaccattctgtactggctactgcagatagcacaaatcccagttgtgattctgtaccatgttcttgttatgatacttccagtgcctgtcattgaaaagttacatctgcgtcgaacagttaattacttccctgtactgattattgcgtataataataagtcccgattttgagtcttgtaccatttcgttgtcttcctacttcctgtgtgctgatcatggattgcttgcgtcgcc

SEQ ID NO: 204223 - DNA, 1332 bp, Zea Mays
ctctccgcatttcttcggctattctgggcagcttcagctgaaggctagcttcgttcgccgttatctgtatacctgaaacacatttgttcacaccgaagtaaaagctttatgaggacctttggcagaatgaactatgggctatgaagctgggcttgaggttgcttcaagaaagggccaaatctgattcattttggtggccatatattgccaatttgccagagacatttactgttccaatcttctttcctggggaagacataaaaaatttgcagtcaataaaagatgtcgttttctcctcgagtttgagaaagaggtacagcagaagcttcatactgtgcccttggtagatcatcctttttatggacaagatgtaaattcatcttcccttggatgggctatgtcagctgcctcttctcgtgcattccgtttgcatggtgaagtcccaatgttgttgcctcttattgatatgtgcaatcatagtttcaacccaaatgctaggattgtccaggaaagaagtgtaaacagcttagacatgtcagtaaagaatccttacgatcaagtggaactaagttacgatggagcccttcttgatgctgcaagcatggcagctggagtctcttctcccaatttttcagcgccagccaagtggcaacaagatatattgtcacagctaaacctacatggagagggtgccgttttaaaggtgagcttaggaggccctgacgttgttgatggacgcctgttagctgctctaagggtgcttcttgccgatgatccagaggctgtgcacaagcatgacctgaatacattgatgtctcttgacgtgcaagttcctttaggtcccactgttgaagcatcagcactccggacagttcttgcgctttgcgcgattgctctccaacactttcacacaaaaataatggacgaccaggccattctaggcggtgggccgcctcttatcacgcaactggccgtccagtttagattgcagaagaagttcacgatcgttgacgtgatgcagaatatcagcaggagaatcaagatgttatcgccgcagaaatccactgggtagttctttaatctgtcgtcagacagtcagttaccattctgtactggctactgcagatagcacaaatcccagttgtgattctgtaccatgttcttgttatgatacttccagtgcctgtcattgaaaagttacatctgcgtcgaacagttaattacttccctgtactgattattgcgtataataataagtcccgattttgagtcttgtaccatttcgttgtcttcctacttcctgtgtgctgatcatggattgcttgcgtcgcc

SEQ ID NO: 204224 - DNA, 2163 bp, Zea Mays
cggctcccctgcctcacgcttcctgttcgaactcttcgtcgcctcacactggtgctcctcctctccccatcgctccgccactcccatggcgtccctcttcggggctggccgccggcgatcaccggaggacgacggcgaggacgatagatccggcagagggaggaccaagcgcttccgcctctccccggaggaggacgcagcgtcgccggcggaggcggggcccggcgcggcgacggagaccggctggctctccggcttcgtctacggagcgaagagggtcatttcttccgttttactgttctcctcgcccgaggagaccggctcgggggaggacgaggaagaggagaaggacgacgacgacgacgaagagggcatccacttgaatgaacatgaagctactcatgacactcatggagcaatagttccttatagcgagccaaagcttactattgagcaaatggttatgaaggaaacattctcaagggatgaatgtgataggatggtagagctaataaaatcaagagttagagattctacttttcctgaagcccatgagtatgtaaagccagaagaaatccctagtaggaatgcaggcattacacatgacttcacaggaacatggcgctccttgagccgtgatcggaatgtccctgaatcagttccactctctagtatgagaacaagacctggtagtttttctcaaggctctccactccaagcatcacctgagctatgcactgcagcagttacggaagcaaaaaaatggttggaagagaaaaggcagggactgggcttcaagcctgaagacaatggaccatgcacactaaatactgatatacttagttctgtaactacaaaggaggactacctttccagcttttggacaaaattggaggaatcacaaagagctcgtattggatcatctggaggttctgctgatgctcctaaattctggaattatggttctaattccaggttatttgagaatgacacctctatattttcattgggcactgatgaaaaagttggagatcctaccaaaatctataatgggtctgggaaatttgcagcaacagaaccagttggtggatgctgcttacctattacacccactgaagatagaactgatggtattactgagcctgtggaccttgcaaggaacaacgggaatgcaccccaagaaaaccaggttgcatctgaaattctccctgataaagttccagagggtaacgatgtgtcttccactggaattactaaggacactactggccatagtggagatgttaaagctcccacttcagaaccacatttaggggaaacacgtatcaactcagcatcagaatccataccaaatgatgcgggccccccaacccagaacaaaaagaacgggtcgacgaccaagaaaacattagtaaacggtctcgtggaccaatcaaatgccaactccgggctagaatcttcaggaaacgataaccctagctacaccaactcgagcagtgctgtgccacccgcaagcacccaaccagtcgagtctgcagccgctgctgtagacgttgattcggtcgagaaaggcccaggtacgacaccagagcaaccggcgaagcgaagggcacccaacgttcgacgaggacagagaagggtgctgcgaagcgcaacgagagaaggaagagcgacgtaggggatattgtgttatagcgaattaaagggggcaacacatgatccctagctaggttaactagagctatagcaatgactggccgtttccacgtacgagatgcgtagtgtgcatcaaactgtatccatgttgtattatcgtaggagtcgtaggccttacagtgaccacgcgtactggttagagttggtcgttcaggaccagtagctgcttgatttgggtttcggtgtcaggatttggttaggtcctgtgtgtagtttgcgcagtcggaaagagactgttggttgtattgcaggttgcaagcagactgtgttgtagcgaccaggtagtaaatccagcgagagctgctcctctctctctctctctctctctctctctctctctctctctctctctctctctctctctctctctgtatgatgatggacgctggtgtttcaggcgatgtactcatgtaacccttgttttgtactgagctatgggcctttctg

SEQ ID NO: 204225 - DNA, 1721 bp, Zea Mays
cctgcctcacgcttcctgttcgaactcttcgtcgcctcacactggtgctcctcctctccccatcgctccgccactcccatggcgtccctcttcggggctggccgccggcgatcaccggaggacgacggcgaggacgatagatccggcagagggaggaccaagcgcttccgcctctccccggaggaggacgcagcgtcgccggcggaggcggggcccggcgcggcgacggagaccggctggctctccggcttcgtctacggagcgaagagggtcatttcttccgttttactgttctcctcgcccgaggagaccggctcgggggaggacgaggaagaggagaaggacgacgacgacgacgaagagggcatccacttgaatgaacatgaagctactcatgacactcatggagcaatagttccttatagcgagccaaagcttactattgagcaaatggttatgaaggaaacattctcaagggatgaatgtgataggatggtagagctaataaaatcaagagttagagattctacttttcctgaagcccatgagtatgtaaagccagaagaaatccctagtaggaatgcaggcattacacatgacttcacaggaacatggcgctccttgagccgtgatcggaatgtccctgaatcagttccactctctagtatgagaacaagacctggtagtttttctcaaggctctccactccaagcatcacctgagctatgcactgcagcagttacggaagcaaaaaaatggttggaagagaaaaggcagggactgggcttcaagcctgaagacaatggaccatgcacactaaatactgatatacttagttctcatgatgactctgtctctgacctgggttctccagttgatttagcgaaatcatacatgcagtcgttacctccttggaaatccccattcttaggccgtcagaagtttaacacaccaccctccaaatattttatctcatcagcagaggtaactacaaaggaggactacctttccagcttttggacaaaattggaggaatcacaaagagctcgtattggatcatctggaggttctgctgatgctcctaaattctggaattatggttctaattccaggttatttgagaatgacacctctatattttcattgggcactgatgaaaaagttggagatcctaccaaaatctataatgggtctgggaaatttgcagcaacagaaccagttggtggatgctgcttacctattacacccactgaagatagaactgatggtattactgagcctgtggaccttgcaaggaacaacgggaatgcaccccaagaaaaccaggttgcatctgaaattctccctgataaagttccagagggtaacgatgtgtcttccactggaattactaaggacactactggccatagtggagatgttaaagctcccacttcagaaccacatttaggggaaacacgtatcaactcagcatcagtatctacatccaaacggacccttagattatccagctgagagcagggagcgattggccacatatcatggacaaccttgcctgcaggctcaggaaaggcataattgctgatgttagccagtaaatcatgtcttcaattggaatgccactacacagacaagtttgagacgatttatgttgaaaaaaaaactacaactcctggttccaggtttatatgggttttacaaccatcatgaggcttattgat

SEQ ID NO: 204226 - DNA, 1596 bp, Zea Mays
cgtaacccagccttttgcccaaatcacccatccgcaccatccgcgagcaagctccagcgatccagccgcatgccacgcaggccctatgacgcccgccatcctcatccaggagtgcccccacccccagcgccccttccacccccgcaccgccgtcctgcccctctcccctcccacacccactcccttcctccatctccatgctcggcgccctcaccatctcccctctgcctccgctccacctccctaaccgcctccgacctaaccgcctccccccatagaccgaacgggatcttcgcgtccgacgcgcccatcgacgtggacgccgccatggaggacgagctacgggagaaggaggacggtgcgtatgtggaacgtctcagatctgccactctatctccggcaacctaggtcgggtgaggtagttcttcgatgtgatgcctgagtggaacttggtatcctagaacgagatgttgggaacgtatgcctacacagcagactccaggcgccacccggggtacctctcgcgccagatccactcatccacatgccagcaaccccgcgtcgccggcgaccgcgctccggtcgtaggctcatccacagccagcggtggagattcctcccccccagccatacaacttccacaacctcgactgtcgcaccatactcctcgtcgaggcaccgtacgcacctacttcaccctgccccctgaccaccccttcgagccggtgcccttgctaccctttccacaacacctgctcccccgcgccgcccccaacgtctggccaccgcagatatgcattcccatgctcacaccgatgcagacacagccacacgacgctaggtgcactgcaaacaccctgccaaccagcttccattgcgatggttctggttgaaatttatttttattgtgatatcttaaaatacacaaggttccggtgcttatgtattgcatctttctactgcttcttattttgctttatagttgcttcaaatggtttataggtagccccaggcaactcgaaagaggtagcagctgcactgtctcaggctttaagaaattctttagaaagaatgagcagttcagagatgcacttgcgaagcacagacttctgacaccaacgacaccattagcaaggcagggatccgatgatatgtccttggtgtcatccgtgatataaaccacttcctttagtcatgtgctattcttcactgttattcatgtgtacagttgttcctttccatagtcacagagtgtaggtttctagattttttgcttgtgaagtctacccacgctgcctcgctcttgttctttataatgagatgaaattgtatggtggctttgcgagtgagatgaaatgtatggtggctttgtgagtgaaccattgtggtttaccaagtctatttcaactcaaaaaatggcatcgggaggcaaaacaactgcaaaagggagcaaggctatgacggtaccggtagcgaaggcccaggtcgtcgtgcaagtctaagccatatgcctggcgacaaatgaccatgtgctatatatgttgctaagttacaacatagaccaaataaatttactccagccagtttataaaaaat

SEQ ID NO: 204227 - DNA, 2203 bp, Zea Mays
gccgcatgccacgcaggccctatgacgcccgccatcctcatccaggagtgcccccacccccagcgccccttccacccccgcaccgccgtcctgcccctctcccctcccacacccactcccttcctccatctccatgctcggcgccctcaccatctcccctctgcctccgctccacctccctaaccgcctccgacctaaccgcctccccccatagaccgaacgggatcttcgcgtccgacgcgcccatcgacgtggacgccgccatggaggacgagctacgggagaaggaggacggtgcgtatgtggaacgtctcagatctgccactctatctccggcaacctaggtcgggtgaggtagccccaggcaactcgaaagaggtagcagctgcactgtctcaggctttaagaaattctttagaaaggtattcttgtacttctttaatatttgatgcagaaagaaatcatcgatatttcttatcaatgcatgctaagctatcatttaaagtgccatgcttggtttgtgagggtttggaggatatgttggctcactttaaatatatactatgtatttttaaatgtaaggcatgaaatatgtaatgaatcctgctactcttgtgcttagataggcttttgtttttatattggtaccctaatctgtttgaacaaacctaattggatcatcaaactgcattataactatatataactttatggtctgctatttttcctttcaccataggttttggaaattatttttgtgccattttggttacctttattatgtgataagaacatagcacaagagtatttactcttgtatgacaaacaccagttctgaatctttaatgctgacggactggtcttctcatggctggtactaagactgacggcgtagcgaatgataaaagtatgctacattgcattttacactacttaaaggggtaggtcaactgttgtgtagagaattattaaacatgccatcattatattgtttcatcaggtgtggggttctcattgtgcaagaactattcttatgtatggtcacttgtttattgttaaaactttggaccacacaaatatcattagatgtatttctaatgatacgtacataggtggtagagaaaggagtagcacaatttaatttgatggcatatatatagaatgaaatagtagtactatcagctataactattgataaatgatgcagtctaagagcataccaatatgatttgccacactggtagaaactatgacttgtctgctgcatcctgcacatgagcatgtgatttgaagaatcgcaccatttgaagcaatcaatgggattttaggtctgcaagtaatgggtcttggatttactaggtactagcaacctcacaaccaaaacatggtgaccacaatatccaggattagatgagattagagtcaggtagttcaaaagtaagattagaccgcccaagacatcatcgctgatttattgaccaacaccaacgatgacccaaatagcgcagatttgccagttcatggagaggaacccggatgtgaggttcctgcatgcaggtgaactatgaggagcacaagtctatgcgctacaaccttaatgtccatgtcatccctttcttcacgttctacaggggagcttagggtcgactctgcaacttcagttgtatcaaggcaactaatgagcagttcagagatgcacttgcgaagcacagacttctgacaccaacgacaccattagcaaggcagggatccgatgatatgtccttggtgtcatccgtgatataaaccacttcctttagtcatgtgctattcttcactgttattcatgtgtacagttgttcctttccatagtcacagagtgtaggtttctagattttttgcttgtgaagtctacccacgctgcctcgctcttgttctttataatgagatgaaattgtatggtggctttgcgagtgagatgaaatgtatggtggctttgtgagtgaaccattgtggtttaccaagtctatttcaactcaaaaaatggcatcgggaggcaaaacaactgcaaaagggagcaaggctatgacggtaccggtagcgaaggcccaggtcgtcgtgcaagtctaagccatatgcctggcgacaaatgaccatgtgctatatatgttgctaagttacaacatagaccaaataaatttactccagccagtttataaaaaat

SEQ ID NO: 204228 - DNA, 3010 bp, Zea Mays
ggagccgagctccctacgactacgaggctacaccgcagtcggtccggaagcccggcccaacttgccaggctggcctccgccgtggaccatcatcacccacgggaaacaggcgccgtgttaatggccgccacaacggtaaacgttacccttgccgaagagaagggaaaatagcagtagcgcccggatcccctctccttccctccagatcacaccactgccgcctccgcctgcaaatccatttctagactcaagctgttgctgcgagcgagctagggttggtgctcaggtctccagggtttcgcctccccgctcccggtgcccatcgccttggaccttggcctgccgggttagggttgggtcgcagctgcgggggccgtggggcggggatgcggccgatgcggcgatcgcgggcgatcgggaggctgtagcggcggcggggcagggtatctcttgggtggattctccggcgatggccgcagacgcactatccatcatcccgggcgccgtgcttcgcaacctctctgacaagctctacgagaagcggaagaacgccgcgcttgagattgagggaattgtgaagcagcttgcaacgtttggggagcatgagaagatatcagcggttatctcgctgctcaccaacgatttcacatattcgccacaggcgaaccatcgaaagggtgggttgattggccttgcagcagttactgttggactcaccagtgaggcagctcagcatctcgagcaaattgtacctcctgtgcttacttctttcctggaccaagatagtagagtgcgttactatgcttgtgaagcgctatacaacatagcaaaagtggtaagaggggatttcatcatctacttcaacaaaatttttgatgctttatgcaagctttctgcagattccgatgctaatgttcaaagtgccgctcaccttcttgataagcttgtcaaggatatcgtaactgagagtgatcagttcagcatagaagaattcataccgctcttgagagagcgcatgaatgtgttgaacccttatgtaagacaatttttggttgggtggataacagtgttagatagtgttcctgatattgacatgcttggttttcttcctgattttcttgacggtttgttcaatatgctgagtgattccagtcatgagataaggcagcaagctgatgcagcactttctgagtttcttcaggagataaagaactcaccaaatgtagattatggtcgtatggctgaaatactcgttcggagggcaggctctactgatgaattcactcggttgacatctatcacatggatcaacgagtttgtgaagcttggtggggaacaacttgttccctactatgcagatatattgggcgctgtcttaccatgcatatctgacgaggaggagaaaatccgagtggttgcacgcgaaacaaatgaggaactccgtgctataaaagctgatccagctgagggatttgatatcggagcaattctttcaatcgcaaaaagagaattgaacagtgaacatgaggccactcgaatcgaagcattgcattggttcttcactttgctggatcgatattgtgctgagttcttggcttacctgaacgatatttttgatccactcctaaatgcactttctgatccttcggacgcggttgtcctattagtattggaggttcatgcacgcatagctgaagaatctcaccacttccatcatcttgtatcctacctgatccgcaccttccacaacaaccattttgtactggagaaacgtggtgctttgatagtccgtcggctctgtgttcttctaggtgctgaaaaagtatatcgagagttctccactattcttgagagtgaagttgatcttgatttcgcatccgtcatggttcaggttttgaatttgattttgctcacatcaactgaacttggtgagctccgctctcctcttaagaagtcgttagtggattcttgtggcaaggacttgtttcagtctttatatgcttcatggcgccactctccgatggctacgataagtttatgtttacttgctcaggcatacaatcacgcaagctgtgttattcagtcactgggagaagaagacataaatgtgaattttttggttcaattagataaattgatccgtctcttagagactccagtatttgcttacttgcgtttacagcttctcgagcctggaaaacacacttggcttctgaaaactctttacggtctcctgatgcttttgcctcagcaaagtgcggccttcaagatcttgaggactcgactgaagactgtgccattcagtgaaaatcttaagcgcacatcttcagcgaatccatactctcagattctgcaagtgacggaagatggcaatagaaaccaagatatgcagaactacagtgcaatcaatttcccattccttctccagcaatttgagaacatgcagctgcagcatcgtaaccatttgaaggatcaactgcaatcccgtaaatctgcttcgactttaacattatctcaggagatacaaagatacgaagaagcgcattcctcatcgctgtcagagattaacaggcccccttcaagaacatccaaaggcattttatgatgcatttgttcttgcgatgtatgatatatttgccggaagcatcaccacatatatgttggggctttgattttgtcaagagatggcaattatttgttggagaaagctcgttgccacattctagtcattcttttcttagtggtttcactgctcatctggtttctgtaatttttcaattgaaggccaaatgagcaaagtagtaattggagatagaaatatgttactactgtcctatctatcgatctccaataaattagcgttgcaatgtaaattcctgttggctcgtatgatatatttattatattatttatatgccttatctttacccccattttatattattacaatatcgcatttgggtcatgaacaaatttgcgttttgagtctctttttagtaggaactatcag

SEQ ID NO: 204229 - DNA, 3445 bp, Zea Mays
caacttgccaggctggcctccgccgtggaccatcatcacccacgggaaacaggcgccgtgttaatggccgccacaacggtaaacgttacccttgccgaagagaagggaaaatagcagtagcgcccggatcccctctccttccctccagatcacaccactgccgcctccgcctgcaaatccatttctagactcaagctgttgctgcgagcgagctagggttggtgctcaggtctccagggtttcgcctccccgctcccggtgcccatcgccttggaccttggcctgccgggttagggttgggtcgcagctgcgggggccgtggggcggggatgcggccgatgcggcgatcgcgggcgatcgggaggctgtagcggcggcggggcagggtatctcttgggtggattctccggcgatggccgcagacgcactatccatcatcccgggcgccgtgcttcgcaacctctctgacaagctctacgagaagcggaagaacgccgcgcttgagattgagggaattgtgaagcagcttgcaacgtttggggagcatgagaagatatcagcggttatctcgctgctcaccaacgatttcacatattcgccacaggcgaaccatcgaaagggtgggttgattggccttgcagcagttactgttggactcaccagtgaggcagctcagcatctcgagcaaattgtacctcctgtgcttacttctttcctggaccaagatagtagagtgcgttactatgcttgtgaagcgctatacaacatagcaaaagtggtaagaggggatttcatcatctacttcaacaaaatttttgatgctttatgcaagctttctgcagattccgatgctaatgttcaaagtgccgctcaccttcttgataagcttgtcaaggatatcgtaactgagagtgatcagttcagcatagaagaattcataccgctcttgagagagcgcatgaatgtgttgaacccttatgtaagacaatttttggttgggtggataacagtgttagatagtgttcctgatattgacatgcttggttttcttcctgattttcttgacggtttgttcaatatgctgagtgattccagtcatgagataaggcagcaagctgatgcagcactttctgagtttcttcaggagataaagaactcaccaaatgtagattatggtcgtatggctgaaatactcgttcggagggcaggctctactgatgaattcactcggttgacatctatcacatggatcaacgagtttgtgaagcttggtggggaacaacttgttccctactatgcagatatattgggcgctgtcttaccatgcatatctgacgaggaggagaaaatccgagtggttgcacgcgaaacaaatgaggaactccgtgctataaaagctgatccagctgagggatttgatatcggagcaattctttcaatcgcaaaaagagaattgaacagtgaacatgaggccactcgaatcgaagcattgcattggttcttcactttgctggatcgatattgtgctgagttcttggcttacctgaacgatatttttgatccactcctaaatgcactttctgatccttcggacgcggttgtcctattagtattggaggttcatgcacgcatagctgaagaatctcaccacttccatcatcttgtatcctacctgatccgcaccttccacaacaaccattttgtactggagaaacgtggtgctttgatagtccgtcggctctgtgttcttctaggtgctgaaaaagtatatcgagagttctccactattcttgagagtgaagttgatcttgatttcgcatccgtcatggttcaggttttgaatttgattttgctcacatcaactgaacttggtgagctccgctctcctcttaagaagtcgttagtggattcttgtggcaaggacttgtttcagtctttatatgcttcatggcgccactctccgatggctacgataagtttatgtttacttgctcaggcatacaatcacgcaagctgtgttattcagtcactgggagaagaagacataaatgtgaattttttggttcaattagataaattgatccgtctcttagagactccagtatttgcttacttgcgtttacaggtaacttggtctgataatccgttcctgcaaatttatctttctgtttctcaggcacatttgaattccgaaacttggagagttctacctggcttttttaatttgatttctagtgctacattaatggcatgataagcctggaccaatctttgtctcatgctgtttatctgtagttctgtacatttactgtatgctcgccttttggtacaatgtttccagactattgctatcccctaatgattccacattcagtttggatgctgtaaaactaacatgttggggtttatgtgacgcaacatgatatgaaaactgtgatgacttgttggcaaaaaaaaactctagtacagagacttttgttgttatatcttcttactgatcattttggcatggaaattccacaacatgctcttaaaaatctgcagcttctcgagcctggaaaacacacttggcttctgaaaactctttacggtctcctgatgcttttgcctcagcaaagtgcggccttcaagatcttgaggactcgactgaagactgtgccattcagtgaaaatcttaagcgcacatcttcagcgaatccatactctcagattctgcaagtgacggaagatggcaatagaaaccaagatatgcagaactacagtgcaatcaatttcccattccttctccagcaatttgagaacatgcagctgcagcatcgtaaccatttgaaggatcaactgcaatcccgtaaatctgcttcgactttaacattatctcaggagatacaaagatacgaagaagcgcattcctcatcgctgtcagagattaacaggcccccttcaagaacatccaaaggcattttatgatgcatttgttcttgcgatgtatgatatatttgccggaagcatcaccacatatatgttggggctttggttagtctcctcgttttttttcaaaggaggttgcatagggtacatagtgtaatcttttctatttcgttcctagattttgtcaagagatggcaattatttgttggagaaagctcgttgccacattctagtcattcttttcttagtggtttcactgctcatctggtttctgtaatttttcaattgaaggccaaatgagcaaagtagtaattggagatagaaatatgttactactgtcctatctatcgatctccaataaattagcgttgcaatgtaaattcctgttggctcgtatgatatatttattatattatttatatgccttatctttacccccattttatattattacaatatcgcatttgggtcatgaacaaatttgcgttttgagtctctttttagtaggaactatcag

SEQ ID NO: 204230 - DNA, 3085 bp, Zea Mays
gccaggctggcctccgccgtggaccatcatcacccacgggaaacaggcgccgtgttaatggccgccacaacggtaaacgttacccttgccgaagagaagggaaaatagcagtagcgcccggatcccctctccttccctccagatcacaccactgccgcctccgcctgcaaatccatttctagactcaagctgttgctgcgagcgagctagggttggtgctcaggtctccagggtttcgcctccccgctcccggtgcccatcgccttggaccttggcctgccgggttagggttgggtcgcagctgcgggggccgtggggcggggatgcggccgatgcggcgatcgcgggcgatcgggaggctgtagcggcggcggggcagggtatctcttgggtggattctccggcgatggccgcagacgcactatccatcatcccgggcgccgtgcttcgcaacctctctgacaagctctacgagaagcggaagaacgccgcgcttgagattgagggaattgtgaagcagcttgcaacgtttggggagcatgagaagatatcagcggttatctcgctgctcaccaacgatttcacatattcgccacaggcgaaccatcgaaagggtgggttgattggccttgcagcagttactgttggactcaccagtgaggcagctcagcatctcgagcaaattgtacctcctgtgcttacttctttcctggaccaagatagtagagtgcgttactatgcttgtgaagcgctatacaacatagcaaaagtggtaagaggggatttcatcatctacttcaacaaaatttttgatgctttatgcaagctttctgcagattccgatgctaatgttcaaagtgccgctcaccttcttgataagcttgtcaaggatatcgtaactgagagtgatcagttcagcatagaagaattcataccgctcttgagagagcgcatgaatgtgttgaacccttatgtaagacaatttttggttgggtggataacagtgttagatagtgttcctgatattgacatgcttggttttcttcctgattttcttgacggtttgttcaatatgctgagtgattccagtcatgagataaggcagcaagctgatgcagcactttctgagtttcttcaggagataaagaactcaccaaatgtagattatggtcgtatggctgaaatactcgttcggagggcaggctctactgatgaattcactcggttgacatctatcacatggatcaacgagtttgtgaagcttggtggggaacaacttgttccctactatgcagatatattgggcgctgtcttaccatgcatatctgacgaggaggagaaaatccgagtggttgcacgcgaaacaaatgaggaactccgtgctataaaagctgatccagctgagggatttgatatcggagcaattctttcaatcgcaaaaagagaattgaacagtgaacatgaggccactcgaatcgaagcattgcattggttcttcactttgctggatcgatattgtgctgagttcttggcttacctgaacgatatttttgatccactcctaaatgcactttctgatccttcggacgcggttgtcctattagtattggaggttcatgcacgcatagctgaagaatctcaccacttccatcatcttgtatcctacctgatccgcaccttccacaacaaccattttgtactggagaaacgtggtgctttgatagtccgtcggctctgtgttcttctaggtgctgaaaaagtatatcgagagttctccactattcttgagagtgaagttgatcttgatttcgcatccgtcatggttcaggttttgaatttgattttgctcacatcaactgaacttggtgagctccgctctcctcttaagaagtcgttagtggattcttgtggcaaggacttgtttcagtctttatatgcttcatggcgccactctccgatggctacgataagtttatgtttacttgctcaggcatacaatcacgcaagctgtgttattcagtcactgggagaagaagacataaatgtgaattttttggttcaattagataaattgatccgtctcttagagactccagtatttgcttacttgcgtttacagcttctcgagcctggaaaacacacttggcttctgaaaactctttacggtctcctgatgcttttgcctcaggtcaaacttctaaccagactctgttgggagagattatacatcgtggggtttatatgtttacacagcaaagtgcggccttcaagatcttgaggactcgactgaagactgtgccattcagtgaaaatcttaagcgcacatcttcagcgaatccatactctcagattctgcaagtgacggaagatggcaatagaaaccaagatatgcagaactacagtgcaatcaatttcccattccttctccagcaatttgagaacatgcagctgcagcatcgtaaccatttgaaggatcaactgcaatcccgtaaatctgcttcgactttaacattatctcaggagatacaaagatacgaagaagcgcattcctcatcgctgtcagagattaacaggcccccttcaagaacatccaaaggcattttatgatgcatttgttcttgcgatgtatgatatatttgccggaagcatcaccacatatatgttggggctttggttagtctcctcgttttttttcaaaggaggttgcatagggtacatagtgtaatcttttctatttcgttcctagattttgtcaagagatggcaattatttgttggagaaagctcgttgccacattctagtcattcttttcttagtggtttcactgctcatctggtttctgtaatttttcaattgaaggccaaatgagcaaagtagtaattggagatagaaatatgttactactgtcctatctatcgatctccaataaattagcgttgcaatgtaaattcctgttggctcgtatgatatatttattatattatttatatgccttatctttacccccattttatattattacaatatcgcatttgggtcatgaacaaatttgcgttttgagtctctttttagtaggaactatcag

SEQ ID NO: 204231 - DNA, 3001 bp, Zea Mays
caacggtaaacgttacccttgccgaagagaagggaaaatagcagtagcgcccggatcccctctccttccctccagatcacaccactgccgcctccgcctgcaaatccatttctagactcaagctgttgctgcgagcgagctagggttggtgctcaggtctccagggtttcgcctccccgctcccggtgcccatcgccttggaccttggcctgccgggttagggttgggtcgcagctgcgggggccgtggggcggggatgcggccgatgcggcgatcgcgggcgatcgggaggctgtagcggcggcggggcagggtatctcttgggtggattctccggcgatggccgcagacgcactatccatcatcccgggcgccgtgcttcgcaacctctctgacaagctctacgagaagcggaagaacgccgcgcttgagattgagggaattgtgaagcagcttgcaacgtttggggagcatgagaagatatcagcggttatctcgctgctcaccaacgatttcacatattcgccacaggcgaaccatcgaaagggtgggttgattggccttgcagcagttactgttggactcaccagtgaggcagctcagcatctcgagcaaattgtacctcctgtgcttacttctttcctggaccaagatagtagagtgcgttactatgcttgtgaagcgctatacaacatagcaaaagtggtaagaggggatttcatcatctacttcaacaaaatttttgatgctttatgcaagctttctgcagattccgatgctaatgttcaaagtgccgctcaccttcttgataagcttgtcaaggatatcgtaactgagagtgatcagttcagcatagaagaattcataccgctcttgagagagcgcatgaatgtgttgaacccttatgtaagacaatttttggttgggtggataacagtgttagatagtgttcctgatattgacatgcttggttttcttcctgattttcttgacggtttgttcaatatgctgagtgattccagtcatgagataaggcagcaagctgatgcagcactttctgagtttcttcaggagataaagaactcaccaaatgtagattatggtcgtatggctgaaatactcgttcggagggcaggctctactgatgaattcactcggttgacatctatcacatggatcaacgagtttgtgaagcttggtggggaacaacttgttccctactatgcagatatattgggcgctgtcttaccatgcatatctgacgaggaggagaaaatccgagtggttgcacgcgaaacaaatgaggaactccgtgctataaaagctgatccagctgagggatttgatatcggagcaattctttcaatcgcaaaaagagaattgaacagtgaacatgaggccactcgaatcgaagcattgcattggttcttcactttgctggatcgatattgtgctgagttcttggcttacctgaacgatatttttgatccactcctaaatgcactttctgatccttcggacgcggttgtcctattagtattggaggttcatgcacgcatagctgaagaatctcaccacttccatcatcttgtatcctacctgatccgcaccttccacaacaaccattttgtactggagaaacgtggtgctttgatagtccgtcggctctgtgttcttctaggtgctgaaaaagtatatcgagagttctccactattcttgagagtgaagttgatcttgatttcgcatccgtcatggttcaggttttgaatttgattttgctcacatcaactgaacttggtgagctccgctctcctcttaagaagtcgttagtggattcttgtggcaaggacttgtttcagtctttatatgcttcatggcgccactctccgatggctacgataagtttatgtttacttgctcaggcatacaatcacgcaagctgtgttattcagtcactgggagaagaagacataaatgtgaattttttggttcaattagataaattgatccgtctcttagagactccagtatttgcttacttgcgtttacagcttctcgagcctggaaaacacacttggcttctgaaaactctttacggtctcctgatgcttttgcctcagactctgttgggagagattatacatcgtggggtttatatgtttacacagcaaagtgcggccttcaagatcttgaggactcgactgaagactgtgccattcagtgaaaatcttaagcgcacatcttcagcgaatccatactctcagattctgcaagtgacggaagatggcaatagaaaccaagatatgcagaactacagtgcaatcaatttcccattccttctccagcaatttgagaacatgcagctgcagcatcgtaaccatttgaaggatcaactgcaatcccgtaaatctgcttcgactttaacattatctcaggagatacaaagatacgaagaagcgcattcctcatcgctgtcagagattaacaggcccccttcaagaacatccaaaggcattttatgatgcatttgttcttgcgatgtatgatatatttgccggaagcatcaccacatatatgttggggctttggttagtctcctcgttttttttcaaaggaggttgcatagggtacatagtgtaatcttttctatttcgttcctagattttgtcaagagatggcaattatttgttggagaaagctcgttgccacattctagtcattcttttcttagtggtttcactgctcatctggtttctgtaatttttcaattgaaggccaaatgagcaaagtagtaattggagatagaaatatgttactactgtcctatctatcgatctccaataaattagcgttgcaatgtaaattcctgttggctcgtatgatatatttattatattatttatatgccttatctttacccccattttatattattacaatatcgcatttgggtcatgaacaaatttgcgttttgagtctctttttagtaggaactatcag

SEQ ID NO: 204232 - DNA, 2854 bp, Zea Mays
ccctccagatcacaccactgccgcctccgcctgcaaatccatttctagactcaagctgttgctgcgagcgagctagggttggtgctcaggtctccagggtttcgcctccccgctcccggtgcccatcgccttggaccttggcctgccgggttagggttgggtcgcagctgcgggggccgtggggcggggatgcggccgatgcggcgatcgcgggcgatcgggaggctgtagcggcggcggggcagggtatctcttgggtggattctccggcgatggccgcagacgcactatccatcatcccgggcgccgtgcttcgcaacctctctgacaagctctacgagaagcggaagaacgccgcgcttgagattgagggaattgtgaagcagcttgcaacgtttggggagcatgagaagatatcagcggttatctcgctgctcaccaacgatttcacatattcgccacaggcgaaccatcgaaagggtgggttgattggccttgcagcagttactgttggactcaccagtgaggcagctcagcatctcgagcaaattgtacctcctgtgcttacttctttcctggaccaagatagtagagtgcgttactatgcttgtgaagcgctatacaacatagcaaaagtggtaagaggggatttcatcatctacttcaacaaaatttttgatgctttatgcaagctttctgcagattccgatgctaatgttcaaagtgccgctcaccttcttgataagcttgtcaaggatatcgtaactgagagtgatcagttcagcatagaagaattcataccgctcttgagagagcgcatgaatgtgttgaacccttatgtaagacaatttttggttgggtggataacagtgttagatagtgttcctgatattgacatgcttggttttcttcctgattttcttgacggtttgttcaatatgctgagtgattccagtcatgagataaggcagcaagctgatgcagcactttctgagtttcttcaggagataaagaactcaccaaatgtagattatggtcgtatggctgaaatactcgttcggagggcaggctctactgatgaattcactcggttgacatctatcacatggatcaacgagtttgtgaagcttggtggggaacaacttgttccctactatgcagatatattgggcgctgtcttaccatgcatatctgacgaggaggagaaaatccgagtggttgcacgcgaaacaaatgaggaactccgtgctataaaagctgatccagctgagggatttgatatcggagcaattctttcaatcgcaaaaagagaattgaacagtgaacatgaggccactcgaatcgaagcattgcattggttcttcactttgctggatcgatattgtgctgagttcttggcttacctgaacgatatttttgatccactcctaaatgcactttctgatccttcggacgcggttgtcctattagtattggaggttcatgcacgcatagctgaagaatctcaccacttccatcatcttgtatcctacctgatccgcaccttccacaacaaccattttgtactggagaaacgtggtgctttgatagtccgtcggctctgtgttcttctaggtgctgaaaaagtatatcgagagttctccactattcttgagagtgaagttgatcttgatttcgcatccgtcatggttcaggttttgaatttgattttgctcacatcaactgaacttggtgagctccgctctcctcttaagaagtcgttagtggattcttgtggcaaggacttgtttcagtctttatatgcttcatggcgccactctccgatggctacgataagtttatgtttacttgctcaggcatacaatcacgcaagctgtgttattcagtcactgggagaagaagacataaatgtgaattttttggttcaattagataaattgatccgtctcttagagactccagtatttgcttacttgcgtttacagcttctcgagcctggaaaacacacttggcttctgaaaactctttacggtctcctgatgcttttgcctcagcaaagtgcggccttcaagatcttgaggactcgactgaagactgtgccattcagtgaaaatcttaagcgcacatcttcagcgaatccatactctcagattctgcaagtgacggaagatggcaatagaaaccaagatatgcagaactacagtgcaatcaatttcccattccttctccagcaatttgagaacatgcagctgcagcatcgtaaccatttgaaggatcaactgcaatcccgagatacaaagatacgaagaagcgcattcctcatcgctgtcagagattaacaggcccccttcaagaacatccaaaggcattttatgatgcatttgttcttgcgatgtatgatatatttgccggaagcatcaccacatatatgttggggctttggttagtctcctcgttttttttcaaaggaggttgcatagggtacatagtgtaatcttttctatttcgttcctagattttgtcaagagatggcaattatttgttggagaaagctcgttgccacattctagtcattcttttcttagtggtttcactgctcatctggtttctgtaatttttcaattgaaggccaaatgagcaaagtagtaattggagatagaaatatgttactactgtcctatctatcgatctccaataaattagcgttgcaatgtaaattcctgttggctcgtatgatatatttattatattatttatatgccttatctttacccccattttatattattacaatatcgcatttgggtcatgaacaaatttgcgttttgagtctctttttagtaggaactatcag

SEQ ID NO: 204233 - DNA, 2320 bp, Zea Mays
cactgaggagtgctactcagaccacaaccaaaaccaaaatgtagattatggtcgtatggctgaaatactcgttcggagggcaggctctactgatgaattcactcggttgacatctatcacatggatcaacgagtttgtgaagcttggtggggaacaacttgttccctactatgcagatatattgggcgctgtcttaccatgcatatctgacgaggaggagaaaatccgagtggttgcacgcgaaacaaatgaggaactccgtgctataaaagctgatccagctgagggatttgatatcggagcaattctttcaatcgcaaaaagagaattgaacagtgaacatgaggccactcgaatcgaagcattgcattggttcttcactttgctggatcgatattgtgctgagttcttggcttacctgaacgatatttttgatccactcctaaatgcactttctgatccttcggacgcggttgtcctattagtattggaggttcatgcacgcatagctgaagaatctcaccacttccatcatcttgtatcctacctgatccgcaccttccacaacaaccattttgtactggagaaacgtggtgctttgatagtccgtcggctctgtgttcttctaggtgctgaaaaagtatatcgagagttctccactattcttgagagtgaagttgatcttgatttcgcatccgtcatggttcaggttttgaatttgattttgctcacatcaactgaacttggtgagctccgctctcctcttaagaagtcgttagtggattcttgtggcaaggacttgtttcagtctttatatgcttcatggcgccactctccgatggctacgataagtttatgtttacttgctcaggcatacaatcacgcaagctgtgttattcagtcactgggagaagaagacataaatgtgaattttttggttcaattagataaattgatccgtctcttagagactccagtatttgcttacttgcgtttacaggtaacttggtctgataatccgttcctgcaaatttatctttctgtttctcaggcacatttgaattccgaaacttggagagttctacctggcttttttaatttgatttctagtgctacattaatggcatgataagcctggaccaatctttgtctcatgctgtttatctgtagttctgtacatttactgtatgctcgccttttggtacaatgtttccagactattgctatcccctaatgattccacattcagtttggatgctgtaaaactaacatgttggggtttatgtgacgcaacatgatatgaaaactgtgatgacttgttggcaaaaaaaaactctagtacagagacttttgttgttatatcttcttactgatcattttggcatggaaattccacaacatgctcttaaaaatctgcagcttctcgagcctggaaaacacacttggcttctgaaaactctttacggtctcctgatgcttttgcctcagcaaagtgcggccttcaagatcttgaggactcgactgaagactgtgccattcagtgaaaatcttaagcgcacatcttcagcgaatccatactctcagattctgcaagtgacggaagatggcaatagaaaccaagatatgcagaactacagtgcaatcaatttcccattccttctccagcaatttgagaacatgcagctgcagcatcgtaaccatttgaaggatcaactgcaatcccgtaaatctgcttcgactttaacattatctcaggagatacaaagatacgaagaagcgcattcctcatcgctgtcagagattaacaggcccccttcaagaacatccaaaggcattttatgatgcatttgttcttgcgatgtatgatatatttgccggaagcatcaccacatatatgttggggctttggttagtctcctcgttttttttcaaaggaggttgcatagggtacatagtgtaatcttttctatttcgttcctagattttgtcaagagatggcaattatttgttggagaaagctcgttgccacattctagtcattcttttcttagtggtttcactgctcatctggtttctgtaatttttcaattgaaggccaaatgagcaaagtagtaattggagatagaaatatgttactactgtcctatctatcgatctccaataaattagcgttgcaatgtaaattcctgttggctcgtatgatatatttattatattatttatatgccttatctttacccccattttatattattacaatatcgcatttgggtcatgaacaaatttgcgttttgagtctctttttagtaggaactatcag

SEQ ID NO: 204234 - DNA, 1969 bp, Zea Mays
atttccttttaaaagaaacactagcaaagactataacatgtgctcgtctattttcaaaatgcatctggggatacgactacgacctcgagccataagaggtcgacaacaaaagagggtttttccatatatcaatcttcttgttgtgtttccatacatcaacctagcttcttgcgttttttctttcttctcaagaatatcgcaacaatacaaggggttcctgaatagtaaaaatcgcatggcaaatgcagataaaaaaccggatggagcgaggcaaatgtggagttgacgtgaaaaaagagcagagatgatgaatatatagagtgcggtccatgcatgcatcatcgactgtcaggcaatttctgatccattgagatacttaggaacagtgaggatcgtccgactccccggcgtggagctcgtcatcgatcgtcgctcagctagtatatatggcaagcaggacgacaggcggcgcatggtcgatggaggcggtgacgctgccggcgagcatggtgctggtgcaggtcttcaccatggtcgccgtgctcctctccaagctggcgctgaacgtggggatggagcccttcgtcctcctcgcctaccgcaacctcatcggcgccatcatcgtcgctcccttggccttctactttgacagggcgatggtgcgaaaggtgaccctcaaggcctttgggtggatgtccatcagcgcgctcctcgggatcgttctcgccatgggtctctactactacggcctccgcgccaccaacgccgccatctccatcaacttcctcaacctcatccccgtcgtcaccttcctcatggccgtgctgctccgcgtcgagaagctggcggcggggacgcgggcgggccgtgccaagctggccggcacggccgtgtgcgtggggggcaccatggtggccagcctctacaggggcccgctgctgcacccgtggccgacgcacctgctccaccacgccgccgccacggccccgcaccaccaccgcaacatgccgctcggcaccgtcttcctgtgcgccagctgcctggcctacgcgctctggttcatcgtgcaggcccgcgtcggcagggagttcccctgcaagtacatgtccacgctgctggcctgcgtctccggcaccgtccaggcgctcgccatcgcggccgtcatccgcgggggcgaccgggactcgtggctcctctcctgggacctgcgcctcctcaccgtcgtctactcgggggtcttcaacaccgccgccaccttctgcctcatctcctgggccatcgccaggcgagggcccatctacccctccatgttcaactccctctcgctcgtcgccaccaccgtgctcgactcgctgctgctcggcaccgacgtgtccgtcggcagcctgctaggcgccctgctcatcgtactcggactctacgccttcctctggggcaaaagcacagagatgaggcacctcaaacagcagcagcagcagcagcccaacgccaacgggacgacgaccacgacgaccaacgccgccgaagaccacgtctagcaactaaatgcatgcagtatgcatggtaaataaatcaaattgagcagctagctagaactagctagatcgaaggagtaaattcgatcgatcgatcggccgatctcatcatgcatgtactcctacgtagacagacacacacaaattaagagacacacagggatcggagagagagacgcaaatgtcaatctcgtaagccagaaaatgaaacactagtcacccctatcctatcctatcatatcaggtttcataggtcaagcatagactgtattaattactttattgtcttctagaaagaggtattcttgttgggaattgtattaagatatcatgtgttgtagacttgtagtatactagtacttgttagtattttacgcgtttggccaaaatagttaataattctaaaaaaacttgcttcattctagtacttgcgc

SEQ ID NO: 204235 - DNA, 1931 bp, Zea Mays
aaaagaaacactagcaaagactataacatgtgctcgtctattttcaaaatgcatctggggatacgactacgacctcgagccataagaggtcgacaacaaaagagggtttttccatatatcaatcttcttgttgtgtttccatacatcaacctagcttcttgcgttttttctttcttctcaagaatatcgcaacaatacaaggggttcctgaatagtaaaaatcgcatggcaaatgcagataaaaaaccggatggagcgaggcaaatgtggagttgacgtgaaaaaagagcagagatgatgaatatatagagtgcggtccatgcatgcatcatcgactgtcaggaacagtgaggatcgtccgactccccggcgtggagctcgtcatcgatcgtcgctcagctagtatatatggcaagcaggacgacaggcggcgcatggtcgatggaggcggtgacgctgccggcgagcatggtgctggtgcaggtcttcaccatggtcgccgtgctcctctccaagctggcgctgaacgtggggatggagcccttcgtcctcctcgcctaccgcaacctcatcggcgccatcatcgtcgctcccttggccttctactttgacagggcgatggtgcgaaaggtgaccctcaaggcctttgggtggatgtccatcagcgcgctcctcgggatcgttctcgccatgggtctctactactacggcctccgcgccaccaacgccgccatctccatcaacttcctcaacctcatccccgtcgtcaccttcctcatggccgtgctgctccgcgtcgagaagctggcggcggggacgcgggcgggccgtgccaagctggccggcacggccgtgtgcgtggggggcaccatggtggccagcctctacaggggcccgctgctgcacccgtggccgacgcacctgctccaccacgccgccgccacggccccgcaccaccaccgcaacatgccgctcggcaccgtcttcctgtgcgccagctgcctggcctacgcgctctggttcatcgtgcaggcccgcgtcggcagggagttcccctgcaagtacatgtccacgctgctggcctgcgtctccggcaccgtccaggcgctcgccatcgcggccgtcatccgcgggggcgaccgggactcgtggctcctctcctgggacctgcgcctcctcaccgtcgtctactcgggggtcttcaacaccgccgccaccttctgcctcatctcctgggccatcgccaggcgagggcccatctacccctccatgttcaactccctctcgctcgtcgccaccaccgtgctcgactcgctgctgctcggcaccgacgtgtccgtcggcagcctgctaggcgccctgctcatcgtactcggactctacgccttcctctggggcaaaagcacagagatgaggcacctcaaacagcagcagcagcagcagcccaacgccaacgggacgacgaccacgacgaccaacgccgccgaagaccacgtctagcaactaaatgcatgcagtatgcatggtaaataaatcaaattgagcagctagctagaactagctagatcgaaggagtaaattcgatcgatcgatcggccgatctcatcatgcatgtactcctacgtagacagacacacacaaattaagagacacacagggatcggagagagagacgcaaatgtcaatctcgtaagccagaaaatgaaacactagtcacccctatcctatcctatcatatcaggtttcataggtcaagcatagactgtattaattactttattgtcttctagaaagaggtattcttgttgggaattgtattaagatatcatgtgttgtagacttgtagtatactagtacttgttagtattttacgcgtttggccaaaatagttaataattctaaaaaaacttgcttcattctagtacttgcgc

SEQ ID NO: 204236 - DNA, 2004 bp, Zea Mays
tagaaggctaaaagctgtctccggttcacctggcatgcaattacctatggctgcataccttggagagcttgttctaagcaatgatgttaaggtacttgtggcacaaaaggctggctccacactagtcaatatcatgaaaaaagggaatagagaggccagagaagcagctttgaaggcattgaaccaaatttcatcttatgatgttagtgcaaagatattaattgaagccggtattcttccgcctctcatcacagacctctttactgttggcagtaatcagcttccaatgagattgaaggaggtctcagcgaccattcttgcaaatgttgtggcatcgggtgcacgttttgagtccattccacttgatcataataggcagaccttggtgtctgaagacattgtacacaatctgcttcatctcataagcaacactggacctgcaattgagtgtaagttgctccaggttttcgttggtctaactgactcttcgacatctgtacaaaatatagttgatgctatcaaaagttcaggtgctattgtcagtttaattcagtttgttgaagcacctcaaagggaagtacgcatgaattccatcaagctcttgaataacatatcaccttatatgggtcaagaacttgctgatgcttttcgtggaaacttcagtcaactaagcagcttggtcaaggtaattgtcgataacaatggtatttctgaagagcaagcagctgctgctggccttgtagctgatcttcccatgggggactcagtcctcaccagacgtcttcttcaagatggggcattcgcagcaatcatttcaaaagttttaagaatccgacaaggggagattcgtggggggcgttttgttaacccattcctcgaaggtctggttagaatagtctcccggatcacatttgtcttggatgatgatccggatatcattgctgttgctcgtgattacaatcttgcttcactcttcactgatctgcttcagatgaatgggcttgacgtagtccagattgtctctgctgtttcactagagaaactctcgcagcagtcaaaacatcttacgaagatactgcctgctcccagcccagggctgtgcttttcaatatttccatgcctcagccagaagactgtagcaactggggtctgtagagttcactgtgggatttgttccgcaagggagagcttctgtctcttggaggggaaggcagtggagaagttagttgcctgcttggataataataacgagaaagtagtcgaagctgctctagcagcgctgtccactttactggaggatggagtggacattgaacaaggtgtcatggtgctgtgtgatgcagaaggaatcaacccgatactcgcggtattgtgcgagaacagaaacgaggcactgcgccagagagcggtgtgggcagtggagagaatcctgaggacggacgaaatagcgtatgagatatctggaaaccagaatgttggtacagccttggtggaggcattcaggcatggcgactctaggacaagacaagttgcagagcgagcattgaagcatgtagataagttgcccaatttctctgggatattttctaagatgggagcacaatgaccacgttccatggaagtactcgtgttctatttgacatgaggcaggcgcagatgaacacttgtgttcccagcaggccttcattggttttgctgactcgcactccagctagatgttgtagcgatctgattggtggaagaagaattaagtattgcacgtgttgtatagtgtgtatttgtacctgtagacttgtctgtactttcgagattggtcagattcatagaataggttgctatccctgttgtgtggagacaatacataatgcataaccgccagcactgggtggaaaaaaaagggaagaaatgtgaagtcgttgcgtcagatatgacatggttttctggtgtatgtcttaatgtctacagaggcaaagtgcaaaggactgtttggttcgctgtctaact

SEQ ID NO: 204237 - DNA, 3264 bp, Zea Mays
gctgtctctggattccggagtcattctacgacgcctgcctctgcagactgcagtccgagtccaggggagccgcgtccggtccgcgggttgccttctcttgcttacttgctagctcctcgtcgcagtagcggcagcggacgagcagtcgagcgcaacgccgccaatcattccttcctctgccttcctctctccctccccctcccggcgccatctcgacgctcggccccccgcgggcgggatccgtcgccacagatccgctgcctgacctgaccgcccctcatgctcgggtagcgcttttcagtttcccccgttccccgtgggccactcgacccgccgacggagcggaagggcggccccggccgtgaccgcggcgcgactcgcgaccctcccagtcccagaagcggcgtgcggcgaccgggaccggctgctggtggtgaattcgcgccggcgaactgaattcaagcggcgaatcccctcctctggtcctgtctcgagccctcggcgtccgcgcctcctccgtctcgccgccgttctcgacgcccgccgatccaacaccgggtctgcccaacagcccaagtgtttcactagtgatggcagaagtccaggatggtcattatgattcaatgtcacaggccactgatagcttgcgtgttgaacctatatatgagtcgttcctatgcccgcttaccaaacagtggaaggaggcttgtctgccctgtaactaagatggagctcagcaacactgagttaaatccaagcatagctctgaggaacactattgatgaatggatgaatcgcaacgaggcggccaaacttgacgtcgctcgtaagtcattgacttctgacagcacagaaagtgatatcctacaagcactccagtatgttgatgagatatgtcagagaagtcgatctaacaggcaggttgtgagaagagatgggttgataatcatgattgctgacttgttgaagaatagcagtacgaaagtacgccaagcggcactagggactctttgctccattgcaaaagatgacaatgaaaataaggttgagattgccgctggagacaatattcgcacaattgtaaagttcttaaatcatgggcagactcaggaaaaggagcaagcggtgtcactgttgtttgaactttcagaaaataaggctctttcagaaagaattggcagtgtttctggagctattcttatacttgttggtttgtcaagcagtaaagtagaaaacttgctcattgttgacagagctgagaagacattggaaaatttagagagctgtgaaaaaaatgttagacagatggctgaaaatggacgattgcaacccctcctgaggctgcttcttgatggttcacctggcatgcaattacctatggctgcataccttggagagcttgttctaagcaatgatgttaaggtacttgtggcacaaaaggctggctccacactagtcaatatcatgaaaaaagggaatagagaggccagagaagcagctttgaaggcattgaaccaaatttcatcttatgattaatcagcttccaatgagattgaaggaggtctcagcgaccattcttgcaaatgttgtggcatcgggtgcacgttttgagtccattccacttgatcataataggcagaccttggtgtctgaagacattgtacacaatctgcttcatctcataagcaacactggacctgcaattgagtgtaagttgctccaggttttcgttggtctaactgactcttcgacatctgtacaaaatatagttgatgctatcaaaagttcaggtgctattgtcagtttaattcagtttgttgaagcacctcaaagggaagtacgcatgaattccatcaagctcttgaataacatatcaccttatatgggtcaagaacttgctgatgcttttcgtggaaacttcagtcaactaagcagcttggtcaaggtaattgtcgataacaatggtatttctgaagagcaagcagctgctgctggccttgtagctgatcttcccatgggggactcagtcctcaccagacgtcttcttcaagatggggcattcgcagcaatcatttcaaaagttttaagaatccgacaaggggagattcgtggggggcgttttgttaacccattcctcgaaggtctggttagaatagtctcccggatcacatttgtcttggatgatgatccggatatcattgctgttgctcgtgattacaatcttgcttcactcttcactgatctgcttcagatgaatgggcttgacgtagtccagattgtctctgctgtttcactagagaaactctcgcagcagtcaaaacatcttacgaagatactgcctgctcccagcccagggctgtgcttttcaatatttccatgcctcagccagaagactgtagcaactggggtctgtagagttcactgtgggatttgttccgcaagggagagcttctgtctcttggaggggaaggcagtggagaagttagttgcctgcttggataataataacgagaaagtagtcgaagctgctctagcagcgctgtccactttactggaggatggagtggacattgaacaaggtgtcatggtgctgtgtgatgcagaaggaatcaacccgatactcgcggtattgtgcgagaacagaaacgaggcactgcgccagagagcggtgtgggcagtggagagaatcctgaggacggacgaaatagcgtatgagatatctggaaaccagaatgttggtacagccttggtggaggcattcaggcatggcgactctaggacaagacaagttgcagagcgagcattgaagcatgtagataagttgcccaatttctctgggatattttctaagatgggagcacaatgaccacgttccatggaagtactcgtgttctatttgacatgaggcaggcgcagatgaacacttgtgttcccagcaggccttcattggttttgctgactcgcactccagctagatgttgtagcgatctgattggtggaagaagaattaagtattgcacgtgttgtatagtgtgtatttgtacctgtagacttgtctgtactttcgagattggtcagattcatagaataggttgctatccctgttgtgtggagacaatacataatgcataaccgccagcactgggtggaaaaaaaagggaagaaatgtgaagtcgttgcgtcagatatgacatggttttctggtgtatgtcttaatgtctacagaggcaaagtgcaaaggactgtttggttcgctgtctaact

SEQ ID NO: 204238 - DNA, 474 bp, Zea Mays
gcctataaaacacctcgtcccgtgcctccatcaggcatccaagctcaaagcaagcagatctaagctccaggcagcgtcgcgacagagtgagctagtgagtagcacgacaacaacaatggcttccctgaaggccgcgaagcccagcggagttgcggcgcagggcaaggagccggcgcccaagctcagcgagacggcgacgaagccgtcagccgcgaagagcggcggcgttaagaaggctgagcagaagccccgggaaaccaaaaggaaggtgaagagcagcaaacaggcggcggcggccaaaaagtgacgtacagtacgtgtggagtgtaatggagcttccatgcatgagtgaatccatgccatgttatgaatctagtccttcctttcttgtatcttccatgtgacgcggcgtgtgcgtcccctcatgtgtgatgatgccagatgaatactacaaataagacgttgttgtgaaaa

SEQ ID NO: 204239 - DNA, 1493 bp, Zea Mays
gacgaaaaaaacgaattaatatttgtggtcataaaattcatgagatcctgttgatgacgtcgaacacaaatgagcagctgattcatgtgtaataatagcgctgtaggatcggaggagcatgtgcaaaaaacatggcaaacttttctataagattgcaaaactgtgttgtgcttgtatgtgctgagctttggattgggtacttctcttctctccaccatagctgaagcctcggattgcaggttgcagccatgccaatgacaatcgagcgtgatctccacatggccacagggaacggagaaactagctacacgaaaaactctaggattcaggagaaagttatgtttcagatcaagccagtccttgaggaggccactagagcagcatactcagctctcctccctcgaactatggtcgtggccgacttaggctgctcatcggggcctaacacactgcgcttcgtctccgaggtgattggcatcatagctcgccattgcaaagaacacgaccgacgacatgactacccacaacttcagttcttcctgaatgacctgccgggaaacgacttcaacaatctcttcctgctcatccagcagttcaataagtcgatggcaagaaaccacaagggcatcagaacaactgaaggacaccaaaaataaatgcctagatatctacatcacaaagaatatgccaccgtcgatggtgaagttgtttcaacagcagtttgagaaggacttctccctcttcctcaagctacgctacgaggaactcgtgtctggtggccaaatggttctaacatttattggaaggaagcatgaggatgtgttcactagagagcccaaccatcttcacggattgcttgcgcagtcactgaaatccctagttgatgagggtcttgtggagaaagaaaaacttgagtcattctatcttccgttctactcaccatcggttggtgaagtggaggcgattttgaagcaagttgggttgttcaacatgaatcatgttaaagtatttgagataaattgggatccctacgatgactcggaaagtgatgatgtgcataacagtatcgggagcggtgaaaatgttgctaagtgcctacgagcagttatggagtcgctggtcgcaagccaatttggagaacacatactcgacaagttattcaaagagttcgctcactgtattgccgaacaccttgagaatgaaaaaaccaagcatgttgttcttgtcctatcgatcgagaaagcaataattcatgtgtgaagtgtcttgtttctcactatctttccattattatcacatggtaatgtatgtttgttttgaatgtgcatgtttgtgtcactagtgtattgaatggcatggtgtttttgttgttttctttatcgcttctcctatattttagatgcatgaattttaaggtgatttcacgcaacactcttgcacaaggaattaatacaaataatttgctccttttatgatcttccattcatttttgt

SEQ ID NO: 204240 - DNA, 1490 bp, Zea Mays
agcaatgaacgtatcgtattatttatagtttacatcgtactcatcgcactttggcttgaccgacgaaaaaaacgaattaatatttgtggtcataaaattcatgagatcctgttgatgacgtcgaacacaaatgagcagctgattcatgtgtaataatagcgctgtaggatcggaggagcatgtgcaaaaaacatggcaaacttttctataagattgcaaaactgtgttgtgcttgttgcagccatgccaatgacaatcgagcgtgatctccacatggccacagggaacggagaaactagctacacgaaaaactctaggattcaggagaaagttatgtttcagatcaagccagtccttgaggaggccactagagcagcatactcagctctcctccctcgaactatggtcgtggccgacttaggctgctcatcggggcctaacacactgcgcttcgtctccgagttcaataagtcgatggcaagaaaccacaagggtgaggcagctgaggcactgcctccgtgctatatctctggtttgtcaggctccttctacactaggatctttcctagcgaaagcgttcaccttttccactctttgttctccgttcactggcactctcaggcatcagaacaactgaaggacaccaaaaataaatgcctagatatctacatcacaaagaatatgccaccgtcgatggtgaagttgtttcaacagcagtttgagaaggacttctccctcttcctcaagctacgctacgaggaactcgtgtctggtggccaaatggttctaacatttattggaaggaagcatgaggatgtgttcactagagagcccaaccatcttcacggattgcttgcgcagtcactgaaatccctagttgatgagggtcttgtggagaaagaaaaacttgagtcattctatcttccgttctactcaccatcggttggtgaagtggaggcgattttgaagcaagttgggttgttcaacatgaatcatgttaaagtatttgagataaattgggatccctacgatgactcggaaagtgatgatgtgcataacagtatcgggagcggtgaaaatgttgctaagtgcctacgagcagttatggagtcgctggtcgcaagccaatttggagaacacatactcgacaagttattcaaagagttcgctcactgtattgccgaacaccttgagaatgaaaaaaccaagcatgttgttcttgtcctatcgatcgagaaagcaataattcatgtgtgaagtgtcttgtttctcactatctttccattattatcacatggtaatgtatgtttgttttgaatgtgcatgtttgtgtcactagtgtattgaatggcatggtgtttttgttgttttctttatcgcttctcctatattttagatgcatgaattttaaggtgatttcacgcaacactcttgcacaaggaattaatacaaataatttgctccttttatgatcttccattcatttttgt

SEQ ID NO: 204241 - DNA, 805 bp, Zea Mays
ccacaggtcatgacacaatttgacaaataatgctgacatggagagcagaagcaaaatgtctgatgtaaatgatatatctaccgatggcaatattgagaccatgctttcagttgagaaagggttgcgtgaattggcttcactcaaggtagaggatgcaatcatgcttactttggctgaaaatcggcatgtcaaacctctctcaggccaagcttctgagggtcggagcccttccgagtcattagttaagtgcggaagagcgagaagatgtacgcttcaagcaggcatggttgacctatttctggaggcgggcgaaaaatcacaacatagaagaagatatagctgatgagaagctacagttttggatagaacaaatcaattacccagttactacgagcgaagtagtagaagtcgagagaggactccacgagctgaagaaactgggaatcgagtctcagctgtgggaggcgacgaggagagctctggatgatgatttgagcaaccacgggagtccaactggatctgaagcttagcagatgcataatgtggagcgaggctctattgccgattttgtgccgtcagaggccctagagccagccagccctcctagtcctttcctttcgcttgcttggtatcttcatgtaacatattgaacttttcctctttttttttcttcttcttttgggttatctatttttatgctagtttatccgtgaaagcaaaaggggtttaaatcgtggaggagtcgtgatgctctgctctctccatctacagcaacaaaaatattatgcattgcttgattttgcaa

SEQ ID NO: 204242 - DNA, 2172 bp, Zea Mays
gaagatccctgcccccctgaccacaaccatttcgagtatcgagagacgagaccgttacaccacccccgccttcggagcggacgaaccagcgaaccgcgcgcccccgcccatctctctctctctccctcctcctccccccaccgaatccgtccaccgaatcccctcacactcccatggatcgcttggcgcggccggcgagcccgggcggcggcgggctgggctacgcgtcgcggcggggcctctacgcgcaggcttcgtcgcatcacctggccggcggcagcgcgcagacgtcgcccggcggatccccgaaggagctgtccccagtccaccgccacgcgcgggcgggatccctcggcggcgctggggcggcctccaccgcaggccgccgcgcgggggtcggcgccggggccggcgctcgcgcgcagaacagcgccgctcgcgccgccgcgcagcgcctcgctcgggtcatgggcggcgcgggcggggacgccggaagcgggagcgacgacgacgacgactacgagctatctggtccacccatcgagctctccaacaccccgcgccgcacctccacccgatccccttccccctcggtaggccgtcaccttgcggatcagacgcaggtgggccggccgccgtcgctgaccaaccgttacacggctgggaagtcggtccccatgatcccgtcgatcaagcggccggccaccagtgggccgggggctggagctggttcagagtcgcccatgccgaaccgaagggagcagaggagatcagttgatcttggaagttcattgagagctcgtcgtacatcttcttcacttaatgatgagattaacacacttcaagtggaaaatgaaagcatgtatgacaaacttcagcttgcagaagaaaggtttgatgatggagatgccaaatccatgcacatggagagagaggattctgatgctggcgatgcagcagaaacagagccaattttgattaacaggaaagatgcagcgctagaacaaagaaagattgctatgagaattgcttcgcgaaggtccagcagtgcaagctgtaatgagattgcaacccttaagtcagaagcaaaggttactactaatgtggttacatctctatctcggagagtgaaaagtgctagatcagaattgagatctcttcaggcaacagctaacagaatgatcctgtcacaggaagagctggaggaggttgtgctaaagagatgttggctggcccgctactggacattatgttctaaacttgggatacattctgatattgctgaagaaaaaaaagaatactggtcctcatttgcaccgcttgcgcttgaagcagtcctatcaattgggcaaaaggcaagagatggaactttatcagataatgctgacatggagagcagaagcaaaatgtctgatgtaaatgatatatctaccgatggcaatattgagaccatgctttcagttgagaaagggttgcgtgaattggcttcactcaaggtagaggatgcaatcatgcttactttggctgaaaatcggcatgtcaaacctctctcaggtggcttttccaaaatgccaagcttctgagggtcggagcccttccgagtcattagttaagtgcggaagagcgagaagatgtacgcttcaagcaggcatggttgacctatttctggaggcgggcgaaaaatcacaacatagaagaagatatagctgatgagaagctacagttttggatagaacaaatcaattacccagttactacgagcgaagtagtagaagtcgagagaggactccacgagctgaagaaactgggaatcgagtctcagctgtgggaggcgacgaggagagctctggatgatgatttgagcaaccacgggagtccaactggatctgaagcttagcagatgcataatgtggagcgaggctctattgccgattttgtgccgtcagaggccctagagccagccagccctcctagtcctttcctttcgcttgcttggtatcttcatgtaacatattgaacttttcctctttttttttcttcttcttttgggttatctatttttatgctagtttatccgtgaaagcaaaaggggtttaaatcgtggaggagtcgtgatgctctgctctctccatctacagcaacaaaaatattatgcattgcttgattttgcaa

SEQ ID NO: 204243 - DNA, 2173 bp, Zea Mays
ggggcatagacgccgcagaagatccctgcccccctgaccacaaccatttcgagtatcgagagacgagaccgttacaccacccccgccttcggagcggacgaaccagcgaaccgcgcgcccccgcccatctctctctctctccctcctcctccccccaccgaatccgtccaccgaatcccctcacactcccatggatcgcttggcgcggccggcgagcccgggcggcggcgggctgggctacgcgtcgcggcggggcctctacgcgcaggcttcgtcgcatcacctggccggcggcagcgcgcagacgtcgcccggcggatccccgaaggagctgtccccagtccaccgccacgcgcgggcgggatccctcggcggcgctggggcggcctccaccgcaggccgccgcgcgggggtcggcgccggggccggcgctcgcgcgcagaacagcgccgctcgcgccgccgcgcagcgcctcgctcgggtcatgggcggcgcgggcggggacgccggaagcgggagcgacgacgacgacgactacgagctatctggtccacccatcgagctctccaacaccccgcgccgcacctccacccgatccccttccccctcggtaggccgtcaccttgcggatcagacgcaggtgggccggccgccgtcgctgaccaaccgttacacggctgggaagtcggtccccatgatcccgtcgatcaagcggccggccaccagtgggccgggggctggagctggttcagagtcgcccatgccgaaccgaagggagcagaggagatcagttgatcttggaagttcattgagagctcgtcgtacatcttcttcacttaatgatgagattaacacacttcaagtggaaaatgaaagcatgtatgacaaacttcagcttgcagaagaaaggtttgatgatggagatgccaaatccatgcacatggagagagaggattctgatgctggcgatgcagcagaaacagagccaattttgattaacaggaaagatgcagcgctagaacaaagaaagattgctatgagaattgcttcgcgaaggtccagcagtgcaagctgtaatgagattgcaacccttaagtcagaagcaaaggttactactaatgtggttacatctctatctcggagagtgaaaagtgctagatcagaattgagatctcttcaggcaacagctaacagaatgatcctgtcacaggaagagctggaggaggttgtgctaaagagatgttggctggcccgctactggacattatgttctaaacttgggatacattctgatattgctgaagaaaaaaaagaatactggtcctcatttgcaccgcttgcgcttgaagcagtcctatcaattgggcaaaaggcaagagatggaactttatcagataatgctgacatggagagcagaagcaaaatgtctgatgtaaatgatatatctaccgatggcaatattgagaccatgctttcagttgagaaagggttgcgtgaattggcttcactcaaggtagaggatgcaatcatgcttactttggctgaaaatcggcatgtcaaacctctctcaggccaagcttctgagggtcggagcccttccgagtcattagttaagtgcggaagagcgagaagatgtacgcttcaagcaggcatggttgacctatttctggaggcgggcgaaaaatcacaacatagaagaagatatagctgatgagaagctacagttttggatagaacaaatcaattacccagttactacgagcgaagtagtagaagtcgagagaggactccacgagctgaagaaactgggaatcgagtctcagctgtgggaggcgacgaggagagctctggatgatgatttgagcaaccacgggagtccaactggatctgaagcttagcagatgcataatgtggagcgaggctctattgccgattttgtgccgtcagaggccctagagccagccagccctcctagtcctttcctttcgcttgcttggtatcttcatgtaacatattgaacttttcctctttttttttcttcttcttttgggttatctatttttatgctagtttatccgtgaaagcaaaaggggtttaaatcgtggaggagtcgtgatgctctgctctctccatctacagcaacaaaaatattatgcattgcttgattttgcaa

SEQ ID NO: 204244 - DNA, 681 bp, Zea Mays
actcaccggctgagtcagcttcaatctcacctgtgacctgtacactcccagatcagacggttcacgtacgacgcgacaagatccaagaactcgctcgcgcgcacggacagggccggaacccagggatcgagactgaacagcagtccgagacgccatgaacgtggaggaggaggtcgggaggctcaaggaggagatccataggctcggccagcagcagcccgatggctcttacaaggtcaagtttggcgtcctcttcaacgacgaccggtgtgcaaatatctttgaagcactagttggcaccttgagggccgccaagaagaggaagatcttgacctacgaaggcgagctgcttctgcaaggtgtccatgacaacgtggagataaccctgttgcccccacctgcagttgctgccgcttgaagcgaagagcaccaccaagttctcgattccatacaactcgtatgcttgtattctgccgtgcctatattagattctctcgaaccatttggtgttccttgaaaactgctatcgtgtgatatatgaaattgtggtgctcaagaaattgccttgcttgcatatggttgtgttgcttaataaattcaatgctggtatagcattcgtgtcatgagacatgaaaacagcagactggagttaatggccgcgggttattgacgtcttccata

SEQ ID NO: 204245 - DNA, 554 bp, Zea Mays
actcaccggctgagtcagcttcaatctcacctgtgacctgtacactcccagatcagacggttcacgtacgacggttggcaacactcacaaccaccgcaccgcacaccgcagcccaagttctcctctgcatctgaaatatcttgccacctgacgcgacagcgacaagatccaagaactcgctcgcgcgcacggacagggccggaacccagggatcgagactgaacagcagtccgagacgccatgaacgtggaggaggaggtcgggaggctcaaggaggagatccataggctcggccagcagcagcccgatggctcttacaaggtcaagtttggcgtcctcttcaacgacgaccggtgtgcaaatatctttgaagcactagttggcaccttgagggccgccaagaagaggaagatcttgacctacgaaggcgagctgcttctgcaaggtgtccatgacaacgtggagataaccctgttgcccccacctgcagttgctgccgcttgaagcgaagagcaccaccaagttctcgattccatacaactcgttcttttcag

SEQ ID NO: 204246 - DNA, 1421 bp, Zea Mays
tttgattctcgcttattagtacaacagccactaccttgacaagctggcatctgctggttacattctgctcccttcatgtggcattatggatgaaattctttgagcataagccttttgattcaagaactgtcatgggatttggagtacttaatggaatctccattgggctcctcaacttgagtcttggcttcaactctgttgggttttaccagatgactaagctggcgatcatcccgtgcactgtcatcttagagacacttttcttcaggaagaagttcagtcggagtatccagatgtccctttctgtgctccttcttggtgttggtgttgcaactgtcactgatctgcaactcaatgctgtgggatccatactctccttgctggcaattatcacgacttgcattgctcaaattatgacaaacactatccagaagaagttcaaggtctcatcgacccaactgctctaccagtcttgcccttatcaatcactgaccctgtttctcattggccccttccttgatggctttttgactaaccaaaacgtctttgcttttaattatacatcacaagttgtgtttttcattgtgttgtcatgcctgatatcggtctcagtgaacttcagcacttttcttgtgattggaaagacgtctcctgttacttaccaagtcctgggccatcttaaaacatgccttgttcttacctttggttatgttttgcttcatgacccatttagctggagaaacatacttgggatcctaattgcagtagttggaatggtcttatattcatacttctgcacagtggagacccagcataagaacactgaagtctccccacagcaggtgaaagaaagtgaggcagcccctttgatctcagactctttgagcaaagttgaaaatgggggcggtgttgttgatgacgagcctttgaaggtacccatgtggagctcaaagtattcgcgggagtgaaattttctcccgctagacggtggcatcatacaggattcagtttagtaggcagatagtagggttggaagccaacccagagtgtaatgaacatttgagttacattttttggccttttttagcgtcacgatctactactggtaaaagggtctgtttcttgggaggatcttaccttcaagattgccagatatacattgaaactagacggcagatattgtatgattgtatctggacatgttccacatcgtctaactgtaacttccaactggtacatggcatgcctatatccaaagatagatttctttttttttgtatcagaaagatccggtaagacttgcgcaaaatttgtagtactattggttcgagtttgtttctttcagttcatgttcactttaaaactttatcatgcaagttctgtatattacaagttcttgcatgcaaaggttttcctttatg

SEQ ID NO: 204247 - DNA, 3132 bp, Zea Mays
cctcgcacccaacccgcatccgcattcctcgccgcgccgccgctctaaacctcagagcctcaaaccgtcagaactcagaagtaaacccctcctagtctgtcgtctctcttcgcacgccgccaccgagaggacgaaggagcgcgcacgcgcgtgacagagtggtaagatgggaggcgggcggaagcgcgggcgcacgcagcgccgccacttcaagcagggccgcgagaacgtctggaagcacaaccctcagcgtcctcccgccggcgaaggaggagaggcgcgagaggacaatccctcgtggcagcccttcgctaccgagaacccagccttcgaggagtactacaaggagcagcaaattgtttctgaggaagagtgggatagcttcatgagcatgctccggaagccattacctgccacttttaggattaatgcgagctgtcaattttttcaagatatctgctcgcaattggaaaacgacttcaggaaatcattagagactgaggtgaccgatgatcatgaagaagatgctattcggcctttgccttggtacccgggtaatcttgcatggcatttgaacttttctcgaatgcagctgaggagaaatcaggcacttgagagttttcatgaattcttgaagcgagagaacgaagttggcaacataactaggtcccaccactgtttctgaacgtgcaacctgatcatcatattcttgatatgtgtgccgctccaggatctaaaactttccagttacttgagatgattcaccagtcaacgaagcctggactgcttccaaatgccctggtggtagctaatgatgttgatgtgcaaagatgcaatcttcttattcaccaaaccaagagaatgtgcacagctaacctgattgtgacaaatcacgaagcacaaaactttcctggttgtaatcttgcaaagttctgttcaaaaatgtgtatggatgaggcaaaggtgcagaggttggagtttgatcgcgttctttgtgacgtgccttgtagtggcgatgggactgtccgtaaggctcctgatatgtggaggaagtggaatgctggtatggggaacggacttcatcacctgcaagtggaaattgctatgcgtggtatgagcttgctcaaagtgggtgggaggatggtttattcgacatgttcaatgaaccctgttgaaaacgaaggcgttgttgctgagattttgcggagatgtggggactctgttgaacttcttgatgtttctaatgaactacctgaattagcccgtcgtcctggacttagcacctggaaggtacgggatagagggtcttggtttggtgttcatgaagatgtacctcgctacaggaagcatgtgatatcagcaagtatgtttccttctgggaaaggcagcaaagatagtggtacggggagcagcagcgttgaggtcaacacagatgtagctgatgcagacatgaaggattcaacagacatgggagagggagaacaagaaacaactgtaacaattgatgacagcaataatggtgacaatctgaaaaccgaagagggaactaaagttgattgcgagtctggtgaagtcacaactagtagtagttataaaaagttaaattctacttccatccgtacggaacattcagattacccactgcatcgctgtatgagaattgttcctcatgaccagaacagtggggcatttttcattgcagtccttcataaactctctcccctgaatgagaaccaggtggtagatggtgtcagaattgaccagaatatctcaaaagacaagactgagaaacttgagaaggatttagtatcacataaggcatcatctgaagaaaatactgtgcatcagcaagtgattgataatgcaaatgttctggatggagaacagaatagagacagggataacaaaagttcagaagataagagctcagaggattctaaggtcaatgttaatgaggcagcaaagggtcaagcaggaacaagggataggaggaggcagcaaaaccaaggcaggtggagaggggttgaccctgtgatattttttaaagatgaagtgacagtcaaaagcattgtatctttctatggtatcacagattcatttccacttgaaggtcatctggtgactagaaaccctgatactagtcatgttaagagaatatactatgtgtcaaaatctgttcaagatgttttggagctcaacataaaaattggcgaaaggctaaagatcacctcactgggcctaaagatttttgaaaggcagtcttcaaaggaaggctccccatgcacatttcggttgtcatcagagggattgccgctcctgcttccatacatcacaaaacagattctatatgcatctgcaattgacttccaacatcttttacagtacaggactattaagtttcctgatttcgtggatgcaaaatttggtgaggaagcttcagctttgcttccaggttgctgtgttgtagttttacgtgaagggcatcaggatataggatccatagctacagatccctcggccattgccattgtttgctggaaaggaaagaccaatttgtgcgtcatggtttctccgctagatggtaaagaattgcttgagaggatttctttgcgccatgggctcaaaatccccaaaggggataaagagaaacccagccaggagattgctggatcagacgagctgcttgattgtgccactgaggtggacgatcaagagtctcttcctgaaagcaaagcatctgacatcgaaatttcagatgctaaggaggctgagtagcttttgttttatgtcactacgcatattacacaggaggtagctgtatcctcgagatggctattagcttttttaagtcacttcggttgccaagggagagagatgatagcccaccacatgggaatgacagactcaaaacaccatctggtaatcgttcacggtgacacagaatctatagacttgtaacttcttggttttatttcttcgagaggatgtattgcatcgattttaatttgttgcactcaacacagaatctagtaaagattgagaaaaacattttttttgagatatctctgtgtaggttcactacgaatgctgaaatctgacattttccgaggctatctagttactatgctatat

SEQ ID NO: 204248 - DNA, 2782 bp, Zea Mays
cgaggaagcactttgcttaataaccaatattggacaccacactcttgattacttctgcatagaagtctgtcaattttttcaagatatctgctcgcaattggaaaacgacttcaggaaatcattagagactgaggtgaccgatgatcatgaagaagatgctattcggcctttgccttggtacccgggtaatcttgcatggcatttgaacttttctcgaatgcagctgaggagaaatcaggcacttgagagttttcatgaattcttgaagcgagagaacgaagttggcaacataactaggcaagaggctgttagtatggtcccaccactgtttctgaacgtgcaacctgatcatcatattcttgatatgtgtgccgctccaggatctaaaactttccagttacttgagatgattcaccagtcaacgaagcctggactgcttccaaatgccctggtggtagctaatgatgttgatgtgcaaagatgcaatcttcttattcaccaaaccaagagaatgtgcacagctaacctgattgtgacaaatcacgaagcacaaaactttcctggttgtaatcttgcaaagttctgttcaaaaatgtgtatggatgaggcaaaggtgcagaggttggagtttgatcgcgttctttgtgacgtgccttgtagtggcgatgggactgtccgtaaggctcctgatatgtggaggaagtggaatgctggtatggggaacggacttcatcacctgcaagtggaaattgctatgcgtggtatgagcttgctcaaagtgggtgggaggatggtttattcgacatgttcaatgaaccctgttgaaaacgaaggcgttgttgctgagattttgcggagatgtggggactctgttgaacttcttgatgtttctaatgaactacctgaattagcccgtcgtcctggacttagcacctggaaggtacgggatagagggtcttggtttggtgttcatgaagatgtacctcgctacaggaagcatgtgatatcagcaagtatgtttccttctgggaaaggcagcaaagatagtggtacggggagcagcagcgttgaggtcaacacagatgtagctgatgcagacatgaaggattcaacagacatgggagagggagaacaagaaacaactgtaacaattgatgacagcaataatggtgacaatctgaaaaccgaagagggaactaaagttgattgcgagtctggtgaagtcacaactagtagtagttataaaaagttaaattctacttccatccgtacggaacattcagattacccactgcatcgctgtatgagaattgttcctcatgaccagaacagtggggcatttttcattgcagtccttcataaactctctcccctgaatgagaaccaggtggtagatggtgtcagaattgaccagaatatctcaaaagacaagactgagaaacttgagaaggatttagtatcacataaggcatcatctgaagaaaatactgtgcatcagcaagtgattgataatgcaaatgttctggatggagaacagaatagagacagggataacaaaagttcagaagataagagctcagaggattctaaggtcaatgttaatgaggcagcaaagggtcaagcaggaacaagggataggaggaggcagcaaaaccaaggcaggtggagaggggttgaccctgtgatattttttaaagatgaagtgacagtcaaaagcattgtatctttctatggtatcacagattcatttccacttgaaggtcatctggtgactagaaaccctgatactagtcatgttaagagaatatactatgtgtcaaaatctgttcaagatgttttggagctcaacataaaaattggcgaaaggctaaagatcacctcactgggcctaaagatttttgaaaggcagtcttcaaaggaaggctccccatgcacatttcggttgtcatcagagggattgccgctcctgcttccatacatcacaaaacagattctatatgcatctgcaattgacttccaacatcttttacagtacaggactattaagtttcctgatttcgtggatgcaaaatttggtgaggaagcttcagctttgcttccaggttgctgtgttgtagttttacgtgaagggcatcaggatataggatccatagctacagatccctcggccattgccattgtttgctggaaaggaaagaccaatttgtgcgtcatggtttctccgctagatggtaaagaattgcttgagaggatttctttgcgccatgggctcaaaatccccaaaggggataaagagaaacccagccaggagattgctggatcagacgagctgcttgattgtgccactgaggtggacgatcaagagtctcttcctgaaagcaaagcatctgacatcgaaatttcagatgctaaggaggctgagtagcttttgttttatgtcactacgcatattacacaggaggtagctgtatcctcgagatggctattagcttttttaagtcacttcggttgccaagggagagagatgatagcccaccacatgggaatgacagactcaaaacaccatctggtaatcgttcacggtgacacagaatctatagacttgtaacttcttggttttatttcttcgagaggatgtattgcatcgattttaatttgttgcactcaacacagaatctagtaaagattgagaaaaacattttttttgagatatctctgtgtaggttcactacgaatgctgaaatctgacattttccgaggctatctagttactatgctatat

SEQ ID NO: 204249 - DNA, 2876 bp, Zea Mays
tgacccgcacgtgaggcgccctcctccccaaccgaaaagtctacagaggataaggagctcgccgctcttccagtcccacagctaggggagggaaacaaacacccaaatcaaacccgcgcgtcgccagccgcagcaccaatggcgtgcgtcgccgcgctcttcgcctccccggcgctcctccccttcccctccaccacctcgtccatggcctcctgctcgtgccgcctccgccccgccgtcgtcgcccgcgcgccgcgccagcagccgcggggccggcgcgcgctccggcgcttcgatgaggtggaaggggtgtcgaagaaacggcgcggcatcggaggcggtggcggcgtcggcgctggcgggtcgcagccgtcgtcctcgcgcagggatagggggctttccgtcgatttcaaggagccgcaggttgctgagtttgatgatcttgaagaggacaaattccttaatgctgtcgtcaaggtctattgcactcatatcgcacccgattatggtcttccttggcagaagcaaaggcaacattcaagtagtgggagtgcttttatgattggggatggtaaactcttgacaaatgcgcattgcgttgagcacgacacccaggtcaaagtaaagagaaggggagatgacaaaaaatatattgccaaggttttagctaggggtgttgaatgcgatcttgcgttgctatctgttgagaatgaagagttctggagaggaacagaggcacttcattttggtcgtttgccatgccttcaggattcagtaactgttgtgggatatcctcttggtggagacactatatctgtaacaaaaggcgttgtgtcgcgcattgaggtcactccatatgcacatggaacatcagatcttcttggcattcaaattgacgcagccataaatcctggaaacagtgggggaccagcctttaatgatcaaggggagtgcattggtgtggcatttcaggtgtacaggtcagatgaagctgaaaatattggatatgttattccaactacagttgtatcccatttcttaaatgactatcagaaaaatggaaagtacacaggatttccatgtttgggtgtcttacttcagaaattggaaaatccggcattgcgtgaaagcttaaaagtaccttcaagcgagggtgttcttgttcgtcgggtggaacctactgctccagcaagcagtgttttgcgaaagggagatgtaattgttagctttgatggtatcgcagtaggatgtgaagcaacagtaccatttcggtccacagaacggattgctttccgctatctcacaagccaaaagtatgcaggcgatattgcccagctaggaatcattcgtgatggcaattccatgaaagtccagactattttgcagccaagaaaacatttagtgccgtttcatgttgaggggggacaaccttcttatctgattgttgctggccttgtcttcacacctttaacagaaccatttatagaggaggaatgcgaagatacactagggctgaaattgttagcaaaagcacgttactctctagcaacctttgagggggaggaaattgttattgtgtcgcaggttttggcgcacgaggtcaacattgggtatgagcacatgggcaatcaacaagtcatgaaactaaacggaaccacaataaagaatatccatcaccttgctcatcttgtggacacctgtaaagacaagttcctgacgttcgaattcgaagacgacttccttgttgttttgcatcgagaagaagcggatgctgcatcatcggacattctcaaggaacatgccataccgtccatacggtcatctgatctatcagaaccatatgcagaagcaaacaataacgagatacagaaaacaagcgaggattttggtgaaagtcctgtcacaaactttgagatggggatcgattgtctcttgtgggcatgatcgttctcttttaatggatgagctactgaggatgaagtttcagctaaatctgcagtagtgaaatgcaagcatctgccggcgaacaacggtggtcgtaggaatactctcccaatgtgtagtgcatgcaatgcaagtaccttgcggcaaagccgagtcatgttgtatgttagcatagacagaattgagagatatgctgtacgctaggagccataggatgatttgttcattttcaatctttaggcagtcaggaatttaagggattgtacaatttgtccaccagcgatcctgtaaagctcggacatgcaaatatgcaatagaccgtccagaaattttgttggtttatgtttgtgctgtatttctctcgtactggtattccagaacaaagaatctgtaggatgccagattcttggatacaaaatgaggtaattgaaatcaatcaacatggatcccacaaagtgcggtcgtgatgttgtgaggtccaaaaggctataaatcatgttcagcgtttccaaagctagaaagtgtgcatagcggatttgcattagtaaagccttctccgccatcaccacgctgagcgacgacctcctccaggacatcttcctcctgccgagatcgtgggctagacgtcatcggtgtggctgctggcctcgtgttcattcggcagtggaatcatctatctgttctccattgatcttgaaactatgaatcgcccggaggcgctgatctaccctttcacaattgcgtggccacccaccctctttcctaaatcctgctggacaaggagcttgatatgaatatgacggtaaactccagcataagatggcagaggcgatgatagaaaaaaaaagagagaggaagaatctcagttattctgatgaagtattggggatgatgatgatcagttgctatagtttgtggctgttactagattg

SEQ ID NO: 204250 - DNA, 1408 bp, Zea Mays
cgcacgtgaggcgccctcctccccaaccgaaaagtctacagaggataaggagctcgccgctcttccagtcccacagctaggggagggaaacaaacacccaaatcaaacccgcgcgtcgccagccgcagcaccaatggcgtgcgtcgccgcgctcttcgcctccccggcgctcctccccttcccctccaccacctcgtccatggcctcctgctcgtgccgcctccgccccgccgtcgtcgcccgcgcgccgcgccagcagccgcggggccggcgcgcgctccggcgcttcgatgaggtggaaggggtgtcgaagaaacggcgcggcatcggaggcggtggcggcgtcggcgctggcgggtcgcagccgtcgtcctcgcgcagggatagggggctttccgtcgatttcaaggagccgcaggttgctgagtttgatgatcttgaagaggacaaattccttaatgctgtcgtcaaggtctattgcactcatatcgcacccgattatggtcttccttggcagaagcaaaggcaacattcaagtagtgggagtgcttttatgattggggatggtaaactcttgacaaatgcgcattgcgttgagcacgacacccaggtcaaagtaaagagaaggggagatgacaaaaaatatattgccaaggttttagctaggggtgttgaatgcgatcttgcgttgctatctgttgagaatgaagagttctggagaggaacagaggcacttcattttggtcgtttgccatgccttcaggattcagtaactgttgtgggatatcctcttggtggagacactatatctgtaacaaaaggcgttgtgtcgcgcattgaggtcactccatatgcacatggaacatcagatcttcttggcattcaaattgacgcagccataaatcctggaaacagtgggggaccagcctttaatgatcaaggggagtgcattggtgtggcatttcaggtgtacaggtcagatgaagctgaaaatattggatatgttattccaactacagttgtatcccatttcttaaatgactatcagaaaaatggaaagtacacaggatttccatgtttgggtgtcttacttcagaaattggaaaatccggcattgcgtgaaagcttaaaagtaccttcaagcgagggtgttcttgttcgtcgggtggaacctactgctccagcaagcagtgttttgcgaaagggagatgtaattgttagctttgatggtatcgcagtaggatgtgaagcaacagtaccatttcggtccacagaacggattgctttccgctatctcacaagccaaaagtatgcaggcgatattgcccagctaggaatcattcgtgatggcaattccatgaaagtccagactattttgcagccaagaaaacatttaggtcttaatttt

SEQ ID NO: 204251 - DNA, 835 bp, Zea Mays
atgtgccatgaccgtgacctagactttggaggacaaacttaaaggaaaacctgggtatgaacatctgaacgagccactgcatatattaatcgaggctgagttaccagcgaacattgttgatacaagactgagacaggcacaagaagtcatggaggaattgctaaagccagtggacgagtcacaagatttgtacaagaggcaacagctgagggagttggctatgctaaactctactctgagagaagacagtcctcaccctggaagtgtctcccctttcagcaacggcggcatgaagcgcgcaaaaccaagccagtagagaaaggtttcaggctctcctccaccctcctccactccagtcgttcttggtgcagcaccagcaaggtgtgcctgcccttgaacctgcgctgcttcgtgtcgtgggtgcttgtgtaagaaaaaaaaggtatatgcattttgctgctgctggacggacaggtggtcgagacgaggaggaaatcgctggtcgttgaactgtctccatcttcggtggatccggccattttgctgctgtaaggtgatgggcattcgttctattcgttactgactgttgaccagattatgatgccgtggtttcaggggagactagctatgcctatggccctgataattagtgtgagctggttcgtttaggtgtttaattagtttgtattattattattcgcgttacgttgtggagtagtagcaaacgtcacagctggtgatgcactccgctctgacagtttgatgaggacagctttgaataaaccatgtgaattcagaatgttactgaaacggtgggacgtccgttctatgccta

SEQ ID NO: 204252 - DNA, 1327 bp, Zea Mays
gtcctcactcctccccctctctctctatcatcacccttcttccgccggaaggaaaagagaaaaacacacactctctttccgagctctctcgctgtctctcacccagccgccaccatgtcaggcctctacaaccagggcttctcccctgcaagaaccctctccccccagattaggagcaaccccgacgctgatagccagtacttggccgagcttctcgccgagcaccagaagttggggccattcatgcaggtgctgccgatatgcagccggctgctcaaccaagaaatcatgcgggtgtcaagcatggttcatgaccatggatttagtgatcttgacagacgccggtttagaagtcctagccctatgtcttcaccgattgtccggcctaatctacatggaaatggttttggtccttggaatgggatgcaccaagagagattgggctttcctcctcctggaacaagtatggactggcaaggagcaccaccgagccctggctcttatattgtcaagaagatcatgcgcttggaagttcccgtcgactcttaccctaatttcaactttgtgggacgcattctagggccaaggggtaattctctaaagcgagttgaatcatcaactggctgccgtgtttttattagagggaagggttccgtcaaagatacagaaaaggaggacaaacttaaaggaaaacctgggtatgaacatctgaacgagccactgcatatattaatcgaggctgagttaccagcgaacattgttgatacaagactgagacaggcacaagaagtcatggaggaattgctaaagccagtggacgagtcacaagatttgtacaagaggcaacagctgagggagttggctatgctaaactctactctgagagaagacagtcctcaccctggaagtgtctcccctttcagcaacggcggcatgaagcgcgcaaaaccaagccagtagagaaaggtggtcgagacgaggaggaaatcgctggtcgttgaactgtctccatcttcggtggatccggccattttgctgctgtaaggtgatgggcattcgttctattcgttactgactgttgaccagattatgatgccgtggtttcaggggagactagctatgcctatggccctgataattagtgtgagctggttcgtttaggtgtttaattagtttgtattattattattcgcgttacgttgtggagtagtagcaaacgtcacagctggtgatgcactccgctctgacagtttgatgaggacagctttgaataaaccatgtgaattcagaatgttactgaaacggtgggacgtccgttctatgccta

SEQ ID NO: 204253 - DNA, 1390 bp, Zea Mays
gtgggtcctcactcctccccctctctctctatcatcacccttcttccgccggaaggaaaagagaaaaacacacactctctttccgagctctctcgctgtctctcacccagccgccaccatgtcaggcctctacaaccagggcttctcccctgcaagaaccctctccccccagattaggagcaaccccgacgctgatagccagtacttggccgagcttctcgccgagcaccagaagttggggccattcatgcaggtgctgccgatatgcagccggctgctcaaccaagaaatcatgcgggtgtcaagcatggttcatgaccatggatttagtgatcttgacagacgccggtttagaagtcctagccctatgtcttcaccgattgtccggcctaatctacatggaaatggttttggtccttggaatgggatgcaccaagagagattgggctttcctcctcctggaacaagtatggactggcaaggagcaccaccgagccctggctcttatattgtcaagaagatcatgcgcttggaagttcccgtcgactcttaccctaatttcaactttgtgggacgcattctagggccaaggggtaattctctaaagcgagttgaatcatcaactggctgccgtgtttttattagagggaagggttccgtcaaagatacagaaaaggaggacaaacttaaaggaaaacctgggtatgaacatctgaacgagccactgcatatattaatcgaggctgagttaccagcgaacattgttgatacaagactgagacaggcacaagaagtcatggaggaattgctaaagccagtggacgagtcacaagatttgtacaagaggcaacagctgagggagttggctatgctaaactctactctgagagaagacagtcctcaccctggaagtgtctcccctttcagcaacggcggcatgaagcgcgcaaaaccaagccagtagagaaaggtttcaggctctcctccaccctcctccactccagtcgttcttggtgcagcaccagcaaggtggtcgagacgaggaggaaatcgctggtcgttgaactgtctccatcttcggtggatccggccattttgctgctgtaaggtgatgggcattcgttctattcgttactgactgttgaccagattatgatgccgtggtttcaggggagactagctatgcctatggccctgataattagtgtgagctggttcgtttaggtgtttaattagtttgtattattattattcgcgttacgttgtggagtagtagcaaacgtcacagctggtgatgcactccgctctgacagtttgatgaggacagctttgaataaaccatgtgaattcagaatgttactgaaacggtgggacgtccgttctatgccta

SEQ ID NO: 204254 - DNA, 4056 bp, Zea Mays
cgaaccctgccccaccaccaccgcctccgcctcgtcgtcgtggggcgctggcgacgcgtttgttttgttcatcacacgcccgcgggtttcctgtttcttctcttcccccggccgcgcgcgtccgacgcggggcagcgagccagcgaccactctcgcctgcctgcctacctacccatcccacacccgcctggggaaaatcaaagcgccgccctcgcacgcactcgcgctccccactcccctcacctcactcctcgtaacggctcggcaaaacccccagcacgcggtcgacgagacgagagccgagaaacagtccactcctcactcccgttccgtttcgtttccccagttccgcatggccgccgcgaggtagcggcgcaggcgctcaccggggatggcggccggagggaggggcaagctggcgccggcggaagtggcgcccgcggcgtttccctcgcggggcttggcggtggcgggggccgcggcgggcgaggtggtgcggcgcgtgaggcccacggaggcctccgagcgccgccgcgcggaggtcgtcgactacgcgcggaggctcgtcggctcagcgctcggatgcgaggtttttgcatttggatcagttccactaaagacttaccttcctgatggggatattgatctaactgtccttggaaatacatcttatgatagtactttggttaatgatgttttctgcattcttgagtctgaggagcagaatagtgatgctgaatttgtagtgaaggacttggaacgaattgatgccgaggtcaggctcattaaatgcactattggaaatattatagttgatatctcattcaaccaaactggtgggatctgcgcactctgcttccttgagctggttgatcggaaagttggaaaaaaccatctatttaaaaggagcatcatattgatcaaggcatggtgctattatgaaagccgcctactaggagctcatcatggacttatatcaacctatgcactggaagtacttatcctttatgtattcaatctattccacaaatctctccacagccctgtggaggtatgtcttaaaagatttacttatttcagatatattttctcattatataatagaaaagctcatgtcttgccgtttccctgtgtttttattaataggttctttataggtttctggaatattttagcaagtttgactgggacaactattgcataagtttaaatggccctgttgctttgtcgtctttgccaaacttaattgttgaagctacagttacacataccagtgacttattgtttgacaaagaattcctcaagagctccatggataaagcaactgtacctccaaaaaattccgattcatgctatccgaggtttcgtcctaaacatctaaacatagttgatccactgaaggagtacaacaatcttggcagaagtgtcaacagaggtttgaatttgatctaaccaagatatacatataactcttttctaagttttcctatacaatattttgctgctgcttgtactcataattgcatcccaatttattaagtcttgctgctgcttgtactcataattgcataaacccatatgtgtagctagctagcattgggtttgcctggcctcatctgcttaatttaataaggtgattttgtgcagctagctttaatcgcattcgaacagctttcttatatggtgctcgaaagcttggtcatattgtcacgttaccatcagaagttattcctgatgaaatttatgagtttttcaaaaacactttgggaaggaatgaactaggggcaagaccagatattgacagcaattatgcttttcattcttcctttggtactgctgagactattttggaagatatatcaagtatgaagatttccgatggtgaagatgagaacataacctgtcatctttcaaagagcttgggtgataaaaacttatacgttggaatgaatggacatacacatttgagtaattattttccaggagtccgtaacactgcattaagtactggtttaagtacaagagcatcccattttgttcataatgcaccaaaactacattcatcgttttgccatgataacagtcacggtgacagtgaaaaatgttacttgaaccatggaatggagcaggtatctcactacactgctaaagccttctgtatagatgataagacaacaatacagtcacaagtttttgtgagcaacccatcactattgagcacctctgctgctgtcactgcttcagaacttgccaccaaacagaaaaaatggagtactgcctatgtggagaaacaacatttttctccctcaccatcaagcttgccagatctttcaggggatctggattcacaatttagatgtttgcgtcaagttcagtaccacctcgaatacttgtttgatgggtttttgcagtcagttcagggagcatcttctgctgataagtttcacaaggacccctttcacatttctgcttgcagtatcttgttggacagagatacaggatcgccaaggttgcagttgctttcacctgctcgaagcaatggaagggatccatctcccgtttcttgtagtcagagcacagaatgtgtctctcagcattcacagaatggaagcccatgggatatggcttctcaacggagtgtctctgtgccctctggaatcgatattccaccaaatggagtctcaccgtgttcttcttgtgctgattctgaggtttcttctgtttcatggtttcatggctctggggatagcgctatgatgcatggaagtggaaaagacacatactttacaagaaagagctgttatactcgctgggagcgattggcatcttcaagaaagaatgggaaaatactgccaaatcaatcagtgaaatataaaagcaaccagaagtcagctccaggagcaagatttgtgtctcacaaggagcaggccgcaatagacagtagaaccaaagaaataacaatcgatcaagctttgaagatacatgaatacattgaatcagacatgaaaattgttgaaaaactcagttgtcataatcaaaaggaagtccgtcatgacaatgaagcaagacaattaccaaataacaaccaggatgtttgcttgaataagaactttttgcaaaaccgatatcatgtggagtctacacgagctcccagagcaacacatcagattcctaaatatcaaccgtttaaaattcaaaatactacagagtgtgatagagctagcctaagtaagaacatgcccagaaagcacagctgtggcacttggaaagagtatgagatacttgaccggccaacaaagcagagaccaatttgtggcccattgaagctagaaaacagacatgtctgggattgcacaaagaagatatcagctggaaaccagaagtgtaataatcataaggattacctatctttcgtaagaggtgcagtgccacgcagccacgcagcaagcactccaaatggtttagaaaaggaggcggctaattcaaataaatccgctgacaacggaagtcccgtaaggccaatcttgccagagttattgctttcttgtcatgacatcaatagccaagagaggtccccatcatctagtgctcatcaatcatacttccctgctgcaaatgatcgaccactggagactatagagtttggatctttgggaccttttgcactgcctttatcctcattgaagtcaaatggaactactaacacagaagctacaagtaaggtgtttacagatgcctctccatttgtgttacagaggtccagggccgccgcaactgaaaacagtgctggaggctgatgggtctgaggaaagaacaatcatcgaggtaataccttctcccatggagaggctgcttcaaacctgcaaccgaagacctgcccttgtttaggcataaaattcaataagtatgattggtgtagtatatggggattagggactgtcacagaagaccgatacgtgtgtctggcatccagatttgttgttatgtgatagtgattccatgcacttttacgctacatacaatggctacaattctgtccttatatgaagcatcccg

SEQ ID NO: 204255 - DNA, 4126 bp, Zea Mays
ccctgccccaccaccaccgcctccgcctcgtcgtcgtggggcgctggcgacgcgtttgttttgttcatcacacgcccgcgggtttcctgtttcttctcttcccccggccgcgcgcgtccgacgcggggcagcgagccagcgaccactctcgcctgcctgcctacctacccatcccacacccgcctggggaaaatcaaagcgccgccctcgcacgcactcgcgctccccactcccctcacctcactcctcgtaacggctcggcaaaacccccagcacgcggtcgacgagacgagagccgagaaacagtccactcctcactcccgttccgtttcgtttccccagttccgcatggccgccgcgaggtagcggcgcaggcgctcaccggggatggcggccggagggaggggcaagctggcgccggcggaagtggcgcccgcggcgtttccctcgcggggcttggcggtggcgggggccgcggcgggcgaggtggtgcggcgcgtgaggcccacggaggcctccgagcgccgccgcgcggaggtcgtcgactacgcgcggaggctcgtcggctcagcgctcggatgcgaggtttttgcatttggatcagttccactaaagacttaccttcctgatggggatattgatctaactgtccttggaaatacatcttatgatagtactttggttaatgatgttttctgcattcttgagtctgaggagcagaatagtgatgctgaatttgtagtgaaggacttggaacgaattgatgccgaggtcaggctcattaaatgcactattggaaatattatagttgatatctcattcaaccaaactggtgggatctgcgcactctgcttccttgagctggttgatcggaaagttggaaaaaaccatctatttaaaaggagcatcatattgatcaaggcatggtgctattatgaaagccgcctactaggagctcatcatggacttatatcaacctatgcactggaagtacttatcctttatgtattcaatctattccacaaatctctccacagccctgtggaggtatgtcttaaaagatttacttatttcagatatattttctcattatataatagaaaagctcatgtcttgccgtttccctgtgtttttattaataggttctttataggtttctggaatattttagcaagtttgactgggacaactattgcataagtttaaatggccctgttgctttgtcgtctttgccaaacttaattgttgaagctacagttacacataccagtgacttattgtttgacaaagaattcctcaagagctccatggataaagcaactgtacctccaaaaaattccgattcatgctatccgaggtttcgtcctaaacatctaaacatagttgatccactgaaggagtacaacaatcttggcagaagtgtcaacagaggtttgaatttgatctaaccaagatatacatataactcttttctaagttttcctatacaatattttgctgctgcttgtactcataattgcatcccaatttattaagtcttgctgctgcttgtactcataattgcataaacccatatgtgtagctagctagcattgggtttgcctggcctcatctgcttaatttaataaggtgattttgtgcagctagctttaatcgcattcgaacagctttcttatatggtgctcgaaagcttggtcatattgtcacgttaccatcagaagttattcctgatgaaatttatgagtttttcaaaaacactttgggaaggaatgaactaggggcaagaccagatattgacagcaattatgcttttcattcttcctttggtactgctgagactattttggaagatatatcaagtatgaagatttccgatggtgaagatgagaacataacctgtcatctttcaaagagcttgggtgataaaaacttatacgttggaatgaatggacatacacatttgagtaattattttccaggagtccgtaacactgcattaagtactggtttaagtacaagagcatcccattttgttcataatgcaccaaaactacattcatcgttttgccatgataacagtcacggtgacagtgaaaaatgttacttgaaccatggaatggagcaggtatctcactacactgctaaagccttctgtatagatgataagacaacaatacagtcacaagtttttgtgagcaacccatcactattgagcacctctgctgctgtcactgcttcagaacttgccaccaaacagaaaaaatggagtactgcctatgtggagaaacaacatttttctccctcaccatcaagcttgccagatctttcaggggatctggattcacaatttagatgtttgcgtcaagttcagtaccacctcgaatacttgtttgatgggtttttgcagtcagttcagggagcatcttctgctgataagtttcacaaggacccctttcacatttctgcttgcagtatcttgttggacagagatacaggatcgccaaggttgcagttgctttcacctgctcgaagcaatggaagggatccatctcccgtttcttgtagtcagagcacagaatgtgtctctcagcattcacagaatggaagcccatgggatatggcttctcaacggagtgtctctgtgccctctggaatcgatattccaccaaatggagtctcaccgtgttcttcttgtgctgattctgaggtttcttctgtttcatggtttcatggctctggggatagcgctatgatgcatggaagtggaaaagacacatactttacaagaaagagctgttatactcgctgggagcgattggcatcttcaagaaagaatgggaaaatactgccaaatcaatcagtgaaatataaaagcaaccagaagtcagctccaggagcaagatttgtgtctcacaaggagcaggccgcaatagacagtagaaccaaagaaataacaatcgatcaagctttgaagatacatgaatacattgaatcagacatgaaaattgttgaaaaactcagttgtcataatcaaaaggaagtccgtcatgacaatgaagcaagacaattaccaaataacaaccaggatgtttgcttgaataagaactttttgcaaaaccgatatcatgtggagtctacacgagctcccagagcaacacatcagattcctaaatatcaaccgtttaaaattcaaaatactacagagtgtgatagagctagcctaagtaagaacatgcccagaaagcacagctgtggcacttggaaagagtatgagatacttgaccggccaacaaagcagagaccaatttgtggcccattgaagctagaaaacagacatgtctgggattgcacaaagaagatatcagctggaaaccagaagtgtaataatcataaggattacctatctttcgtaagaggtgcagtgccacgcagccacgcagcaagcactccaaatggtttagaaaaggaggcggctaattcaaataaatccgctgacaacggaagtcccgtaaggccaatcttgccagagttattgctttcttgtcatgacatcaatagccaagagaggtccccatcatctagtgctcatcaatcatacttccctgctgcaaatgatcgaccactggagactatagagtttggatctttgggaccttttgcactgcctttatcctcattgaagtcaaatggaactactaacacagaagctacaagtaaggtgtttacagatgcctctccatttgtgttacagaggtccagggccgccgcaactgaaaacagaccaccaggactttgcaaagtgggagacgaggacgaatttccacctcttagagctgggatccgagtttttttgggcgcctcatagaaatgaggattattgcagtggcatagtacagcctaccgtgtaaaatgtcgtcggccccttatcaatctctctctttttcccgtagttgtcactagagttacaccgaacaaggtttatacagctaatgttcactagtataacttagcaaggagaaagatcagatacaaaaaaaaacggagtacttacgtttaccttatcagtctctctgtttcaggtcttcttgcctttgctttgcttcattgcagtatatatagatagatg

SEQ ID NO: 204256 - DNA, 4347 bp, Zea Mays
ccctgccccaccaccaccgcctccgcctcgtcgtcgtggggcgctggcgacgcgtttgttttgttcatcacacgcccgcgggtttcctgtttcttctcttcccccggccgcgcgcgtccgacgcggggcagcgagccagcgaccactctcgcctgcctgcctacctacccatcccacacccgcctggggaaaatcaaagcgccgccctcgcacgcactcgcgctccccactcccctcacctcactcctcgtaacggctcggcaaaacccccagcacgcggtcgacgagacgagagccgagaaacagtccactcctcactcccgttccgtttcgtttccccagttccgcatggccgccgcgaggtagcggcgcaggcgctcaccggggatggcggccggagggaggggcaagctggcgccggcggaagtggcgcccgcggcgtttccctcgcggggcttggcggtggcgggggccgcggcgggcgaggtggtgcggcgcgtgaggcccacggaggcctccgagcgccgccgcgcggaggtcgtcgactacgcgcggaggctcgtcggctcagcgctcggatgcgaggtttttgcatttggatcagttccactaaagacttaccttcctgatggggatattgatctaactgtccttggaaatacatcttatgatagtactttggttaatgatgttttctgcattcttgagtctgaggagcagaatagtgatgctgaatttgtagtgaaggacttggaacgaattgatgccgaggtttattctcctatatacacatcctataccttcctagtgattcgttttggatggttgtttaggcaatctatgatattgtaatccgagttcttacttggcattttcattctgctcgcatgatagttaaactgaaagctatctgtccctcatctttctctttgacatgttattcttattgtttttcacacccatctaattatctgaaattcatgtccatccaggtcaggctcattaaatgcactattggaaatattatagttgatatctcattcaaccaaactggtgggatctgcgcactctgcttccttgagctggttgatcggaaagttggaaaaaaccatctatttaaaaggagcatcatattgatcaaggcatggtgctattatgaaagccgcctactaggagctcatcatggacttatatcaacctatgcactggaagtacttatcctttatgtattcaatctattccacaaatctctccacagccctgtggaggtatgtcttaaaagatttacttatttcagatatattttctcattatataatagaaaagctcatgtcttgccgtttccctgtgtttttattaataggttctttataggtttctggaatattttagcaagtttgactgggacaactattgcataagtttaaatggccctgttgctttgtcgtctttgccaaacttaattgttgaagctacagttacacataccagtgacttattgtttgacaaagaattcctcaagagctccatggataaagcaactgtacctccaaaaaattccgattcatgctatccgaggtttcgtcctaaacatctaaacatagttgatccactgaaggagtacaacaatcttggcagaagtgtcaacagaggtttgaatttgatctaaccaagatatacatataactcttttctaagttttcctatacaatattttgctgctgcttgtactcataattgcatcccaatttattaagtcttgctgctgcttgtactcataattgcataaacccatatgtgtagctagctagcattgggtttgcctggcctcatctgcttaatttaataaggtgattttgtgcagctagctttaatcgcattcgaacagctttcttatatggtgctcgaaagcttggtcatattgtcacgttaccatcagaagttattcctgatgaaatttatgagtttttcaaaaacactttgggaaggaatgaactaggggcaagaccagatattgacagcaattatgcttttcattcttcctttggtactgctgagactattttggaagatatatcaagtatgaagatttccgatggtgaagatgagaacataacctgtcatctttcaaagagcttgggtgataaaaacttatacgttggaatgaatggacatacacatttgagtaattattttccaggagtccgtaacactgcattaagtactggtttaagtacaagagcatcccattttgttcataatgcaccaaaactacattcatcgttttgccatgataacagtcacggtgacagtgaaaaatgttacttgaaccatggaatggagcaggtatctcactacactgctaaagccttctgtatagatgataagacaacaatacagtcacaagtttttgtgagcaacccatcactattgagcacctctgctgctgtcactgcttcagaacttgccaccaaacagaaaaaatggagtactgcctatgtggagaaacaacatttttctccctcaccatcaagcttgccagatctttcaggggatctggattcacaatttagatgtttgcgtcaagttcagtaccacctcgaatacttgtttgatgggtttttgcagtcagttcagggagcatcttctgctgataagtttcacaaggacccctttcacatttctgcttgcagtatcttgttggacagagatacaggatcgccaaggttgcagttgctttcacctgctcgaagcaatggaagggatccatctcccgtttcttgtagtcagagcacagaatgtgtctctcagcattcacagaatggaagcccatgggatatggcttctcaacggagtgtctctgtgccctctggaatcgatattccaccaaatggagtctcaccgtgttcttcttgtgctgattctgaggtttcttctgtttcatggtttcatggctctggggatagcgctatgatgcatggaagtggaaaagacacatactttacaagaaagagctgttatactcgctgggagcgattggcatcttcaagaaagaatgggaaaatactgccaaatcaatcagtgaaatataaaagcaaccagaagtcagctccaggagcaagatttgtgtctcacaaggagcaggccgcaatagacagtagaaccaaagaaataacaatcgatcaagctttgaagatacatgaatacattgaatcagacatgaaaattgttgaaaaactcagttgtcataatcaaaaggaagtccgtcatgacaatgaagcaagacaattaccaaataacaaccaggatgtttgcttgaataagaactttttgcaaaaccgatatcatgtggagtctacacgagctcccagagcaacacatcagattcctaaatatcaaccgtttaaaattcaaaatactacagagtgtgatagagctagcctaagtaagaacatgcccagaaagcacagctgtggcacttggaaagagtatgagatacttgaccggccaacaaagcagagaccaatttgtggcccattgaagctagaaaacagacatgtctgggattgcacaaagaagatatcagctggaaaccagaagtgtaataatcataaggattacctatctttcgtaagaggtgcagtgccacgcagccacgcagcaagcactccaaatggtttagaaaaggaggcggctaattcaaataaatccgctgacaacggaagtcccgtaaggccaatcttgccagagttattgctttcttgtcatgacatcaatagccaagagaggtccccatcatctagtgctcatcaatcatacttccctgctgcaaatgatcgaccactggagactatagagtttggatctttgggaccttttgcactgcctttatcctcattgaagtcaaatggaactactaacacagaagctacaagtaaggtgtttacagatgcctctccatttgtgttacagaggtccagggccgccgcaactgaaaacagaccaccaggactttgcaaagtgggagacgaggacgaatttccacctcttagagctgggatccgagtttttttgggcgcctcatagaaatgaggattattgcagtggcatagtacagcctaccgtgtaaaatgtcgtcggccccttatcaatctctctctttttcccgtagttgtcactagagttacaccgaacaaggtttatacagctaatgttcactagtataacttagcaaggagaaagatcagatacaaaaaaaaacggagtacttacgtttaccttatcagtctctctgtttcaggtcttcttgcctttgctttgcttcattgcagtatatatagatagatg

SEQ ID NO: 204257 - DNA, 1797 bp, Zea Mays
actgcgcgtgttgccacttgccactgagcttcgtgtcgacatctcaagctgctcgacccatgtgtgggcatctcggtcatttcgcgaaggccgcgcatcctataaatgagaccccttcctcctcccctgccgttgttgttggcttcgtggtccgtgtttaacgggcgtagagagagaaagagaacagagcgagagagggggaggacgaagccctccgcgtcgtctcctgctgttccatcccacatctattctgcctcggcttgcaccttcgacctcgctgaaagttctgacctcaaactgaaaggggcctgtgaagcgtttccttgcggcagtgcaatggaggtatttggcaaatctgtgattgctgagcccagcaatgtgattttcttgtccgcaatccttaacacagaaggatcaaaccctagtcacaagtgtgacaagaggtgccagaacgagaacatttttgggaacatgtaccgttgcaaactgactggaaccactcacatctgtgacaaaaactgtaaccagagaatcctctatgacaaccataactcgctctgccgagtgagtgggcagttttttccgctctctccattggagcagcaagcagtgaggggtatccgcaggaagcacgaagtggacagcaatgaaggctgctcctttaagcgcaggcgtggtgcacagctgcatccttcccccttcgagaggtcctactcagctgtgtctccaatcccgagccaggttggagatggcatggacctgagctagagctaacgagacttccttttcttcagccaaccacctaattccgttgtctaccctttttccctttggttacaggatggaactataagagattccttctttgtagacttttatgaagggatataagactccttagatgcaccgaataaatgtctatgtagtttctattctgtttcatgggaccttgttgtaactcgtgaactttgattgagcacctattcggatttagtagcacgttcagaaaatcattcgctgcttatcttttttcacacttccgagttagttattttgtgtgtttttttactttgtgttcaactaagtttccttctaattttgattctttaatgcaatttattataattgaggtgtacatttgtccatcaatgtaaatatgtgaaagattctttggcactgtaatccaggcacagggaactgactgcctttgctgactgaagtttttgtacagttgttactagtgttttgcttgtcaagttcctaatcaagcttgaatcatttacggtgaacatctctggttctattttcatcgtcgggtaacaagaaactaatcagggagtctcttcccatttcttgcagtggaggaatgtttagctacagccgcgcagcatgctttccagagcataaattggtggaagagaagtttgatgctaccactttgccagaagaaccgagccagacacaataacatcaaactgagtctgagatactgcactttacaaattctttcgatattggcagattgaagaccaacaagatttgaagagcagcaagatcagcttgcacctgcagtttgaagaaatcctttcaaagaagactgcttgcggcaatcttgccttcactccacaagcatgtgctgtgttatgcgtaccatgtaatgattgtagtacttgacaactgataccaaagtagtggatgcttttctttcgcatgaagtcatgttgatttttgtacgttctaacagcgtctccatcaatatcctattgaatctcccatacttctatacctataattttc

SEQ ID NO: 204258 - DNA, 780 bp, Zea Mays
actgcgcgtgttgccacttgccactgagcttcgtgtcgacatctcaagctgctcgacccatgtgtgggcatctcggtcatttcgcgaaggccgcgcatcctataaatgagaccccttcctcctcccctgccgttgttgttggcttcgtggtccgtgtttaacgggcgtagagagagaaagagaacagagcgagagagggggaggacgaagccctccgcgtcgtctcctgctgttccatcccacatctattctgcctcggcttgcaccttcgacctcgctgaaagttctgacctcaaactgaaaggggcctgtgaagcgtttccttgcggcagtgcaatggagtggaggaatgtttagctacagccgcgcagcatgctttccagagcataaattggtggaagagaagtttgatgctaccactttgccagaagaaccgagccagacacaataacatcaaactgagtctgagatactgcactttacaaattctttcgatattggcagattgaagaccaacaagatttgaagagcagcaagatcagcttgcacctgcagtttgaagaaatcctttcaaagaagactgcttgcggcaatcttgccttcactccacaagcatgtgctgtgttatgcgtaccatgtaatgattgtagtacttgacaactgataccaaagtagtggatgcttttctttcgcatgaagtcatgttgatttttgtacgttctaacagcgtctccatcaatatcctattgaatctcccatacttctatacctataattttc

SEQ ID NO: 204259 - DNA, 1957 bp, Zea Mays
actgcgcgtgttgccacttgccactgagcttcgtgtcgacatctcaagctgctcgacccatgtgtgggcatctcggtcatttcgcgaaggccgcgcatcctataaatgagaccccttcctcctcccctgccgttgttgttggcttcgtggtccgtgtttaacgggcgtagagagagaaagagaacagagcgagagagggggaggacgaagccctccgcgtcgtctcctgctgttccatcccacatctattctgcctcggcttgcaccttcgacctcgctgaaagttctgacctcaaactgaaaggggcctgtgaagcgtttccttgcggcagtgcaatggaggtatttggcaaatctgtgattgctgagcccagcaatgtgattttcttgtccgcaatccttaacacagaaggatcaaaccctagtcacaagtgtgacaagaggtgccagaacgagaacatttttgggaacatgtaccgttgcaaactgactggaaccactcacatctgtgacaaaaactgtaaccagagaatcctctatgacaaccataactcgctctgccgagtgagtgggcagttttttccgctctctccattggagcagcaagcagtgaggggtatccgcaggaagcacgaagtggacagcaatgaaggctgctcctttaagcgcaggcgtggtgcacagctgcatccttcccccttcgagaggtcctactcagctgtgtctccaatcccgagccaggttggagatggcatggacctgagctagagctaacgagacttccttttcttcagccaaccacctaattccgttgtctaccctttttccctttggttacaggatggaactataagagattccttctttgtagacttttatgaagggatataagactccttagatgcaccgaataaatgtctatgtagtttctattctgtttcatgggaccttgttgtaactcgtgaactttgattgagcacctattcggatttagtagcacgttcagaaaatcattcgctgcttatcttttttcacacttccgagttagttattttgtgtgtttttttactttgtgttcaactaagtttccttctaattttgattctttaatgcaatttattataattgaggtgtacatttgtccatcaatgtaaatatgtgaaagattctttggcactgtaatccaggcacagggaactgactgcctttgctgactgaagtttttgtacagttgttactagtgttttgcttgtcaagttcctaatcaagcttgaatcatttacggtctgttctcatatagctcaactctatctgtttcttaactcttttttacaggaccatccaggttcaaatcgttcttgggaaatgttttgttcttctttatataactatattgctaacttattttcatttgttaattattttgctttattttgatttgcaggtgaacatctctggttctattttcatcgtcgggtaacaagaaactaatcagggagtctcttcccatttcttgcagtggaggaatgtttagctacagccgcgcagcatgctttccagagcataaattggtggaagagaagtttgatgctaccactttgccagaagaaccgagccagacacaataacatcaaactgagtctgagatactgcactttacaaattctttcgatattggcagattgaagaccaacaagatttgaagagcagcaagatcagcttgcacctgcagtttgaagaaatcctttcaaagaagactgcttgcggcaatcttgccttcactccacaagcatgtgctgtgttatgcgtaccatgtaatgattgtagtacttgacaactgataccaaagtagtggatgcttttctttcgcatgaagtcatgttgatttttgtacgttctaacagcgtctccatcaatatcctattgaatctcccatacttctatacctataattttc

SEQ ID NO: 204260 - DNA, 859 bp, Zea Mays
tatatataaacccgatatatagggtctcacttgtgtaccccaacgagaagagcggcggcgcgggcggacaaggagcaggcggaggaggagctgtgccaagccacaatgggtatctcgcgtgactcgatgcacaagcgccgggccaccggtggaaagcagaaggcctggaggaagaagcgaaagtatgagcttggtcgccagccagccaacaccaagttgtcaagcaataagacagtgaggagggtccgtgttcgtggaggtaatgtgaaatggagggctcttcgccttgatactggtaactactcatggggaagtgaagctgttacccgcaagacccgtatcctcgacgtggtctacaatgcatcaaacaatgagcttgtgaggacacaaacccttgtgaagagtgccattgtgcaagttgatgctgccccattcaagcagtggtacctcactcactatggagttgacattggtaggaagaagaaaacccctgctgcaaagaaggataatgctgagttctacatgaagaagctacagaggaagaagggcaagagcgctgtagcttagagcattctcatggattgtcttgcaccgaaatgtgtgtcctgatgagtacactttttttggttaatcgtctcaagttcagagcgttatgccatgttttcagacctgattagtacactgttttctaaaagcgattgagctctagtccaatgtattgataatatctgctgttgtcctattgcggtgatgttgatttgccctgttcgctagctgcaatagttcctatttgttgatgaatttgtttgaagcataaacgcagaacatgtcgtaaagaaaacatttttctgtaaataaa

SEQ ID NO: 204261 - DNA, 1317 bp, Zea Mays
cctaaccctaaccggtcgccacctaaacctaggcgcgccactctccctggcagccgccgtttgttgtcgcgagcgcgttcctgccccgccacagccgaagctcccagcgtcctcctgcaggccgagctgaaggttcagcgcgccggtggagttcgacgacgaaactccgtcacgtcatacctctccgcctcccgtcttccagacgtctccaatcagggctcccagcgtctcggagaagaggagcagcacggcacggcggctgtggcgaggaaggctcctgtcccatcccaacccagttagcagccgcccaaggaggaggagattcaatcggcgtgcgggcgtccgcggtccatccatcgatccaattccaatctgcagggaaaggaatattgtagaacacgttaacaaaattgctccaaggttccaggagggaatcaaggccttctcaggcagcccaattgttggggagatacgcggtctgggactgatacttggaactgaatttgtcgacaacaaatctccaaatgatccatttccagctgaatggggttcattgttttattgatctcatgtccccttttcaaacatttcagaagtaatccaactttaaggcggcccaaaattgttctctgaagagttaacttaatgttatgaattagcgtagcatgtcgaggcaaaattcgtcactatccccagagttagaagaaaccttgccgagttgattaatggtgacagtatattgattttattacgactggtaactccaggtgttggttcgatatttggcacggagtgcgagaagcgtgggatgctcatcagggtggctggggacagcatcatgctgtcacccccgctgatcatgactcccaatgaagtcgaagaaatcataagcaaattcggcgatgctctaaaggctacagaggaacggattggagaactgaaatccaggaagaattagccgatgctgctggttgtaacgacgtgttgaagatggctttggtgaaggaaatgtcttgttagcatcaagtaagtggcgacatcacaacccctacaagcttgtgccttaaaacaagaggatacaagaagttggagtgcttttgtgaaggcttttgcgaatcacttaaagcgttagtacttttgtgaatgattttgtaaagtgtttgcaaatatgtgcaaaacataataacatgtgtaggttttgtgaatgattttgttgtggtgtctgttgatggtttatgtatgtggatctatcattgtgcaatactaattaaatttgtatatctatgtgattatgtgtataaaaattggtgatttgtg

SEQ ID NO: 204262 - DNA, 1175 bp, Zea Mays
ggtcgccacctaaacctaggcgcgccactctccctggcagccgccgtttgttgtcgcgagcgcgttcctgccccgccacagccgaagctcccagcgtcctcctgcaggccgagctgaaggttcagcgcgccggtggagttcgacgacgaaactccgtcacgtcatacctctccgcctcccgtcttccagacgtctccaatcagggctcccagcgtctcggagaagaggagcagcacggcacggcggctgtggcgaggaaggctcctgtcccatcccaacccagttagcagccgcccaaggaggaggagattcaatcggcgtgcgggcgtccgcggtccatccatcgatccaattccaatctgcagggaaaggaatattgtagaacacgttaacaaaattgctccaaggttccaggagggaatcaaggccttctcaggcagcccaattgttggggagatacgcggtctgggactgatacttggaactgaatttgtcgacaacaaatctccaaatgatccatttccagctgaatggggttcattgttttattgatctcatgtccccttttcaaacatttcagaagtgttggttcgatatttggcacggagtgcgagaagcgtgggatgctcatcagggtggctggggacagcatcatgctgtcacccccgctgatcatgactcccaatgaagtcgaagaaatcataagcaaattcggcgatgctctaaaggctacagaggaacggattggagaactgaaatccaggaagaattagccgatgctgctggttgtaacgacgacatgcaattgaaaatgataattgatcttttttatgggcgaagtgttgaagatggctttggtgaaggaaatgtcttgttagcatcaagtaagtggcgacatcacaacccctacaagcttgtgccttaaaacaagaggatacaagaagttggagtgcttttgtgaaggcttttgcgaatcacttaaagcgttagtacttttgtgaatgattttgtaaagtgtttgcaaatatgtgcaaaacataataacatgtgtaggttttgtgaatgattttgttgtggtgtctgttgatggtttatgtatgtggatctatcattgtgcaatactaattaaatttgtatatctatgtgattatgtgtataaaaattggtgatttgtg

SEQ ID NO: 204263 - DNA, 1371 bp, Zea Mays
ggtcgccacctaaacctaggcgcgccactctccctggcagccgccgtttgttgtcgcgagcgcgttcctgccccgccacagccgaagctcccagcgtcctcctgcaggccgagctgaaggttcagcgcgccggtggagttcgacgacgaaactccgtcacgtcatacctctccgcctcccgtcttccagacgtctccaatcagggctcccagcgtctcggagaagaggagcagcacggcacggcggctgtggcgaggaaggctcctgtcccatcccaacccagttagcagccgcccaaggaggaggagattcaatcggcgtgcgggcgtccgcggtccatccatcgatccaattccaatctgcaggtctctgcgtcacggcttgttcgtggaggagaggtcgagaatttactaagtcaacatcttgttttaggtcattactgcatttggaagactagggacaatgtttggatgtgatatgtataatattaaaccagatcttgtttccatagccaaggctctttcttctgcatatatgccaattggagcaattctcgttagcccagaaataacggatgtaatttattctcagagcaataaacttgggaaaggaatattgtagaacacgttaacaaaattgctccaaggttccaggagggaatcaaggccttctcaggcagcccaattgttggggagatacgcggtctgggactgatacttggaactgaatttgtcgacaacaaatctccaaatgatccatttccagctgaatggggttcattgttttattgatctcatgtccccttttcaaacatttcagaagtgttggttcgatatttggcacggagtgcgagaagcgtgggatgctcatcagggtggctggggacagcatcatgctgtcacccccgctgatcatgactcccaatgaagtcgaagaaatcataagcaaattcggcgatgctctaaaggctacagaggaacggattggagaactgaaatccaggaagaattagccgatgctgctggttgtaacgacgtgttgaagatggctttggtgaaggaaatgtcttgttagcatcaagtaagtggcgacatcacaacccctacaagcttgtgccttaaaacaagaggatacaagaagttggagtgcttttgtgaaggcttttgcgaatcacttaaagcgttagtacttttgtgaatgattttgtaaagtgtttgcaaatatgtgcaaaacataataacatgtgtaggttttgtgaatgattttgttgtggtgtctgttgatggtttatgtatgtggatctatcattgtgcaatactaattaaatttgtatatctatgtgattatgtgtataaaaattggtgatttgtg

SEQ ID NO: 204264 - DNA, 1392 bp, Zea Mays
ggtcgccacctaaacctaggcgcgccactctccctggcagccgccgtttgttgtcgcgagcgcgttcctgccccgccacagccgaagctcccagcgtcctcctgcaggccgagctgaaggttcagcgcgccggtggagttcgacgacgaaactccgtcacgtcatacctctccgcctcccgtcttccagacgtctccaatcagggctcccagcgtctcggagaagaggagcagcacggcacggcggctgtggcgaggaaggctcctgtcccatcccaacccagttagcagccgcccaaggaggaggagattcaatcggcgtgcgggcgtccgcggtccatccatcgatccaattccaatctgcaggctctttcttctgcatatatgccaattggagcaattctcgttagcccagaaataacggatgtaatttattctcagagcaataaacttgggaaaggaatattgtagaacacgttaacaaaattgctccaaggttccaggagggaatcaaggccttctcaggcagcccaattgttggggagatacgcggtctgggactgatacttggaactgaatttgtcgacaacaaatctccaaatgatccatttccagctgaatggggttcattgttttattgatctcatgtccccttttcaaacatttcagaagtaatccaactttaaggcggcccaaaattgttctctgaagagttaacttaatgttatgaattagcgtagcatgtcgaggcaaaattcgtcactatccccagagttagaagaaaccttgccgagttgattaatggtgacagtatattgattttattacgactggtaactccaggtgttggttcgatatttggcacggagtgcgagaagcgtgggatgctcatcagggtggctggggacagcatcatgctgtcacccccgctgatcatgactcccaatgaagtcgaagaaatcataagcaaattcggcgatgctctaaaggctacagaggaacggattggagaactgaaatccaggaagaattagccgatgctgctggttgtaacgacgtgttgaagatggctttggtgaaggaaatgtcttgttagcatcaagtaagtggcgacatcacaacccctacaagcttgtgccttaaaacaagaggatacaagaagttggagtgcttttgtgaaggcttttgcgaatcacttaaagcgttagtacttttgtgaatgattttgtaaagtgtttgcaaatatgtgcaaaacataataacatgtgtaggttttgtgaatgattttgttgtggtgtctgttgatggtttatgtatgtggatctatcattgtgcaatactaattaaatttgtatatctatgtgattatgtgtataaaaattggtgatttgtg

SEQ ID NO: 204265 - DNA, 1992 bp, Zea Mays
cttcttctagtcttttgttctcattcattaggtaatttaggattgtatgtgaacgtctgaagatagtgatatattggtgatttgtaaatctctttcaaaatatggtattgagctatccctgttactagtttatttgagaaattgtattagggagttgctatgaactaaccctaatcacacacactcctaactcccatcccatcccatcccatcccagccgccacagctgctgctcgccctctccctgtctcctctctctttccagccacggtttccccttcccccatccgcgcgctagggcacgaggcaaatctgtggccctctcctagtctcctgaagtccgactcagccgtctcccagctcccgctcgctcgaactcgggttggggaggcacggagtcactgaccccttcgcgttaggcggtgcccttaccggctcttcgtctaaggtgtagtcaagctgccggccacgcccggcacccccctatccagtacaaggccttctccgagatccagtacaaggtcgtcgtctccaagatctgaccccgacgctagtgaggagggaagagtgggtggacgaagtgggggaggatgagcgaggagaggccggtgccgcggcgggagagcccgtggggtctgcctgagggcgacacgcggcagcccaaggctcaccgctgcaacgaccgcgccgaggacgtcgtccaggcttgctttgaagggaacccattcaagacagttccaggcccatttaagctcttctggcaatgcatgcgctcaaaacctggggaggaaccaaccgagccctatacctacctgcagctagatcctccgagaagggtggaagtgaatctggagcaaacaggaagtgaaccttgaacgagcatgcctagtttagcatctcgtgcctatttgtcttcacctttcgagcagactttttcctcctagggatcacatcatgtgagcacaaagctgcatatgtttggatgtttatataatctacctaataaaccgtgatccccagagctgcctgtccaggctgccaactccttgaaatttgctgatgctggtgtaagaattgtgcccctttcttctgataaatggtgcacgcccaagtccacatgccgccagacatcagagctagtgcatctgaatgcttccactatgggtctaagcagcagtatttcggtccagaaaaccttgtatgaggttttatctgtgagcgaagacgctacgtatgatgaaattcgtgcagcatacagtgtgcagaaagcatgggaaatcctacgccatcctacatctagagcagactacgataagcagctgcagtcatccagacagaacatcgagatcatcgcatctgaagtccaagtcggggatatgatcattgagagcactgccgatgccgatactgtagagctgtcgtacccatgcaggtgcggtgattacttttccatcacttcgtgcgagcttagcgggatgggaatttccgtcagtggagatggagatggagaggtagagctgcaggcgtccgattctccgtcggcttccgttgttctgggctgcggctcttgttctctcaaaatacggttggttttatagatggaactccatgatatatattgtgtgcggctcagcaatgctcactttaaactttagcagccaccacatgtttctcaaacactatgcctcctggtctgccgaaatcaaaatagtgcagcttaaccttgcctgttcctatttccgggagagatgtcgagtttgtaacctgatggtggttgcgttgtgataaatgacgttttttgaccgttgttatcagctaaccaccgctgtcgaatccagctgctgggaaatccaaagttgttccggtggtggttattcggtagatgagatcttcagttaatgttgttttacaggcccgatttaatggtcccatctgccagccattcacctaaataatagctaaactaatgttttggcatcagctaaatgagtg

SEQ ID NO: 204266 - DNA, 2323 bp, Zea Mays
cattcattaggtaatttaggattgtatgtgaacgtctgaagatagtgatatattggtgatttgtaaatctctttcaaaatatggtattgagctatccctgttactagtttatttgagaaattgtattagggagttgctatgaactaaccctaatcacacacactcctaactcccatcccatcccatcccatcccagccgccacagctgctgctcgccctctccctgtctcctctctctttccagccacggtttccccttcccccatccgcgcgctagggcacgaggcaaatctgtggccctctcctagtctcctgaagtccgactcagccgtctcccagctcccgctcgctcgaactcgggttggggaggcacggagtcactgaccccttcgcgttaggcggtgcccttaccggctcttcgtctaaggtgtagtcaagctgccggccacgcccggcacccccctatccagtacaaggccttctccgagatccagtacaaggtcgtcgtctccaagatctgaccccgacgctagtgaggagggaagagtgggtggacgaagtgggggaggatgagcgaggagaggccggtgccgcggcgggagagcccgtggggtctgcctgagggcgacacgcggcagcccaaggctcaccgctgcaacgaccgcgccgaggacgtcgtccaggcttgctttgaagggaacccattcaagacagttccaggcccatttaagctcttctggcaatgcatgcgctcaaaacctggaggtatttcacgaatggacctgtggttttcagggaggaaccaaccgagccctatacctacctgcagctagatcctccgagaagggtggaagtgaatctggagcaaacaggaagtgaaccttgaacgagcatgcctagtttagcatctcgtgcctatttgtcttcacctttcgagcagactttttcctcctagggatcacatcatgtgagcacaaagctgcatatgtttggatgtttatataatctacctaataaaccgtgatccccagagctgcctgtccaggctgccaactccttgaaatttgctgatgctggtgtaagaattgtgcccctttcttctgataaatggtgcacgcccaagtccacatgccgccagacatcagagctagtgcatctgaatggttgtgctcctgttctgaaacagagtgatccatatggtttttgtgtgtttgtccatactttcatatagcatactagtgtagccgtacagtttacaagctgtatataaggccatccatccattctccagttctcttggtgcatctgaactattttgtcttaagaggggcatttggccccttggttgccaaacacccgagtgaaaaaaaaatctcccagggaattgaagtgtcatttaaaatccccttggtgcattactttcctggcttttttgtccatttgttgccaaactagccctaactgttctttttaccccttccagcttccactatgggtctaagcagcagtatttcggtccagaaaaccttgtatgaggttttatctgtgagcgaagacgctacgtatgatgaaattcgtgcagcatacagtgtgcagaaagcatgggaaatcctacgccatcctacatctagagcagactacgataagcagctgcagtcatccagacagaacatcgagatcatcgcatctgaagtccaagtcggggatatgatcattgagagcactgccgatgccgatactgtagagctgtcgtacccatgcaggtgcggtgattacttttccatcacttcgtgcgagcttagcgggatgggaatttccgtcagtggagatggagatggagaggtagagctgcaggcgtccgattctccgtcggcttccgttgttctgggctgcggctcttgttctctcaaaatacggttggttttatagatggaactccatgatatatattgtgtgcggctcagcaatgctcactttaaactttagcagccaccacatgtttctcaaacactatgcctcctggtctgccgaaatcaaaatagtgcagcttaaccttgcctgttcctatttccgggagagatgtcgagtttgtaacctgatggtggttgcgttgtgataaatgacgttttttgaccgttgttatcagctaaccaccgctgtcgaatccagctgctgggaaatccaaagttgttccggtggtggttattcggtagatgagatcttcagttaatgttgttttacaggcccgatttaatggtcccatctgccagccattcacctaaataatagctaaactaatgttttggcatcagctaaatgagtg

SEQ ID NO: 204267 - DNA, 2264 bp, Zea Mays
attgtatgtgaacgtctgaagatagtgatatattggtgatttgtaaatctctttcaaaatatggtattgagctatccctgttactagtttatttgagaaattgtattagggagttgctatgaactaaccctaatcacacacactcctaactcccatcccatcccatcccatcccagccgccacagctgctgctcgccctctccctgtctcctctctctttccagccacggtttccccttcccccatccgcgcgctagggcacgaggcaaatctgtggccctctcctagtctcctgaagtccgactcagccgtctcccagctcccgctcgctcgaactcgggttggggaggcacggagtcactgaccccttcgcgttaggcggtgcccttaccggctcttcgtctaaggtgtagtcaagctgccggccacgcccggcacccccctatccagtacaaggccttctccgagatccagtacaaggtcgtcgtctccaagatctgaccccgacgctagtgaggagggaagagtgggtggacgaagtgggggaggatgagcgaggagaggccggtgccgcggcgggagagcccgtggggtctgcctgagggcgacacgcggcagcccaaggctcaccgctgcaacgaccgcgccgaggacgtcgtccaggcttgctttgaagggaacccattcaagacagttccaggcccatttaagctcttctggcaatgcatgcgctcaaaacctggggaggaaccaaccgagccctatacctacctgcagctagatcctccgagaagggtggaagtgaatctggagcaaacaggaagtgaaccttgaacgagcatgcctagtttagcatctcgtgcctatttgtcttcacctttcgagcagactttttcctcctagggatcacatcatgtgagcacaaagctgcatatgtttggatgtttatataatctacctaataaaccgtgatccccagagctgcctgtccaggctgccaactccttgaaatttgctgatgctggtgtaagaattgtgcccctttcttctgataaatggtgcacgcccaagtccacatgccgccagacatcagagctagtgcatctgaatggttgtgctcctgttctgaaacagagtgatccatatggtttttgtgtgtttgtccatactttcatatagcatactagtgtagccgtacagtttacaagctgtatataaggccatccatccattctccagttctcttggtgcatctgaactattttgtcttaagaggggcatttggccccttggttgccaaacacccgagtgaaaaaaaaatctcccagggaattgaagtgtcatttaaaatccccttggtgcattactttcctggcttttttgtccatttgttgccaaactagccctaactgttctttttaccccttccagcttccactatgggtctaagcagcagtatttcggtccagaaaaccttgtatgaggttttatctgtgagcgaagacgctacgtatgatgaaattcgtgcagcatacagaaagcatgggaaatcctacgccatcctacatctagagcagactacgataagcagctgcagtcatccagacagaacatcgagatcatcgcatctgaagtccaagtcggggatatgatcattgagagcactgccgatgccgatactgtagagctgtcgtacccatgcaggtgcggtgattacttttccatcacttcgtgcgagcttagcgggatgggaatttccgtcagtggagatggagatggagaggtagagctgcaggcgtccgattctccgtcggcttccgttgttctgggctgcggctcttgttctctcaaaatacggttggttttatagatggaactccatgatatatattgtgtgcggctcagcaatgctcactttaaactttagcagccaccacatgtttctcaaacactatgcctcctggtctgccgaaatcaaaatagtgcagcttaaccttgcctgttcctatttccgggagagatgtcgagtttgtaacctgatggtggttgcgttgtgataaatgacgttttttgaccgttgttatcagctaaccaccgctgtcgaatccagctgctgggaaatccaaagttgttccggtggtggttattcggtagatgagatcttcagttaatgttgttttacaggcccgatttaatggtcccatctgccagccattcacctaaataatagctaaactaatgttttggcatcagctaaatgagtg

SEQ ID NO: 204268 - DNA, 1944 bp, Zea Mays
attgtatgtgaacgtctgaagatagtgatatattggtgatttgtaaatctctttcaaaatatggtattgagctatccctgttactagtttatttgagaaattgtattagggagttgctatgaactaaccctaatcacacacactcctaactcccatcccatcccatcccatcccagccgccacagctgctgctcgccctctccctgtctcctctctctttccagccacggtttccccttcccccatccgcgcgctagggcacgaggcaaatctgtggccctctcctagtctcctgaagtccgactcagccgtctcccagctcccgctcgctcgaactcgggttggggaggcacggagtcactgaccccttcgcgttaggcggtgcccttaccggctcttcgtctaaggtgtagtcaagctgccggccacgcccggcacccccctatccagtacaaggccttctccgagatccagtacaaggtcgtcgtctccaagatctgaccccgacgctagtgaggagggaagagtgggtggacgaagtgggggaggatgagcgaggagaggccggtgccgcggcgggagagcccgtggggtctgcctgagggcgacacgcggcagcccaaggctcaccgctgcaacgaccgcgccgaggacgtcgtccaggcttgctttgaagggaacccattcaagacagttccaggcccatttaagctcttctggcaatgcatgcgctcaaaacctggggaggaaccaaccgagccctatacctacctgcagctagatcctccgagaagggtggaagtgaatctggagcaaacaggaagtgaaccttgaacgagcatgcctagtttagcatctcgtgcctatttgtcttcacctttcgagcagactttttcctcctagggatcacatcatgtgagcacaaagctgcatatgtttggatgtttatataatctacctaataaaccgtgatccccagagctgcctgtccaggctgccaactccttgaaatttgctgatgctggtgtaagaattgtgcccctttcttctgataaatggtgcacgcccaagtccacatgccgccagacatcagagctagtgcatctgaatgcttccactatgggtctaagcagcagtatttcggtccagaaaaccttgtatgaggttttatctgtgagcgaagacgctacgtatgatgaaattcgtgcagcatacagaaagcatgggaaatcctacgccatcctacatctagagcagactacgataagcagctgcagtcatccagacagaacatcgagatcatcgcatctgaagtccaagtcggggatatgatcattgagagcactgccgatgccgatactgtagagctgtcgtacccatgcaggtgcggtgattacttttccatcacttcgtgcgagcttagcgggatgggaatttccgtcagtggagatggagatggagaggtagagctgcaggcgtccgattctccgtcggcttccgttgttctgggctgcggctcttgttctctcaaaatacggttggttttatagatggaactccatgatatatattgtgtgcggctcagcaatgctcactttaaactttagcagccaccacatgtttctcaaacactatgcctcctggtctgccgaaatcaaaatagtgcagcttaaccttgcctgttcctatttccgggagagatgtcgagtttgtaacctgatggtggttgcgttgtgataaatgacgttttttgaccgttgttatcagctaaccaccgctgtcgaatccagctgctgggaaatccaaagttgttccggtggtggttattcggtagatgagatcttcagttaatgttgttttacaggcccgatttaatggtcccatctgccagccattcacctaaataatagctaaactaatgttttggcatcagctaaatgagtg

SEQ ID NO: 204269 - DNA, 2070 bp, Zea Mays
ctctttcaaaatatggtattgagctatccctgttactagtttatttgagaaattgtattagggagttgctatgaactaaccctaatcacacacactcctaactcccatcccatcccatcccatcccagccgccacagctgctgctcgccctctccctgtctcctctctctttccagccacggtttccccttcccccatccgcgcgctagggcacgaggcaaatctgtggccctctcctagtctcctgaagtccgactcagccgtctcccagctcccgctcgctcgaactcgggttggggaggcacggagtcactgaccccttcgcgttaggcggtgcccttaccggctcttcgtctaaggtgtagtcaagctgccggccacgcccggcacccccctatccagtacaaggccttctccgagatccagtacaaggtcgtcgtctccaagatctgaccccgacgctagtgaggcttgctttgaagggaacccattcaagacagttccaggcccatttaagctcttctggcaatgcatgcgctcaaaacctggggaggaaccaaccgagccctatacctacctgcagctagatcctccgagaagggtggaagtgaatctggagcaaacaggaagtgaaccttgaacgagcatgcctagtttagcatctcgtgcctatttgtcttcacctttcgagcagactttttcctcctagggatcacatcatgtgagcacaaagctgcatatgtttggatgtttatataatctacctaataaaccgtgatccccagagctgcctgtccaggctgccaactccttgaaatttgctgatgctggtgtaagaattgtgcccctttcttctgataaatggtgcacgcccaagtccacatgccgccagacatcagagctagtgcatctgaatggttgtgctcctgttctgaaacagagtgatccatatggtttttgtgtgtttgtccatactttcatatagcatactagtgtagccgtacagtttacaagctgtatataaggccatccatccattctccagttctcttggtgcatctgaactattttgtcttaagaggggcatttggccccttggttgccaaacacccgagtgaaaaaaaaatctcccagggaattgaagtgtcatttaaaatccccttggtgcattactttcctggcttttttgtccatttgttgccaaactagccctaactgttctttttaccccttccagcttccactatgggtctaagcagcagtatttcggtccagaaaaccttgtatgaggttttatctgtgagcgaagacgctacgtatgatgaaattcgtgcagcatacagaaagcatgggaaatcctacgccatcctacatctagagcagactacgataagcagctgcagtcatccagacagaacatcgagatcatcgcatctgaagtccaagtcggggatatgatcattgagagcactgccgatgccgatactgtagagctgtcgtacccatgcaggtgcggtgattacttttccatcacttcgtgcgagcttagcgggatgggaatttccgtcagtggagatggagatggagaggtagagctgcaggcgtccgattctccgtcggcttccgttgttctgggctgcggctcttgttctctcaaaatacggttggttttatagatggaactccatgatatatattgtgtgcggctcagcaatgctcactttaaactttagcagccaccacatgtttctcaaacactatgcctcctggtctgccgaaatcaaaatagtgcagcttaaccttgcctgttcctatttccgggagagatgtcgagtttgtaacctgatggtggttgcgttgtgataaatgacgttttttgaccgttgttatcagctaaccaccgctgtcgaatccagctgctgggaaatccaaagttgttccggtggtggttattcggtagatgagatcttcagttaatgttgttttacaggcccgatttaatggtcccatctgccagccattcacctaaataatagctaaactaatgttttggcatcagctaaatgagtg

SEQ ID NO: 204270 - DNA, 1386 bp, Zea Mays
cacactcctaactcccatcccatcccatcccatcccagccgccacagctgctgctcgccctctccctgtctcctctctctttccagccacggtttccccttcccccatccgcgcgctagggcacgaggcaaatctgtggccctctcctagtctcctgaagtccgactcagccgtctcccagctcccgctcgctcgaactcgggttggggaggcacggagtcactgaccccttcgcgttaggcggtgcccttaccggctcttcgtctaaggtgtagtcaagctgccggccacgcccggcacccccctatccagtacaaggccttctccgagatccagtacaaggtcgtcgtctccaagatctgaccccgacgctagtgaggcttgctttgaagggaacccattcaagacagttccaggcccatttaagctcttctggcaatgcatgcgctcaaaacctggcttccactatgggtctaagcagcagtatttcggtccagaaaaccttgtatgaggttttatctgtgagcgaagacgctacgtatgatgaaattcgtgcagcatacaggtctgctgctctgaacacacaccctgacaaggcacggacacctctcgagtcatgtgttctttccggtgagcaacaggaattttctagtgtgcagaaagcatgggaaatcctacgccatcctacatctagagcagactacgataagcagctgcagtcatccagacagaacatcgagatcatcgcatctgaagtccaagtcggggatatgatcattgagagcactgccgatgccgatactgtagagctgtcgtacccatgcaggtgcggtgattacttttccatcacttcgtgcgagcttagcgggatgggaatttccgtcagtggagatggagatggagaggtagagctgcaggcgtccgattctccgtcggcttccgttgttctgggctgcggctcttgttctctcaaaatacggttggttttatagatggaactccatgatatatattgtgtgcggctcagcaatgctcactttaaactttagcagccaccacatgtttctcaaacactatgcctcctggtctgccgaaatcaaaatagtgcagcttaaccttgcctgttcctatttccgggagagatgtcgagtttgtaacctgatggtggttgcgttgtgataaatgacgttttttgaccgttgttatcagctaaccaccgctgtcgaatccagctgctgggaaatccaaagttgttccggtggtggttattcggtagatgagatcttcagttaatgttgttttacaggcccgatttaatggtcccatctgccagccattcacctaaataatagctaaactaatgttttggcatcagctaaatgagtg

SEQ ID NO: 204271 - DNA, 2922 bp, Zea Mays
cacactcctaactcccatcccatcccatcccatcccagccgccacagctgctgctcgccctctccctgtctcctctctctttccagccacggtttccccttcccccatccgcgcgctagggcacgaggcaaatctgtggccctctcctagtctcctgaagtccgactcagccgtctcccagctcccgctcgctcgaactcgggttggggaggcacggagtcactgaccccttcgcgttaggcggtgcccttaccggctcttcgtctaaggtgtagtcaagctgccggccacgcccggcacccccctatccagtacaaggccttctccgagatccagtacaaggtcgtcgtctccaagatctgaccccgacgctagtgaggcttgctttgaagggaacccattcaagacagttccaggcccatttaagctcttctggcaatgcatgcgctcaaaacctgggtatgtgtaccttgttattatttatgcgcttaccttctggcatatctcatgattctcatctgatctgcaataagatacgagacaaatatttgatggttctgatgcattaagcactaggttgatgataaatagaaatagacgagctcttatcggggaaatctaaactagcatgtactgactagagtgaagttaattgtaaggagggccactttatcgtgtttatatctttgctatttatttactgaggaggatgtcaactagtaactgcagagatcgctcatgaaggttaatcttgcaagagataaggttttgctggtttcggaactatttactaaggagcaacgttgtgcaggatattgattagtaactacgcatggctttgctcaatttttattttccctgtaactgacatagttactgcattgtgtgcattagtttataatgtggattttggcattctcatagaagctatatgagttccctctccattgatctgaatcaccatagttcatggagtgactgcctgctagtttttggactgtctgtgccatctggtagttagtttctctcagaaaatggccttttgggttgcaagctttcacatgtgatgcattgacgttgcatcttttgtgaaagttgttcttttagttatattgttgggaaggattcttttatgcatagggtagatgtgaaacctgacatatgattagtcagaatatgatatgcatctcagcctggttagtcaataggcaaagttgggtgtactgaggcaacctgtctggcagcttccagttgaagcaagctaatgtgagaacagcttataagcaagtaattgctactgaactgaaatgaacaagtatggttttctgctatgacacaacttgaaaagggtgtgaaaacctctaatgtcatgacattttttatatcgaacataaacttattcctataagattaaaagttgaatacttcagaaaactggtgtacagaagacaccaacttgaggacttcattcaagcttgctgcatgcagccagatgatccaactaggataatggtttgacttgtttaggcaagcatctggttcacaacttaggcatggcccatggcattgtgacaggtggcccttagccttaggtgtgccaactttctaagttacggtgaccttttttcgctgccacaagctagacaaaaaaaagtgtgggaacaccaggttttctaagccgaatgatccaaaaagactgctggattcttcttcgtgcttatttcaatattgaaaattttgcattgtgtattatcaccctgaagatttattcccctttttcattgtcatcagaggtatttcacgaatggacctgtggttttcagggaggaaccaaccgagccctatacctacctgcagctagatcctccgagaagggtggaagtgaatctggagcaaacaggaagtgaaccttgaacgagcatgcctagtttagcatctcgtgcctatttgtcttcacctttcgagcagactttttcctcctagggatcacatcatcttccactatgggtctaagcagcagtatttcggtccagaaaaccttgtatgaggttttatctgtgagcgaagacgctacgtatgatgaaattcgtgcagcatacaggtctgctgctctgaacacacaccctgacaaggcacggacacctctcgagtcatgtgttctttccggtgagcaacaggaattttctagtgtgcagaaagcatgggaaatcctacgccatcctacatctagagcagactacgataagcagctgcagtcatccagacagaacatcgagatcatcgcatctgaagtccaagtcggggatatgatcattgagagcactgccgatgccgatactgtagagctgtcgtacccatgcaggtgcggtgattacttttccatcacttcgtgcgagcttagcgggatgggaatttccgtcagtggagatggagatggagaggtagagctgcaggcgtccgattctccgtcggcttccgttgttctgggctgcggctcttgttctctcaaaatacggttggttttatagatggaactccatgatatatattgtgtgcggctcagcaatgctcactttaaactttagcagccaccacatgtttctcaaacactatgcctcctggtctgccgaaatcaaaatagtgcagcttaaccttgcctgttcctatttccgggagagatgtcgagtttgtaacctgatggtggttgcgttgtgataaatgacgttttttgaccgttgttatcagctaaccaccgctgtcgaatccagctgctgggaaatccaaagttgttccggtggtggttattcggtagatgagatcttcagttaatgttgttttacaggcccgatttaatggtcccatctgccagccattcacctaaataatagctaaactaatgttttggcatcagctaaatgagtg

SEQ ID NO: 204272 - DNA, 546 bp, Zea Mays
tcccatcccatcccatcccagccgccacagctgctgctcgccctctccctgtctcctctctctttccagccacggtttccccttcccccatccgcgcgctagggcacgaggcaaatctgtggccctctcctagtctcctgaagtccgactcagccgtctcccagctcccgctcgctcgaactcgggttggggaggcacggagtcactgaccccttcgcgttaggcggtgcccttaccggctcttcgtctaaggtgtagtcaagctgccggccacgcccggcacccccctatccagtacaaggccttctccgagatccagtacaaggtcgtcgtctccaagatctgaccccgacgctagtgaggagggaagagtgggtggacgaagtgggggaggatgagcgaggagaggccggtgccgcggcgggagagcccgtggggtctgcctgagggcgacacgcggcagcccaaggctcaccgctgcaacgaccgcgccgaggacgtcgtccaggatggaataaaccccatatatatgtcgaggaacacaag

SEQ ID NO: 204273 - DNA, 2164 bp, Zea Mays
agaaaactagcccagcccatgtatatccaccggcactcggcacgaagtccatagccagcgaaactcccgaaaccgtaccaaccagacaattcaccatggcggcgccggcgcaggcgcaggcgcaggtcctgcctctcctccggtggagccggagcgcctccttcctctgcgcctcgtcgcgccgcctcttctccgccctccaacgcccctctgccgctgctcgctgcgaggccggctccaaggccatgctcaaggggatggactactcggaactcgagaattgggtgcaggcgcaggggtttcggccaggccaggccatgatgctgtggaaatgcctgtacgggaacaacgtttgggctcattgctacgacgagttggctggtttaaataaggatttcaggaagatgataaccgagcatgctgatctcaaggcattaactatgaaggacatccatattgcatcagatggaacccgtaaggatgttacagatattgttctctcttgaagatggttcagtgattgaaacagttatcattccttgcgctaggggcaggacaactatctgtgtttcaagccaagttggttgtgccatgaactgccagttttgtttcactggaaggatgggtttgagaaaacatctctcgacagctgaaattgtcgagcaggctgtgtttgctcgtaggttattctcagatgaattgggatcaattaacaatgttgtatttatgggcatgggtgaaccatttcacaatattgacaatgtaataaaagcctcagcaataatggttgatgagcaaggtcttcattttagccctcgcaaggttactgtctccacaagtggtcttgtccctcagttaaaacgcttcctccaggaatccaattgctccctggctgtcagtcttaatgcgacaacagatgaggttaggaactggataatgcccataaacagaaagtacaatcttaacttgcttcttggcactttaagggaggaacttaacctcagacaaaaacaaatagtgctatttgaatatgtcatgctttctggagtgaacgacaggtcagatatctgctttagtgtctttgctgactgtttttgtatgttatgaatctcttagcataggttgcatataaatctccttgcaatagataactttctcccctatattcaattgttcataaggtttttctttttctatctggtccaggcatacatgtatgcctactaacgacagtctatagttgttattgtaatgcgtagcccagtaggtaaattgaatcttctctcccttcctactccgttggtaaactgaatcgttttctcagtattaacctttttcgaagctatcacagttaactagtacctgcttccaccctgaaccgtatatttttgtttgatttactgtgcttgcagtatggatgatgccaagaggcttatagagctagtccaagggatcccatgcaagataaacctcatctctttcaatccccacggcggttcccaattcaagcccacaccagacgataagataattgagttccgcaacgttttaattcaaggtggcctcactgtttttgttcggctcagcagaggggatgatcagatggctgcctgcgggcagctaggagagcctggaggctatcagctacctctgctccgtgtgcccgagaaatttcaggtcgccttgtgatgctaaacagtgcatacagtaaaaatggtcctgagcagcttgacgaacacacggagtaattggcttggaacgacgattcgatcgtgcaaatcttgcaagttctaccgccttcggaagcttgtgtggacttctgcaataacgtgcaaatctgaacctgggtacttgtgcgacaacacatttagacatggtgttgcttctgctagtacgtggtgtacccaaaccaaattcgataagattattattattataaattggtattttctggcaaatcgttgctgtataagacattaacagtgtaacatgctttcacttggtacttcgaaaaatatggaatgaacttatacggtaatcagcaatgagagaagaatctggaggacaaggttgcttgcctgaatgagataccttaaccactaaggtgtgcatggtactagccacctacacacctgatcaccccaaatgaaagaaagaaaaaaaa

SEQ ID NO: 204274 - DNA, 1822 bp, Zea Mays
aacaacccagaaagaaaactagcccagcccatgtatatccaccggcactcggcacgaagtccatagccagcgaaactcccgaaaccgtaccaaccagacaattcaccatggcggcgccggcgcaggcgcaggcgcaggtcctgcctctcctccggtggagccggagcgcctccttcctctgcgcctcgtcgcgccgcctcttctccgccctccaacgcccctctgccgctgctcgctgcgaggccggctccaaggccatgctcaaggggatggactactcggaactcgagaattgggtgcaggcgcaggggtttcggccaggccaggccatgatgctgtggaaatgcctgtacgggaacaacgtttgggctcattgctacgacgagttggctggtttaaataaggatttcaggaagatgataaccgagcatgctgatctcaaggcattaactatgaaggacatccatattgcatcagatggaacccgtaaggatgttacagatattgttctctcttgaagatggttcagtgattgaaacagttatcattccttgcgctaggggcaggacaactatctgtgtttcaagccaagttggttgtgccatgaactgccagttttgtttcactggaaggatgggtttgagaaaacatctctcgacagctgaaattgtcgagcaggctgtgtttgctcgtaggttattctcagatgaattgggatcaattaacaatgttgtatttatgggcatgggtgaaccatttcacaatattgacaatgtaataaaagcctcagcaataatggttgatgagcaaggtcttcattttagccctcgcaaggttactgtctccacaagtggtcttgtccctcagttaaaacgcttcctccaggaatccaattgctccctggctgtcagtcttaatgcgacaacagatgaggttaggaactggataatgcccataaacagaaagtacaatcttaacttgcttcttggcactttaagggaggaacttaacctcagacaaaaacaaatagtgctatttgaatatgtcatgctttctggagtgaacgacagtatggatgatgccaagaggcttatagagctagtccaagggatcccatgcaagataaacctcatctctttcaatccccacggcggttcccaattcaagcccacaccagacgataagataattgagttccgcaacgttttaattcaaggtggcctcactgtttttgttcggctcagcagaggggatgatcagatggctgcctgcgggcagctaggagagcctggaggctatcagctacctctgctccgtgtgcccgagaaatttcaggtcgccttgtgatgctaaacagtgcatacagtaaaaatggtcctgagcagcttgacgaacacacggagtaattggcttggaacgacgattcgatcgtgcaaatcttgcaagttctaccgccttcggaagcttgtgtggacttctgcaataacgtgcaaatctgaacctgggtacttgtgcgacaacacatttagacatggtgttgcttctgctagtacgtggtgtacccaaaccaaattcgataagattattattattataaattggtattttctggcaaatcgttgctgtataagacattaacagtgtaacatgctttcacttggtacttcgaaaaatatggaatgaacttatacggtaatcagcaatgagagaagaatctggaggacaaggttgcttgcctgaatgagataccttaaccactaaggtgtgcatggtactagccacctacacacctgatcaccccaaatgaaagaaagaaaaaaaa

SEQ ID NO: 204275 - DNA, 724 bp, Zea Mays
atctttctagaaggattttgcagaaggattttgcttggcatcaaggaacagtgcaaactagaagaaacccccgtcatcagcgacctctccccaacggcgccgacgatggcgcaacagcagacgcagctaaccactggctcgggcatcctggatgccgtcccgctcttcgtcgtcatcctcctcgcggcccacgtcctggccctcgtgttctggatgtacaagctggcttccgagaagcaaccaccccggaggaagacacagtgacggcgccgatctacgccatcggcgatccttcgctagcctctttatcgggaatacgcgataatcatgaattgcaacatctttatctatgtctgtatttatgtttctgttgttagtacatgtgtctgaatatgacctgaacattttgatacttcagctgtaatgtgcgttcctccttttctctacatttttagttggtggcatgtgatacttgtcgcatttaacaattttgacgtgcaaataccattatatttagcaagtagtagccatgtatactttgtggcatgcttcgttgtagaagctgttcaatcccacactccattagactatctccagcagcttacccatccccatacctgtattcaaactctactctgcgaacagtgtagtctacagtgcaaaacaatgcatgtgggtaaattttaggtaatttgctggagtcgacctgatcgaccaacctcat

SEQ ID NO: 204276 - DNA, 2579 bp, Zea Mays
ctccactgttggatggctgttgggccggccgataaacaattttcccgttcgagcgtctcgcttctcccgttcccgatcccgatcccgatcccgatcccgatccctgcgtcctttcgcttatcccgttgatccggcgttcactcgtgcgatctcctgtggcgacaactgggcgatcgacgccgccgctgctgtcgccgtcctatacgagaggtgcgcaggcgttcgttggtcccttcgccaggcttttgtctacccttcgccgacgacgagcacaaatttctttgtctgacttgtggaagcctcttacaactattgtacaaggctgctgtattgaagatgtctgagttccttgacctagagctacaagatgggataaggatgccctggaatgttattccaggcacaaaacaggagactgtgaactgtgtgattcctgtttccgctatctacacacctttgaaaccaatttctgatatccctgttcttccatattcacctcttcgctgtcgcatgtgtcgttccatcctcaaccctttctccattgttgactatgttgctaagatttgggtctgttcattctgctttcaacgcaaccagttccctcaacactactcttcgatctcagaaaataatctccctgcggaactctttcctcagtacaccaccgtcgagtacatatcttcaactgaaactggtcctatagttccaccggttttcatttttgttgtagatacttgcatgattgaagaagaaattggttatttgaagtctgcactggcacaagctgttgagctattgccagataattctcttgttggattcattacgttcgggacgtatgtgcaggttcatgaattgggttttggcttattgccaaaatcatatgtattcaaaggaacaaaggaggtcaccaaggagcaaatattggaacaaatgtgcttttttgcggggaagaaaatgcctaccacaggcgtgattgctggtaccagagatggcctttcatctgagagcatctctagatttctgctgcctgcttctgaatgcgagtttgtattgaactcagttatagaagaaatacaaaaggacccttggcctgttccagctgatcagcgtgcatctaggtgcactggagctgccttaagtgttgcagccaatctccttggggtttgtgttcctggatcaggtgctaggataatggcatttgttggtggtccatctacggagggccctggtcctattgtatccaaatccttatcagagcccattcgttcacacaaagaccttgataaagactcggcaccactctatgataaagctgttaagttttatgatcaaattgcaaagcagcttgtgcaccaagggcatgtgctggatttgtttgcttgtgcagttgaccaggttggagtcgctgaaatgaaggttgcgattgagaagactggaggaattgttgtccttgctgaaagttttggtcattctgttttcaaagactcacttctccgcatctttcagtcaacagatgacaaccttggtttatcattcaatggtattcttgaaattaactgttcaaaggatgtaaaggttcaaggcatcattggaccctgttcttccctggagaagaaaagtcctttgtcttccgacactgttattggtcaaggaaacactagcgcttggaagatgtgcggccttgacaggaagacatcactttgcttggtatatgatattgcaaaaaaagatggcccagattcaattgctcaatcagcaaacaatcagttctacttccagttcttaacctactatcagcataatgagggtcagatgagattaagatcgaccacaatctccagaagatgggtctctggtgacaaccatgtggaggaactagtagctggctttgatcaagaagctgcagctgcagtcatggcacgcttggtgtcatttaagatggaaactgaggttgattttgacccagtaaggtggcttgatcgagctttgatacgtttatgctcaaaatttggagattatcagaaggagacaccctcatcgttcagtttatccccacggctatcaatatttccccaatttatatttaatttgaggcgttctcagtttgttcaggtttttaataacagtcctgatgaaactgcgtattttaggatgatgttggacagagagaatgtaaccaatacagttgtgatgattcaaccttcacttatatcctattcatttcaatcagggccagagccagttctcttggatgcaactgcaattgcttctgacaagatccttttattggactcttattttactgttgtcatattccatggggtaaccattgcgcagtggcgaaatgctggctaccaagatcaagaaggtcacgaggtttttgctcagttgttaaaagctccacatgaggaagctaatttaataataaaggagcgatttcctgtaccccgtttggtagtctgtgatcaatatggatctcaggctcgatttttactggcgaagttaaatccatcagtgacatataactcggacaatccctcccctggtggagacgtcatattcacagatgatgtgag

SEQ ID NO: 204277 - DNA, 2569 bp, Zea Mays
cgataaacaattttcccgttcgagcgtctcgcttctcccgttcccgatcccgatcccgatcccgatcccgatccctgcgtcctttcgcttatcccgttgatccggcgttcactcgtgcgatctcctgtggcgacaactgggcgatcgacgccgccgctgctgtcgccgtcctatacgagaggtgcgcaggcgttcgttggtcccttcgccaggcttttgtctacccttcgccgacgacgagcacaagccagatttctttgtctgacttgtggaagcctcttacaactattgtacaaggctgctgtattgaagatgtctgagttccttgacctagagctacaagatgggataaggatgccctggaatgttattccaggcacaaaacaggagactgtgaactgtgtgattcctgtttccgctatctacacacctttgaaaccaatttctgatatccctgttcttccatattcacctcttcgctgtcgcatgtgtcgttccatcctcaaccctttctccattgttgactatgttgctaagatttgggtctgttcattctgctttcaacgcaaccagttccctcaacactactcttcgatctcagaaaataatctccctgcggaactctttcctcagtacaccaccgtcgagtacatatcttcaactgaaactggtcctatagttccaccggttttcatttttgttgtagatacttgcatgattgaagaagaaattggttatttgaagtctgcactggcacaagctgttgagctattgccagataattctcttgttggattcattacgttcgggacgtatgtgcaggttcatgaattgggttttggcttattgccaaaatcatatgtattcaaaggaacaaaggaggtcaccaaggagcaaatattggaacaaatgtgcttttttgcggggaagaaaatgcctaccacaggcgtgattgctggtaccagagatggcctttcatctgagagcatctctagatttctgctgcctgcttctgaatgcgagtttgtattgaactcagttatagaagaaatacaaaaggacccttggcctgttccagctgatcagcgtgcatctaggtgcactggagctgccttaagtgttgcagccaatctccttggggtttgtgttcctggatcaggtgctaggataatggcatttgttggtggtccatctacggagggccctggtcctattgtatccaaatccttatcagagcccattcgttcacacaaagaccttgataaagactcggcaccactctatgataaagctgttaagttttatgatcaaattgcaaagcagcttgtgcaccaagggcatgtgctggatttgtttgcttgtgcagttgaccaggttggagtcgctgaaatgaaggttgcgattgagaagactggaggaattgttgtccttgctgaaagttttggtcattctgttttcaaagactcacttctccgcatctttcagtcaacagatgacaaccttggtttatcattcaatggtattcttgaaattaactgttcaaaggatgtaaaggttcaaggcatcattggaccctgttcttccctggagaagaaaagtcctttgtcttccgacactgttattggtcaaggaaacactagcgcttggaagatgtgcggccttgacaggaagacatcactttgcttggtatatgatattgcaaaaaaagatggcccagattcaattgctcaatcagcaaacaatcagttctacttccagttcttaacctaaatgcaacattcagctatcagcataatgagggtcagatgagattaagatcgaccacaatctccagaagatgggtctctggtgacaaccatgtggaggaactagtagctggctttgatcaagaagctgcagctgcagtcatggcacgcttggtgtcatttaagatggaaactgaggttgattttgacccagtaaggtggcttgatcgagctttgatacgtttatgctcaaaatttggagattatcagaaggagacaccctcatcgttcagtttatccccacggctatcaatatttccccaatttatatttaatttgaggcgttctcagtttgttcaggtttttaataacagtcctgatgaaactgcgtattttaggatgatgttggacagagagaatgtaaccaatacagttgtgatgattcaaccttcacttatatcctattcatttcaatcagggccagagccagttctcttggatgcaactgcaattgcttctgacaagatccttttattggactcttattttactgttgtcatattccatggggtaaccattgcgcagtggcgaaatgctggctaccaagatcaagaaggtcacgaggtttttgctcagttgttaaaagctccacatgaggaagctaatttaataataaaggagcgatttcctgtaccccgtttggtagtctgtgatcaatatggatctcaggctcgatttttactggcgaagttaaatccatcagtgacatataactcggacaatccctcccctggtggagacgtcatattcacagatgatgtgag

SEQ ID NO: 204278 - DNA, 2569 bp, Zea Mays
aacaattttcccgttcgagcgtctcgcttctcccgttcccgatcccgatcccgatcccgatcccgatccctgcgtcctttcgcttatcccgttgatccggcgttcactcgtgcgatctcctgtggcgacaactgggcgatcgacgccgccgctgctgtcgccgtcctatacgagaggtgcgcaggcgttcgttggtcccttcgccaggcttttgtctacccttcgccgacgacgagcacaatttatttgcaggccagatttctttgtctgacttgtggaagcctcttacaactattgtacaaggctgctgtattgaagatgtctgagttccttgacctagagctacaagatgggataaggatgccctggaatgttattccaggcacaaaacaggagactgtgaactgtgtgattcctgtttccgctatctacacacctttgaaaccaatttctgatatccctgttcttccatattcacctcttcgctgtcgcatgtgtcgttccatcctcaaccctttctccattgttgactatgttgctaagatttgggtctgttcattctgctttcaacgcaaccagttccctcaacactactcttcgatctcagaaaataatctccctgcggaactctttcctcagtacaccaccgtcgagtacatatcttcaactgaaactggtcctatagttccaccggttttcatttttgttgtagatacttgcatgattgaagaagaaattggttatttgaagtctgcactggcacaagctgttgagctattgccagataattctcttgttggattcattacgttcgggacgtatgtgcaggttcatgaattgggttttggcttattgccaaaatcatatgtattcaaaggaacaaaggaggtcaccaaggagcaaatattggaacaaatgtgcttttttgcggggaagaaaatgcctaccacaggcgtgattgctggtaccagagatggcctttcatctgagagcatctctagatttctgctgcctgcttctgaatgcgagtttgtattgaactcagttatagaagaaatacaaaaggacccttggcctgttccagctgatcagcgtgcatctaggtgcactggagctgccttaagtgttgcagccaatctccttggggtttgtgttcctggatcaggtgctaggataatggcatttgttggtggtccatctacggagggccctggtcctattgtatccaaatccttatcagagcccattcgttcacacaaagaccttgataaagactcggcaccactctatgataaagctgttaagttttatgatcaaattgcaaagcagcttgtgcaccaagggcatgtgctggatttgtttgcttgtgcagttgaccaggttggagtcgctgaaatgaaggttgcgattgagaagactggaggaattgttgtccttgctgaaagttttggtcattctgttttcaaagactcacttctccgcatctttcagtcaacagatgacaaccttggtttatcattcaatggtattcttgaaattaactgttcaaaggatgtaaaggttcaaggcatcattggaccctgttcttccctggagaagaaaagtcctttgtcttccgacactgttattggtcaaggaaacactagcgcttggaagatgtgcggccttgacaggaagacatcactttgcttggtatatgatattgcaaaaaaagatggcccagattcaattgctcaatcagcaaacaatcagttctacttccagttcttaacctactatcagcataatgagggtcagatgagattaagatcgaccacaatctccagaagatgggtctctggtgacaaccatgtggaggaactagtagctggctttgatcaagaagctgcagctgcagtcatggcacgcttggtgtcatttaagatggaaactgagtattccaggttgattttgacccagtaaggtggcttgatcgagctttgatacgtttatgctcaaaatttggagattatcagaaggagacaccctcatcgttcagtttatccccacggctatcaatatttccccaatttatatttaatttgaggcgttctcagtttgttcaggtttttaataacagtcctgatgaaactgcgtattttaggatgatgttggacagagagaatgtaaccaatacagttgtgatgattcaaccttcacttatatcctattcatttcaatcagggccagagccagttctcttggatgcaactgcaattgcttctgacaagatccttttattggactcttattttactgttgtcatattccatggggtaaccattgcgcagtggcgaaatgctggctaccaagatcaagaaggtcacgaggtttttgctcagttgttaaaagctccacatgaggaagctaatttaataataaaggagcgatttcctgtaccccgtttggtagtctgtgatcaatatggatctcaggctcgatttttactggcgaagttaaatccatcagtgacatataactcggacaatccctcccctggtggagacgtcatattcacagatgatgtgag

SEQ ID NO: 204279 - DNA, 2534 bp, Zea Mays
cccgttcgagcgtctcgcttctcccgttcccgatcccgatcccgatcccgatcccgatccctgcgtcctttcgcttatcccgttgatccggcgttcactcgtgcgatctcctgtggcgacaactgggcgatcgacgccgccgctgctgtcgccgtcctatacgagaggtgcgcaggcgttcgttggtcccttcgccaggcttttgtctacccttcgccgacgacgagcacaagccagatttctttgtctgacttgtggaagcctcttacaactattgtacaaggctgctgtattgaagatgtctgagttccttgacctagagctacaagatgggataaggatgccctggaatgttattccaggcacaaaacaggagactgtgaactgtgtgattcctgtttccgctatctacacacctttgaaaccaatttctgatatccctgttcttccatattcacctcttcgctgtcgcatgtgtcgttccatcctcaaccctttctccattgttgactatgttgctaagatttgggtctgttcattctgctttcaacgcaaccagttccctcaacactactcttcgatctcagaaaataatctccctgcggaactctttcctcagtacaccaccgtcgagtacatatcttcaactgaaactggtcctatagttccaccggttttcatttttgttgtagatacttgcatgattgaagaagaaattggttatttgaagtctgcactggcacaagctgttgagctattgccagataattctcttgttggattcattacgttcgggacgtatgtgcaggttcatgaattgggttttggcttattgccaaaatcatatgtattcaaaggaacaaaggaggtcaccaaggagcaaatattggaacaaatgtgcttttttgcggggaagaaaatgcctaccacaggcgtgattgctggtaccagagatggcctttcatctgagagcatctctagatttctgctgcctgcttctgaatgcgagtttgtattgaactcagttatagaagaaatacaaaaggacccttggcctgttccagctgatcagcgtgcatctaggtgcactggagctgccttaagtgttgcagccaatctccttggggtttgtgttcctggatcaggtgctaggataatggcatttgttggtggtccatctacggagggccctggtcctattgtatccaaatccttatcagagcccattcgttcacacaaagaccttgataaagactcggcaccactctatgataaagctgttaagttttatgatcaaattgcaaagcagcttgtgcaccaagggcatgtgctggatttgtttgcttgtgcagttgaccaggttggagtcgctgaaatgaaggttgcgattgagaagactggaggaattgttgtccttgctgaaagttttggtcattctgttttcaaagactcacttctccgcatctttcagtcaacagatgacaaccttggtttatcattcaatggtattcttgaaattaactgttcaaaggatgtaaaggttcaaggcatcattggaccctgttcttccctggagaagaaaagtcctttgtcttccgacactgttattggtcaaggaaacactagcgcttggaagatgtgcggccttgacaggaagacatcactttgcttggtatatgatattgcaaaaaaagatggcccagattcaattgctcaatcagcaaacaatcagttctacttccagttcttaacctactatcagcataatgagggtcagatgagattaagatcgaccacaatctccagaagatgggtctctggtgacaaccatgtggagtagctggctttgatcaagaagctgcagctgcagtcatggcacgcttggtgtcatttaagatggaaactgaggttgattttgacccagtaaggtggcttgatcgagctttgatacgtttatgctcaaaatttggagattatcagaaggagacaccctcatcgttcagtttatccccacggctatcaatatttccccaatttatatttaatttgaggcgttctcagtttgttcaggtttttaataacagtcctgatgaaactgcgtattttaggatgatgttggacagagagaatgtaaccaatacagttgtgatgattcaaccttcacttatatcctattcatttcaatcagggccagagccagttctcttggatgcaactgcaattgcttctgacaagatccttttattggactcttattttactgttgtcatattccatggggtaaccattgcgcagtggcgaaatgctggctaccaagatcaagaaggtcacgaggtttttgctcagttgttaaaagctccacatgaggaagctaatttaataataaaggagcgatttcctgtaccccgtttggtagtctgtgatcaatatggatctcaggctcgatttttactggcgaagttaaatccatcagtgacatataactcggacaatccctcccctggtggagacgtcatattcacagatgatgtgag

SEQ ID NO: 204280 - DNA, 2209 bp, Zea Mays
atcgccaccaccctctcgcctcgccataaagggcgggggccgctagggttagcgcatcggaatcaatcgtgtttctcgcctccacgccgagaccaatccagccaccgccaactctttgcctcgcctctccgattcgagggaacgatggagtgcgtcaccgatatgcccctcgcgacgctggacagccgaccgcgcaagcggcagcggctcgggtgggacgtcgttcccgccgagatgtatcaggttacgcggccgcggcttggttgggacgtcggccccgccgagatgaatcaggttgtgtttcttctcaagtcaaccaagagcagcctcatgatggttcccctcctctgagagaagatgacaagaatgggcattatgtttttgctgttggagataatctcacatctcgctataagatcaatgcaaaaatgggagaaggtcagtttggatgaccatgtattctgaaatagttgatttaactcgcattgggcatgccaatacattcagcaaattttgtctataactgaatgtgtctggactctggaatacaccaggtacctttggtcaggtgttggagtgttgggataaggaaacaaaagaaatggtggccataaagatcatcaggggcattaagaagtacagggatgctgcaatgatcgaaattggcatgcttgagaagcttggtaaatatggtgaaagcagatccaggtgagtttgctggttcagttagcacctatatgcgtgcttacgttcataagattgcttgtatataagctggtctattttgcagttgtgttcaaattcggaactggtttgactatcgtaaccatatctgtattgtctttgagaggcttggaccaagcttatatgattttctgaggaaaaacaattaccgctcattcccaattgccctagttcgggagtttgccaaacaactgttggaatgtatagcatgtgtgtgcacagttctttctattacccctcctgcactataatgcatatacattagttttgtgcattatctgtgctgcattgcagcctgtcattaatccattactcatgcttgtactccagggagtatctaacatcatgtgatgtttttgtatttaccctctctctgtaatgtgttgcagttatgcatgaattgcgcctcatacacactgatttaaagcctgagaacattctccttgtttctccggagtacattaaagtgcctgattacaaagtatatcttgttcttttatatttaattcacctacccaagatttaccttgtgctatgcttgttcttttattgtgtattggtagcgggggtagaaaaatatggtactgatcctcttttttcatttgccaggtctcatcccaatccccaaaggaggggtcctattacaagcagttgcccaagtctagtgctatcaaggtgattgatttcggtagcactacttatgatcaacatgatcagagttatgtggtatcgacgaggcactatcgggctccagaagttatattgggacatggatggagttacccatgtgatatctggagtgttggttgtattcttgttgagctttgcacgggtgaggcgttattccagactcacgaaaacttggaacatctggctatgatggagagagttcttggacctttgccgtaccatatgcttaagagggcagatcggcactctgacaaatacatcagaaaaggacgcctgaattggcctgagggttgcacctcgcgggagagcatgaaagctgtgatgaaattgtccaggcttcagaatctggtgatgcaaaatgtggaccaggctgcgggagatttcattggtcttttgcaagggctcctgaagtatgacccagcaagccgtttaacagcacgagaagcactgaggcatcctttcttcaccgaagggtttgggcgaagaagatgatacgtccttgaagcagaccttgtttgtcctctgtctctgaccaaactgtatataaagctgaaatggagctgtttcaatcttgtttgaaacgtcgtgtaactatagttgtatcacaagggaagtcagacggatactttttactaatcctgacttgtttgagttttgcaagccaattcaatgaaagtttgggttgaacagaatgtgttgcttgaaatattaaaactcgcatctatctggttttaaaataaaccagggtccattttttgttcactatctaaaaata

SEQ ID NO: 204281 - DNA, 2022 bp, Zea Mays
aaccactaccaccgaaagcgtcagcgacacagctagtttttgggtatacacgagcaccgtatgctcgtgtccgatcctatcgccaccaccctctcgcctcgccataaagggcgggggccgctagggttagcgcatcggaatcaatcgtgtttctcgcctccacgccgagaccaatccagccaccgccaactctttgcctcgcctctccgattcgagggaacgatggagtgcgtcaccgatatgcccctcgcgacgctggacagccgaccgcgcaagcggcagcggctcgggtgggacgtcgttcccgccgagatgtatcaggttacgcggccgcggcttggttgggacgtcggccccgccgagatgaatcagataagatcaatgcaaaaatgggagaaggtacctttggtcaggtgttggagtgttgggataaggaaacaaaagaaatggtggccataaagatcatcaggggcattaagaagtacagggatgctgcaatgatcgaaattggcatgcttgagaagcttggtaaatatggtgaaagcagatccaggtgagtttgctggttcagttagcacctatatgcgtgcttacgttcataagattgcttgtatataagctggtctattttgcagttgtgttcaaattcggaactggtttgactatcgtaaccatatctgtattgtaagtacattgttagattatgacaattatgcactgacccaaaaatataaccatatggtgcttaaacgttggtgaatttggattaatggtgagcaggtctttgagaggcttggaccaagcttatatgattttctgaggaaaaacaattaccgctcattcccaattgccctagttcgggagtttgccaaacaactgttggaatgtatagcatgtgtgtgcacagttctttctattacccctcctgcactataatgcatatacattagttttgtgcattatctgtgctgcattgcagcctgtcattaatccattactcatgcttgtactccagggagtatctaacatcatgtgatgtttttgtatttaccctctctctgtaatgtgttgcagttatgcatgaattgcgcctcatacacactgatttaaagcctgagaacattctccttgtttctccggagtacattaaagtgcctgattacaaagtctcatcccaatccccaaaggaggggtcctattacaagcagttgcccaagtctagtgctatcaaggtgattgatttcggtagcactacttatgatcaacatgatcagagttatgtggtatcgacgaggcactatcgggctccagaagttatattgggacatggatggagttacccatgtgatatctggagtgttggttgtattcttgttgagctttgcacgggtgaggcgttattccagactcacgaaaacttggaacatctggctatgatggagagagttcttggacctttgccgtaccatatgcttaagagggcagatcggcactctgacaaatacatcagaaaaggacgcctgaattggcctgagggttgcacctcgcgggagagcatgaaagctgtgatgaaattgtccaggcttcagaatctggtgatgcaaaatgtggaccaggctgcgggagatttcattggtcttttgcaagggctcctgaagtatgacccagcaagccgtttaacagcacgagaagcactgaggcatcctttcttcaccgaagggtttgggcgaagaagatgatacgtccttgaagcagaccttgtttgtcctctgtctctgaccaaactgtatataaagctgaaatggagctgtttcaatcttgtttgaaacgtcgtgtaactatagttgtatcacaagggaagtcagacggatactttttactaatcctgacttgtttgagttttgcaagccaattcaatgaaagtttgggttgaacagaatgtgttgcttgaaatattaaaactcgcatctatctggttttaaaataaaccagggtccattttttgttcactatctaaaaata

SEQ ID NO: 204282 - DNA, 2036 bp, Zea Mays
ccaaccactaccaccgaaagcgtcagcgacacagctagtttttgggtatacacgagcaccgtatgctcgtgtccgatcctatcgccaccaccctctcgcctcgccataaagggcgggggccgctagggttagcgcatcggaatcaatcgtgtttctcgcctccacgccgagaccaatccagccaccgccaactctttgcctcgcctctccgattcgagggaacgatggagtgcgtcaccgatatgcccctcgcgacgctggacagccgaccgcgcaagcggcagcggctcgggtgggacgtcgttcccgccgagatgtatcaggttacgcggccgcggcttggttgggacgtcggccccgccgagatgaatcagtttgcactttgtggacaagaagttgtgaatgccttcagtgctgcagtgttgggcctatcttcaggttgtgtttcttctcaagtcaaccaagagcagcctcatgatggttcccctcctctgagagaagatgacaagaatgggcattatgtttttgctgttggagataatctcacatctcgctataagatcaatgcaaaaatgggagaaggtcagtttggatgaccatgtattctgaaatagttgatttaactcgcattgggcatgccaatacattcagcaaattttgtctataactgaatgtgtctggactctggaatacaccaggtacctttggtcaggtgttggagtgttgggataaggaaacaaaagaaatggtggccataaagatcatcaggggcattaagaagtacagggatgctgcaatgatcgaaattggcatgcttgagaagcttggtaaatatggtgaaagcagatccagttgtgttcaaattcggaactggtttgactatcgtaaccatatctgtattgtaagtacattgttagattatgacaattatgcactgacccaaaaatataaccatatggtgcttaaacgttggtgaatttggattaatggtgagcaggtctttgagaggcttggaccaagcttatatgattttctgaggaaaaacaattaccgctcattcccaattgccctagttcgggagtttgccaaacaactgttggaatgtatagcatttatgcatgaattgcgcctcatacacactgatttaaagcctgagaacattctccttgtttctccggagtacattaaagtgcctgattacaaagtctcatcccaatccccaaaggaggggtcctattacaagcagttgcccaagtctagtgctatcaaggtgattgatttcggtagcactacttatgatcaacatgatcagagttatgtggtatcgacgaggcactatcgggctccagaagttatattgggacatggatggagttacccatgtgatatctggagtgttggttgtattcttgttgagctttgcacgggtgaggcgttattccagactcacgaaaacttggaacatctggctatgatggagagagttcttggacctttgccgtaccatatgcttaagagggcagaaaaaggacgcctgaattggcctgagggttgcacctcgcgggagagcatgaaagctgtgatgaaattgtccaggcttcagaatctggtgatgcaaaatgtggaccaggctgcgggagatttcattggtcttttgcaagggctcctgaagtatgacccagcaagccgtttaacagcacgagaagcactgaggcatcctttcttcaccgaagggtttgggcgaagaagatgatacgtccttgaagcagaccttgtttgtcctctgtctctgaccaaactgtatataaagctgaaatggagctgtttcaatcttgtttgaaacgtcgtgtaactatagttgtatcacaagggaagtcagacggatactttttactaatcctgacttgtttgagttttgcaagccaattcaatgaaagtttgggttgaacagaatgtgttgcttgaaatattaaaactcgcatctatctggttttaaaataaaccagggtccattttttgttcactatctaaaaata

SEQ ID NO: 204283 - DNA, 1593 bp, Zea Mays
cccaaccactaccaccgaaagcgtcagcgacacagctagtttttgggtatacacgagcaccgtatgctcgtgtccgatcctatcgccaccaccctctcgcctcgccataaagggcgggggccgctagggttagcgcatcggaatcaatcgtgtttctcgcctccacgccgagaccaatccagccaccgccaactctttgcctcgcctctccgattcgagggaacgatggagtgcgtcaccgatatgcccctcgcgacgctggacagccgaccgcgcaagcggcagcggctcgggtgggacgtcgttcccgccgagatgtatcaggttacgcggccgcggcttggttgggacgtcggccccgccgagatgaatcagtttgcactttgtggacaagaagttgtgaatgccttcagtgctgcagtgttgggcctatcttcaggttgtgtttcttctcaagtcaaccaagagcagcctcatgatggttcccctcctctgagagaagatgacaagaatgggcattatgtttttgctgttggagataatctcacatctcgctataagatcaatgcaaaaatgggagaaggtacctttggtcaggtgttggagtgttgggataaggaaacaaaagaaatggtggccataaagatcatcaggggcattaagaagtacagggatgctgcaatgatcgaaattggcatgcttgagaagcttggtaaatatggtgaaagcagatccaggtctcatcccaatccccaaaggaggggtcctattacaagcagttgcccaagtctagtgctatcaaggtgattgatttcggtagcactacttatgatcaacatgatcagagttatgtggtatcgacgaggcactatcgggctccagaagttatattgggacatggatggagttacccatgtgatatctggagtgttggttgtattcttgttgagctttgcacgggtgaggcgttattccagactcacgaaaacttggaacatctggctatgatggagagagttcttggacctttgccgtaccatatgcttaagagggcagatcggcactctgacaaatacatcagaaaaggacgcctgaattggcctgagggttgcacctcgcgggagagcatgaaagctgtgatgaaattgtccaggcttcagaatctggtgatgcaaaatgtggaccaggctgcgggagatttcattggtcttttgcaagggctcctgaagtatgacccagcaagccgtttaacagcacgagaagcactgaggcatcctttcttcaccgaagggtttgggcgaagaagatgatacgtccttgaagcagaccttgtttgtcctctgtctctgaccaaactgtatataaagctgaaatggagctgtttcaatcttgtttgaaacgtcgtgtaactatagttgtatcacaagggaagtcagacggatactttttactaatcctgacttgtttgagttttgcaagccaattcaatgaaagtttgggttgaacagaatgtgttgcttgaaatattaaaactcgcatctatctggttttaaaataaaccagggtccattttttgttcactatctaaaaata

SEQ ID NO: 204284 - DNA, 1972 bp, Zea Mays
aatggatacacaacgagcggtccactccccgcgagagacgcaacctctgtcaccgatgcgcttgccaacgctctcataaatatccactgacatgtaggccaatgcttttcaatggggcctggacccaaccactaccaccgaaagcgtcagcgacacagctagtttttgggtatacacgagcaccgtatgctcgtgtccgatcctatcgccaccaccctctcgcctcgccataaagggcgggggccgctagggttagcgcatcggaatcaatcgtgtttctcgcctccacgccgagaccaatccagccaccgccaactctttgcctcgcctctccgattcgagggaacgatggagtgcgtcaccgatatgcccctcgcgacgctggacagccgaccgcgcaagcggcagcggctcgggtgggacgtcgttcccgccgagatgtatcaggttacgcggccgcggcttggttgggacgtcggccccgccgagatgaatcagtttgcactttgtggacaagaagttgtgaatgccttcagtgctgcagtgttgggcctatcttcaggttgtgtttcttctcaagtcaaccaagagcagcctcatgatggttcccctcctctgagagaagatgacaagaatgggcattatgtttttgctgttggagataatctcacatctcgctataagatcaatgcaaaaatgggagaaggtacctttggtcaggtgttggagtgttgggataaggaaacaaaagaaatggtggccataaagatcatcaggggcattaagaagtacagggatgctgcaatgatcgaaattggcatgcttgagaagcttggtaaatatggtgaaagcagatccagttgtgttcaaattcggaactggtttgactatcgtaaccatatctgtattgtctttgagaggcttggaccaagcttatatgattttctgaggaaaaacaattaccgctcattcccaattgccctagttcgggagtttgccaaacaactgttggaatgtatagcatttatgcatgaattgcgcctcatacacactgatttaaagcctgagaacattctccttgtttctccggagtacattaaagtgcctgattacaaagtctcatcccaatccccaaaggaggggtcctattacaagcagttgcccaagtctagtgctatcaaggtgattgatttcggtagcactacttatgatcaacatgatcagagttatgtggtatcgacgaggcactatcgggctccagaagttatattgggacatggatggagttacccatgtgatatctggagtgttggttgtattcttgttgagctttgcacgggtgaggcgttattccagactcacgaaaacttggaacatctggctatgatggagagagttcttggacctttgccgtaccatatgcttaagagggcagatcggcactctgacaaatacatcagaaaaggacgcctgaattggcctgagggttgcacctcgcgggagagcatgaaagctgtgatgaaattgtccaggcttcagaatctggtgatgcaaaatgtggaccaggctgcgggagatttcattggtcttttgcaagggctcctgaagtatgacccagcaagccgtttaacagcacgagaagcactgaggcatcctttcttcaccgaagggtttgggcgaagaagatgatacgtccttgaagcagaccttgtttgtcctctgtctctgaccaaactgtatataaagctgaaatggagctgtttcaatcttgtttgaaacgtcgtgtaactatagttgtatcacaagggaagtcagacggatactttttactaatcctgacttgtttgagttttgcaagccaattcaatgaaagtttgggttgaacagaatgtgttgcttgaaatattaaaactcgcatctatctggttttaaaataaaccagggtccattttttgttcactatctaaaaata

SEQ ID NO: 204285 - DNA, 2990 bp, Zea Mays
gttagctgtaaaattatagtagcagatccggcgattcttgcatagtagttcgatttggttctgatagcgaatggccggaaggagaagtttgcatctggtttgctgaaaccgttcgtcgctcacttgaaggccgcccaggatcagattgccaagggagggtactcgatcacacttgaaccaagctcagggttcgatgtgccatggtttacgagaggcaccgtggagagatttgtgcgtttcgtgagtactccggaggtccttgagcgagtcagaacactggagtctgagatcctgcagctcgaggatgccattgctatccagagcaacgatagtcttggattaaaatctgtcgaagaccatggaagaaagttgactgaaagcaatggaggtggacgtgcaaattatgatcctgattcagccacagcaattgttgtctacaagcctggatcaaatccaacgccacaaattcagaatgaaacagcagcacatgaggagaattcaaaagttcaattgctcagagtgcttgaaacccgcaaaactatgttaagaaaagagcaggctatggctttcgctcgtgctgtagctgctgggtttgacattgacaacttgggttacttgatcgcatttgcagagcgctttggtgctgcacgtctgatgaaggcatgttcacatttcatcgaactgtggaagcagaagcatgaaactggacaatggattgaagttgaacctgaagcaatgtctacacgctctgaatttcctccatttaacgcatctggcattgtgttcatgggagacaacatgaagccaaacttggaatcaggctccattaatggagaggcaaatggcgaggatggagctaaagctgatcagaagtccagccagcagatgggatctcatgctgcatatcctccatgggcaatgcatcctccatctggtgcagttgtttacccaccttatcctatgcaaggcatgcctttttatcctggggtgaatccatactaccctccatatcctccagtggatgatcccaggtaccactactcaggaaggaaatcttcgaggaagcactcctcggatagtaaggactcagaaactcttgacgttgaaagtgaccattgcagttcagatagaggaagttctcatggtcgcaagtcacatagaaaggggaagaggtccggaaagaaaaaacctagtgtggttgttatcaagaatgtgaatgtaacatctaaaaagcatggctcatcagagagcgaatcacaatcaagttctgaagttgagtctgcggacagtgacaattcacactccaaatcaagtgaaaggaagcataaaagctcaagttcaaagaaaaaggagggtaggagaactacttttgcctccggagatgaatatagcaaggatgaaatgtcaaatggccacgatgctgagcaaggaaactggagcgcattccaaaatttcttgttgagagcagaagaaaaaacaagatctagtgatgcagacctgtttgctggtgagaaagaacccccatcaaggagaaaacagaatgtaaacacagcagatcctattcttttagctgagagagatggtggcattgtccatgagcggaacatagtaggttttgattcagccaatgggaggactagagctatccgggtcatgtccaatgatgaacttgttatgtctggagaagggaggaactatatgcatagtgaaataaaggagattgaagctggtggaggaaggtacaggagagggacaggtgatgactacatggtttatggtcagggaagtcagatagccagacatagtttgttggatcctcttgcagaggcccagtacaagaatcctgttcagcaggacaagaataggaatggtgtggcggacgagtcctttatgatccctcttaggtccagcttacatgataatatcggagcagaaagcagaactactattgacatagatgttgagcttccttctagaattcataaagcatcagatgaaaaggctggacatcagcttttttacgaacctgacgaattggtgccagagcgtggatctgaagatgtttcatttggatatgatccagcaatggattatgatagccacatgcagactactgtgaaggtggaagatgaaaaaacagaggatgacttgccagttgctgacaatgatgtacagaaggtagagaaagagaagctaaggaatgcaaaggatggttcagataaacgaaggaaagatgccttattgaggaggttatcggcgccaaggaccccactgaatgatgcacaaaaacgtgcacagaacctgcgtgcatataaggcagaccttcagaaactgaagaaagaacaggaagaagagcaaataaagcgattggagaggctcaaattggagcggcaaaagaggatcgccgcaagaggtaatggaaagggtccagggaatggttctcctaaagcgaatggtacgaatggactcagtaaatcagttccaaccttcactgggttgaaaaaggagaaaaatggaacaactgaatcactcagcgatcgactgaagaggctttctgaacccaaaagcattgctggggcagagcattccttgaatccaaagtcaactggcgcagaccattcacgaagaagaagcatggcgtgagacggagaaccgagcatcttgaatccatcgtaccactcgctagctcagcaaccatgaatggcatatcaaaaggcttcttgtacagaaagaggaaatggctggcgctgtagcactgcctgcttccaagatttgtgatggaaaatcaagttaccttttcaatggcatggcgttgtacttccaattttaacataattatttcattcttttattgaggatggcttgtaatagctgtaaacctggatttttcggcgacgcggagctatattttggtttttggctgtatttatggaatggattgatcgttgtttgagatatattgtggtatttatacagtgtataaatgtcaa

SEQ ID NO: 204286 - DNA, 3374 bp, Zea Mays
cttggctcgcattcacactcacgcagcagcagcagcaagcaggccagcagcagcagcagcaagcagcagagcgcgccctgttcttgtgccgaggaattatttattgccaccgcatcgagatttatatagtacggggaaattgattgctcattcccctctgcttcctccatccactgatccaccccatgctgcgatattttcctccactcgccgccggggcagcatttgctcgcgatttataacctcccctcgccttcgcctctcctttctgcttgtctttttccccagtggggaggttagcacccggcacaagcaaagcgccgggttcttgtcgcagtttctgcgcgctcgctcgctttttgcccgtaagatctgatacaaagaggagagggagagccaagagaggagaggttctcgtgtggaattcttcggcgatgaggtccgacgcccgtctggattcggtggtcttccagctcacccccacccggaccaggttcgatttggttctgatagcgaatggccggaaggagaagtttgcatctggtttgctgaaaccgttcgtcgctcacttgaaggccgcccaggatcagattgccaagggagggtactcgatcacacttgaaccaagctcagggttcgatgtgccatggtttacgagaggcaccgtggagagatttgtgcgtttcgtgagtactccggaggtccttgagcgagtcagaacactggagtctgagatcctgcagctcgaggatgccattgctatccagagcaacgatagtcttggattaaaatctgtcgaagaccatggaagaaagttgactgaaagcaatggaggtggacgtgcaaattatgatcctgattcagccacagcaattgttgtctacaagagttcaattgctcagagtgcttgaaacccgcaaaactatgttaagaaaagagcaggctatggctttcgctcgtgctgtagctgctgggtttgacattgacaacttgggttacttgatcgcatttgcagagcgctttggtgctgcacgtctgatgaaggcatgttcacatttcatcgaactgtggaagcagaagcatgaaactggacaatggattgaagttgaacctgaagcaatgtctacacgctctgaatttcctccatttaacgcatctggcattgtgttcatgggagacaacatgaagccaaacttggaatcaggctccattaatggagaggcaaatggcgaggatggagctaaagctgatcagaagtccagccagcagatgggatctcatgctgcatatcctccatgggcaatgcatcctccatctggtgcagttgtttacccaccttatcctatgcaaggcatgcctttttatcctggggtgaatccatactaccctccatatcctccagtggatgatcccaggtaccactactcaggaaggaaatcttcgaggaagcactcctcggatagtaaggactcagaaactcttgacgttgaaagtgaccattgcagttcagatagaggaagttctcatggtcgcaagtcacatagaaaggggaagaggtccggaaagaaaaaacctagtgtggttgttatcaagaatgtgaatgtaacatctaaaaagcatggctcatcagagagcgaatcacaatcaagttctgaagttgagtctgcggacagtgacaattcacactccaaatcaagtgaaaggaagcataaaagctcaagttcaaagaaaaaggagggtaggagaactacttttgcctccggagatgaatatagcaaggatgaaatgtcaaatggccacgatgctgagcaaggaaactggagcgcattccaaaatttcttgttgagagcagaagaaaaaacaagatctagtgatgcagacctgtttgctggtgagaaagaacccccatcaaggagaaaacagaatgtaaacacagcagatcctattcttttagctgagagagatggtggcattgtccatgagcggaacatagtaggttttgattcagccaatgggaggactagagctatccgggtcatgtccaatgatgaacttgttatgtctggagaagggaggaactatatgcatagtgaaataaaggagattgaagctggtggaggaaggtacaggagagggacaggtgatgactacatggtttatggtcagggaagtcagatagccagacatagtttgttggatcctcttgcagaggcccagtacaagaatcctgttcagcaggacaagaataggaatggtgtggcggacgagtcctttatgatccctcttaggtccagcttacatgataatatcggagcagaaagcagaactactattgacatagatgttgagcttccttctagaattcataaagcatcagatgaaaaggctggacatcagcttttttacgaacctgacgaattggtgccagagcgtggatctgaagatgtttcatttggatatgatccagcaatggattatgatagccacatgcagactactgtgaaggtggaagatgaaaaaacagaggatgacttgccagttgctgacaatgatgtacagaaggtagagaaagagaagctaaggaatgcaaaggatggttcagataaacgaaggaaagatgccttattgaggaggttatcggcgccaaggaccccactgaatgatgcacaaaaacgtgcacagaacctgcgtgcatataaggcagaccttcagaaactgaagaaagaacaggaagaagagcaaataaagcgattggagaggctcaaattggagcggcaaaagaggatcgccgcaagaggtaatggaaagggtccagggaatggttctcctaaagcgaatggtacgaatggactcagtaaatcagttccaaccttcactgggttgaaaaaggagaaaaatggaacaactgaatcactcagcgatcgactgaagaggctttctgaacccaaaagcattgctggggcagagcattccttgaatccaaagtcaactggcgcagaccattcacgaagaagaagcatggcgtgagacggagaaccgagcatcttgaatccatcgtaccactcgctagctcagcaaccatgaatggcatatcaaaaggcttcttgtacagaaagaggaaatggctggcgctgtagcactgcctgcttccaagatttgtgatggaaaatcaagttaccttttcaatggcatggcgttgtacttccaattttaacataattatttcattcttttattgaggatggcttgtaatagctgtaaacctggatttttcggcgacgcggagctatattttggtttttggctgtatttatggaatggattgatcgttgtttgagatatattgtggtatttatacagtgtataaatgtcaa

SEQ ID NO: 204287 - DNA, 2288 bp, Zea Mays
atgacctccctgcaggcagatacaaccggcaggatcggatactagtataagatcgaaatatataaacattattaccatgggagaagagaagcaacgtcgggatggccatggcggaaagaacaagtacgccgtggcgtgctccattattggctccatcatctccattctcatgggctatgacacgggcgtcatgagcggcgcgatgctgttcatcaaggaggacctcaagaccaacgacacgcaggtccaggtcctcgccggcatcctcaacgtctgcgcccttgtcggctccctcacggccggccgcgtctccgactgggtcggccgccgccgcaccatctccctcgcggcctgcatcttcctcgcggggtcagtcctcatgggcctctcgcccaacttcggtacgctcctggcaggacgctgcgtggccggcgtcggcgtcggatacgcgctcatgatcgcgcccgtctacgcggccgagatttcgtccgcccacatccgcggctccgtcacctcgctgcccgagatctgcatcagcttcggcatcctgattgggtacgtggccaactacctgctagctaagctcccgctggtctacggctggcgcgccatgctggggctcggcgcgctgccgagcgccgtgctcgcagtcgccgtgctcgcgatgccggagtcgccccggtggctcgtcatgcagggccgcgtcgagcaggcccacgccgtgctcaggcgcgtgtccgacactgcaggcgaggccgatgtgcgcctcgcggaaatcaagaccgcggcggggctggcagacgacgatgacggctcaccgagaggtgtcggcaagggcgtgtggaaggagatgttcctgcacccgacgccccccgtccggcgtatcctcgtcgctgccttcggagtccacttcttccagcatctcacgggaatcgaagccgtggtcctctacagcccacgcatctttaaggcagccggcatcgccacccgcagcgagatccttgcagcgaccatcggcgtgggcgtcaccaagacggtgttcatcatgacagccatcctgctggtggaccgcatcggccggaggccgctctacctctcgagcctggcgggcatcatcgcctcgcttgcctgcctcggtcttggcctcaccgtcgtggagcgctcggtgccgcgccactcgccgacgtgggctatggcattgtccatcgcaacggtcttcaccttcatagcgtccttctccatcggtgtggggcccatcacgtgggcgtacagcaccgaggtgtacccgctccggctgcgcgcgcagggcgccagcgtcggcgtggccatcaaccgtgtcatgaacgccggggtctctatgacgttcgtgtcgctgtacaatgcggtgaccatcggcggtgcctttttcctgttcgcagggctggccgtgttggcggccatgttcttctacttcctctgcccggagacgcaaggacggccactggaggagatcgaagaggtgttcggccgtgggtggcgcgcgcgcctcctgtcatgggacgaagctgttgtggagcttccaatgtccaacaccaccgacggcaacaccaaggcgcgcccgtgatgcaaatgcgattgcaaaaattatggatagacattcatatatggtcacgtaaaacactagtttactttatattgtagaatatagttttttttaagtcaagagtcaagtttaaaatagaggataacataagtaatagaataaaaaactgctatagacagtttagtggggttcttctttattaaaaagtcaaatatatttattttaactaacactataataaataaaaccattttcggcggtaaataagctctttgccatcgaaaataaactattttcaacgacaaaagatttattttccaaggttcttgaccgtcaaaaatattagtcgaaaataaaccttattttttggcagtcccacctagaacgccgaaaatagtttattttctatgaccgctaaaagaccgacgaaaataagaaagcttatttctacgaccacaaagtcactgtaacactccaaaatcctattctggataaacaaggaaaactcatttcgttatttaaataaatgtgtttttaaataatagattacctaaaagattcttatgtgaactatactttgtgttaaatatttttttctaaaaaaagttaaactatctcttttatataagttttacataagaaattattttcttttaaataaatatgtgaagattatagatttattttattgtacttctaaaatgtg

SEQ ID NO: 204288 - DNA, 2885 bp, Zea Mays
tttttttaaaaaggttcgtttgcacgatttgcagtaatggttggtttccatcgaagatggaaacacacacagtgcaggccgtgatccgatggaaacacacacagtgcaggccgtgatcatcggatcgtccttccgtagccttccgtgaccgtgatccctcatccctgatcagctacttcgtacaggaaccttccagaactcttgagaactgggatccaacgcagctgggctcctctcggttttataaaaatctcaacagggtttcgttttttcgccttaatccccatcaaaccccaagcgcgcacccatcttctggcctttccagccgccaagccttctagaagcttcaagagctcgattcgatcggaaccctcgccatggccgacgaggcgaaggcgaagggtaacgcggcgttctcggccggccgcttcgaggaggcggcgcggcacttcacggacgccatcgcgcttgccccagacaaccacgtcctctactccaaccggtcggcggcgctcgcctcgctccaccgctactccgatgctctcgccgacgcgcagaagaccgtcgacctcaagcccgactgggccaagggctactcccgcctcggcgcggcgcacctcggcctcggcgacgcggccagcgccgtcgccgcctacgagaagggcctcgagctcgaccccagcaacgagggcctcaaagcggggctccaggacgccaagaaagccgccgccgcccctccgcgccgcgggtcgtccggccccgacgccatcggccagatgttccagggccccgagctgtggagcaagatcgcgtccgacccctccacgcgcgcctaccttaacgagcccgattttatgcatatgatgcgcgaagtgcagaggaaccccagcagcatcagtatgtatctctccgatccccgcatgatgcaggtgctcagcctcatgcttaatgtcaagatccagagacccgaggcctccgagccgtcgcagtctaccccgccgccgccgaagcagcagcagcagcagcagacgccgccttctgagacgaaggctagggatgtggagcccgagcccgaggcagagccgatggatttgactgatgaggaaaaggaccgcaagcagacgaaagctgctgctcagaaagagaaggagttaggtaacgcagcttacaagaagaaggacttcgaggtggcaatccagcattacaccaaagccttggaacttgacgacgaggatatttcctatctgactaaccgagcagcagtctacattgagatgggaaagtacgatgaatgcatcaaggactgtgataaggctgtggagaggggaagagaacttcgtgctgatttcaagatgatttcaagggcactgacaagaaaaggaacagctctggtcaaacttgctaagacctctaaggattttgatattgctatcgagaccttccagaaggctctgactgagcatcggaacccagacactcttaaaaagttaaatgaggctgagaaagcaaagaaagagttagagcaacaagagtattatgatccaaaattggcagatgaggagagagagaaaggcaatgagttcttcaaggagcaaaaatacccagaagcaataaaacactacacagaggctctcaagagaaacccgaaggatcctagggtttatagcaatagggccgcctgctacaccaagttaggagccatgcctgaaggtcttaaagacgcagaaaagtgtcttgaacttgaccccaccttcaccaaagggtatacgaggaaaggtgcaattcagttcttcatgaaagaatatgacaaggccgtggaaacctaccaggctggcttgaagcatgacccgaacaaccaggaactgcttgatggtgttaagaggtgtgttgaacagatcaacaaggccaacagaggtgaaataagccaggacgaattgcaagaaagacagaacaaagctatgcaagacccagagatccagaacattcttaccgaccctatcatgcgacaggttctaatagatttccaggagaacccaagtgcggcccaggagcacctgaagaaccccggggttatgcagaagattcagaagcttgtaagtgctgggatagttcagatgagatgatcgagcgatgcgatgattggctttgttcgttcacgtgcaccctggtcatacatatgttttaacaagcagcagcggcataagaatgaacctgttcgggggctaatcttattccttttggattggctgcctcactgctcgttacccgtttgatttgaatttgaggcttgaggacttggttaaagccacacctccctccagtcaaactgctgttaaattgttcttcttgctccacggctaaacatggcattagctattggattgatcttcttgctctaaagaactggatgctgaaaatcgaggggctctgaatggaggaagatgatggtgatatcgagtttgtggagttccctaagggggtggaggttgaaggaatatgtgctagccttttggttttggtggcatgcttttagccttttggatgttgacaggttctaacttagaacttctaagggagataggagtcatagccttttggatgctgctagccttttgttggcatgttgacatgctgcacttgtgctgctagagcagcagtgctagccttttggtggttgactgcgactagttctggttgtttcttttcatggcaggaaagtgcatgtaaaagtggctaaactattactcacctaggaacagaatgtacattgtcttttgtctagtctagtggtacagtcttgttgacacataatgaaaatgtaaaattgtatgttgtctaaattctgaatttttatgatgcttgagttcaaacttcagagattctac

SEQ ID NO: 204289 - DNA, 2791 bp, Zea Mays
tttttttaaaaaggttcgtttgcacgatttgcagtaatggttggtttccatcgaagatggaaacacacacagtgcaggccgtgatccgatggaaacacacacagtgcaggccgtgatcatcggatcgtccttccgtagccttccgtgaccgtgatccctcatccctgatcagctacttcgtacaggaaccttccagaactcttgagaactgggatccaacgcagctgggctcctctcggttttataaaaatctcaacagggtttcgttttttcgccttaatccccatcaaaccccaagcgcgcacccatcttctggcctttccagccgccaagccttctagaagcttcaagagctcgattcgatcggaaccctcgccatggccgacgaggcgaaggcgaagggtaacgcggcgttctcggccggccgcttcgaggaggcggcgcggcacttcacggacgccatcgcgcttgccccagacaaccacgtcctctactccaaccggtcggcggcgctcgcctcgctccaccgctactccgatgctctcgccgacgcgcagaagaccgtcgacctcaagcccgactgggccaagggctactcccgcctcggcgcggcgcacctcggcctcggcgacgcggccagcgccgtcgccgcctacgagaagggcctcgagctcgaccccagcaacgagggcctcaaagcggggctccaggacgccaagaaagccgccgccgcccctccgcgccgcgggtcgtccggccccgacgccatcggccagatgttccagggccccgagctgtggagcaagatcgcgtccgacccctccacgcgcgcctaccttaacgagcccgattttatgcatatgatgcgcgaagtgcagaggaaccccagcagcatcagtatgtatctctccgatccccgcatgatgcaggtgctcagcctcatgcttaatgtcaagatccagagacccgaggcctccgagccgtcgcagtctaccccgccgccgccgaagcagcagcagcagcagcagacgccgccttctgagacgaaggctagggatgtggagcccgagcccgaggcagagccgatggatttgactgatgaggaaaaggaccgcaagcagacgaaagctgctgctcagaaagagaaggagttaggtaacgcagcttacaagaagaaggacttcgaggtggcaatccagcattacaccaaagccttggaacttgacgacgaggatatttcctatctgactaaccgagcagcagtctacattgagatgggaaagtacgatgaatgcatcaaggactgtgataaggctgtggagaggggaagagaacttcgtgctgatttcaagatgatttcaagggcactgacaagaaaaggaacagctctggtcaaacttgctaagacctctaaggattttgatattgctatcgagaccttccagaaggctctgactgagcatcggaacccagacactcttaaaaagttaaatgaggctgagaaagcaaagaaagagttagagcaacaagagtattatgatccaaaattggcagatgaggagagagagaaaggcaatgagttcttcaaggagcaaaaatacccagaagcaataaaacactacacagaggctctcaagagaaacccgaaggatcctagggtttatagcaatagggccgcctgctacaccaagttaggagccatgcctgaaggtcttaaagacgcagaaaagtgtcttgaacttgaccccaccttcaccaaagggtatacgaggaaaggtgcaattcagttcttcatgaaagaatatgacaaggccgtggaaacctaccaggctggcttgaagcatgacccgaacaaccaggaactgcttgatggtgttaagaggtgtgttgaacagatcaacaaggccaacagaggtgaaataagccaggacgaattgcaagaaagacagaacaaagctatgcaagacccagagatccagaacattcttaccgaccctatcatgcgacaggttctaatagatttccaggagaacccaagtgcggcccaggagcacctgaagaaccccggggttatgcagaagattcagaagcttgtaagtgctgggatagttcagatgagatgatcgagcgatgcgatgattggctttgttcgttcacgtgcaccctggtcatacatatgttttaacaagcagcagcggcataagaatgaacctgttcgggggctaatcttattccttttggattggctgcctcactgctcgttacccgtttgatttgaatttgaggcttgaggacttggttaaagccacacctccctccagtcaaactggaggaagatgatggtgatatcgagtttgtggagttccctaagggggtggaggtaagcaattagttgaaggaatatgtgctagccttttggttttggtggcatgcttttagccttttggatgttgacaggttctaacttagaacttctaagggagataggagtcatagccttttggatgctgctagccttttgttggcatgttgacatgctgcacttgtgctgctagagcagcagtgctagccttttggtggttgactgcgactagttctggttgtttcttttcatggcaggaaagtgcatgtaaaagtggctaaactattactcacctaggaacagaatgtacattgtcttttgtctagtctagtggtacagtcttgttgacacataatgaaaatgtaaaattgtatgttgtctaaattctgaatttttatgatgcttgagttcaaacttcagagattctac

SEQ ID NO: 204290 - DNA, 3683 bp, Zea Mays
tttttttaaaaaggttcgtttgcacgatttgcagtaatggttggtttccatcgaagatggaaacacacacagtgcaggccgtgatccgatggaaacacacacagtgcaggccgtgatcatcggatcgtccttccgtagccttccgtgaccgtgatccctcatccctgatcagctacttcgtacaggaaccttccagaactcttgagaactgggatccaacgcagctgggctcctctcggttttataaaaatctcaacagggtttcgttttttcgccttaatccccatcaaaccccaagcgcgcacccatcttctggcctttccagccgccaagccttctagaagcttcaagagctcgattcgatcggaaccctcgccatggccgacgaggcgaaggcgaagggtaacgcggcgttctcggccggccgcttcgaggaggcggcgcggcacttcacggacgccatcgcgcttgccccagacaaccacgtcctctactccaaccggtcggcggcgctcgcctcgctccaccgctactccgatgctctcgccgacgcgcagaagaccgtcgacctcaagcccgactgggccaagggctactcccgcctcggcgcggcgcacctcggcctcggcgacgcggccagcgccgtcgccgcctacgagaagggcctcgagctcgaccccagcaacgagggcctcaaagcggggctccaggacgccaagaaagccgccgccgcccctccgcgccgcgggtcgtccggccccgacgccatcggccagatgttccagggccccgagctgtggagcaagatcgcgtccgacccctccacgcgcgcctaccttaacgagcccgattttatgcatatgatgcgcgaagtgcagaggaaccccagcagcatcagtatgtatctctccgatccccgcatgatgcaggtgctcagcctcatgcttaatgtcaagatccagagacccgaggcctccgagccgtcgcagtctaccccgccgccgccgaagcagcagcagcagcagcagacgccgccttctgagacgaaggctagggatgtggagcccgagcccgaggcagagccgatggatttgactgatgaggaaaaggaccgcaagcagacgaaagctgctgctcagaaagagaaggagttaggtaacgcagcttacaagaagaaggacttcgaggtggcaatccagcattacaccaaagccttggaacttgacgacgaggatatttcctatctgactaaccgagcagcagtctacattgagatgggaaagtacgatgaatgcatcaaggactgtgataaggctgtggagaggggaagagaacttcgtgctgatttcaagatgatttcaagggcactgacaagaaaaggaacagctctggtcaaacttgctaagacctctaaggattttgatattgctatcgagaccttccagaaggctctgactgagcatcggaacccagacactcttaaaaagttaaatgaggctgagaaagcaaagaaagagttagagcaacaagagtattatgatccaaaattggcagatgaggagagagagaaaggcaatgagttcttcaaggagcaaaaatacccagaagcaataaaacactacacagaggctctcaagagaaacccgaaggatcctagggtttatagcaatagggccgcctgctacaccaagttaggagccatgcctgaaggtcttaaagacgcagaaaagtgtcttgaacttgaccccaccttcaccaaagggtatacgaggaaaggtgcaattcagttcttcatgaaagaatatgacaaggccgtggaaacctaccaggctggcttgaagcatgacccgaacaaccaggaactgcttgatggtgttaagaggtgtgttgaacagatcaacaaggccaacagaggtgaaataagccaggacgaattgcaagaaagacagaacaaagctatgcaagacccagagatccagaacattcttaccgaccctatcatgcgacaggttctaatagatttccaggagaacccaagtgcggcccaggagcacctgaagaaccccggggttatgcagaagattcagaagcttgtaagtgctgggatagttcagatgagatgatcgagcgatgcgatgattggctttgttcgttcacgtgcaccctggtcatacatatgttttaacaagcagcagcggcataagaatgaacctgttcgggggctaatcttattccttttggattggctgcctcactgctcgttacccgtttgatttgaatttgaggcttgaggacttggttaaagccacacctccctccagtcaaactggcattttcgaagaagcatacagaaatttcattggaatctagggtggtcgactgtcgagggagcgtcttattcctatgaaatttctgctttattttataaaatttctactttctaaattgacccttcgttattgaaagctcgattgaaggattattttctgaatcctgctctttttttctatgtttttgaactaattcatgtaaaatttatgtactatttttgtgaaattctgcgttccaaagaagccctgaactattctttctttttagctgttaaattgttcttcttgctccacggctaaacatggcattagctattggattgatcttcttgctctaaagaactggatgctgaaaatcgaggggctctgaatggtacggaaccgagctcatcttgcgttgcgtactgaatgcctagcgggttttattcgatatgaagacaagtattttacacgtggatatgttaatggacaagaaaatatatctactggatagacacatatatacgtacggggtcatatcgttctatctattaactatcaagttatgtaattattatggtttgttatattttgagttgaatttatttttgtgtgtttgtttagcattttgagtgattgatatattagaatttgagacttcactagcgggtacagttacccaatagataaaatcacccgcgtgcgtacgaatatgggtaagattctacacccacgagtagatatggtaagccgacgagtataatttgtgcatctagttgatgattatcagagttcactttttgtacttaaggaagagtagttgatgatcattttttaaagccttcaacagttcaagcactaatttatgcatctagttggataagaggctctcaacatgagaaaaaattgcacctattcttgtggaggaagatgatggtgatatcgagtttgtggagttccctaagggggtggaggttgaaggaatatgtgctagccttttggttttggtggcatgcttttagccttttggatgttgacaggttctaacttagaacttctaagggagataggagtcatagccttttggatgctgctagccttttgttggcatgttgacatgctgcacttgtgctgctagagcagcagtgctagccttttggtggttgactgcgactagttctggttgtttcttttcatggcaggaaagtgcatgtaaaagtggctaaactattactcacctaggaacagaatgtacattgtcttttgtctagtctagtggtacagtcttgttgacacataatgaaaatgtaaaattgtatgttgtctaaattctgaatttttatgatgcttgagttcaaacttcagagattctac

SEQ ID NO: 204291 - DNA, 716 bp, Zea Mays
tcttttaccaaattggccctctgatatcctcctattctcgcaggcctccacgcgaccacgccgcggttttgcacttctcgccttctctaatctctttgcctccctccaccaccagtccaccaccactgctacccaaccctcgcttccccaaaccctagccaagggacacggtggccggcgatggacggcgacggaggaggcgctggtgcgctgcaccaccacacgcgctcacccgaggacgtcttccgcgatttccgcgcgcgccgagccggcatcgtcaaggcgctcaccacggatgtggagaagttctatcagcagtgcgatccagagaaagagaacttgtgcctttatggtttgccaaatgagacttgggaggtcactcttccagctgaggaagtacctcctgagcttccagaaccagcactggggataaactttgcccgtgatggaatggtcgaaaaagactggttgtctctagttgcagttcatagtgatgcatggctcctgtctgttgcattctattttggagctcgttttggatttgacaaagatgccaggagaaggctcttcaccatgattaacaacctgcccactgtttatgaagttgtgacgggggttgctaagaagcaatcgaaagcccccaacggcagcagcaaaagcagcaaacctaactctaaataagcccgcgaagccagcccacccaaaagaagaggagg

SEQ ID NO: 204292 - DNA, 2851 bp, Zea Mays
ccaggctccttctgggggaggccgcggctcaccgtgttggctgcgcccccaccgtcgcctcgccttaaactctccccgcctccgttaccgtcttcccccttcccacctcccccacccgctgtgttcatccatcgaccgcgcgagcccccgcccgccgattcgacgacgtttgattttttttcatttgatttgattgtaacgtaccgcagcaggaggagggagggattcttggaccgttgttcggctggatggtggaggcggttcgtcgatttgagagctccgggtttcttggacctgcgtaggtaaaagcaccaccccccccatttcctctcggctggcggatggacgcgagggaggtgtgaagcctggtcgctaactgatgctcgtggagcgattcggaggagaggagcgcgccgccatgggcgagtcgctgctcaccgcgctctccatggacaccaccacggcccaccatccacaccagggccctttcaccttcctctccatggacaccgcctcccacgaccacttcgacctcttcctcccgccacaggggcccttccgccgctgcctacatgccgcggcggtcgccccccctgacatcaacctccccctcaccgccgacccgtctccgccacctccggcgtcgcacgacgccaacgttgacgtgctagatgccggcctcggcggcccgcagcactacgactcggattcgcccgctgctgccgggcctgtcttggccccagcagcagccgcggccaccgtgatcgccgtgtcccacaccaagggctccggttccagcgtggcgcgcaagtgcgtcaagaggaatgatagcatttggggagcgtggttcttcttcacccactacttcaagccagtcatgtccaccgacaagggtggcaaggcgaaggcagccaccaccggcgggaatggtaatagtgccagtgccactctggacgctttcctggtgcagcacgacatggagaacatgtacatgtggatctttaaggagcgatcggagaatgccctggggaagatgcagctgaggagcttcatgaatgggcactcgcgccttggggatccacagttccctttcagcgcagacaaagggtttgtgcgctcacaccggatgcagcgcaagcattatcgtgggctctctaacccgcagtgtattcacgggatcgaaatcgtgagggcgccaaacttggcaggtgtacctgagtctgatttaaagaggtggatggagctcaccgggagggatgccaatttctcgatcccagccgaggcaagtgatttcgagtcttggaggaatctgccgagcacggaatttgagctcgagaggctagcagccgtggttcctacaaagagtagctcacatgggcaccacaagaggttgctgaacggttctggccttaacctatcgacacaaccatccaatcacagttctggggatgccatggagatcgcaaccatctgtaacaagcgcaggaaggattcctcaccgtctgcaacggaagaggactgcagcaattcgaattcagacaaggcccaagacatggatgtgagccacacctttgagccatcatggatgaatgacttcacaggtgtgatgcgccatgcttctggaccagtaactgccgcaaaaacaatatatgaggacagcaagggctacttgatcattgttagcctgcctttctctgattttcagaaggtgaaggtttcatggaagaatactcttacgaatgggattgttaaggtatcttgcattagcgttggtaggatgccattattgaaaaggcatgatcggactttcaagttggcggatccttctcctgagcattgcccaccaggagagtttgtccgggaaatcccactgcctacccggatccctgaagatgccactctggaagcataccgcgatgaaacggggacaggcctggagattattgtcccaaagtaccgtgttggccctgaagaacatgaggtgcatgtgtccatgagaccgccctcgtcatggtgccaatgaaacttgttccgagctcgaggggagacacatctggtgcggaggttccctgttgttaccataaggctgaggctactgtccgagaaacgcagctcagttttgccaattttgatggggaacagtcctaattgattcaagcattctggtagttggcattgcagcatttggaacgtattaggtctatggggttaggtttgctgttatgtttctcaagacttccaattgatcccgttgagacgacaaagtgaacgctgacacaacggtttctaacgcttcccttgaagtgacaagatgtttggatactttactttaccccagagaggcagggcctagactctctccagcaaggtgcgctatatgctcctctactctatatttagcgcatggtgatcaacttttttcctccaacaacgtgcgctaaagggtccggtaaaatagaggacgtcctcaaccacctccaaatgcagcggctcctctattcgtgtctctctacttcagctccgctagaaatgtacaacaacatgcagtataataagtattgtagctgaattaatgaagaataagtagcagcaagcaatattattaggtgtctgctcaaatatgtatagtaatttttttaagatctgccaaggaaactttgtaataaaaaggtgtactattttaggtgaagaaaattaatatacatcgtattttaatactagatatacaaatgatatttttctgtgtgtgtccaatgcggaaaaaagaatgtagaaaataaagtctggtaacactatttatatagaggatgaaatttagaggacgctgttggagtagaaaaaaatatagagg

SEQ ID NO: 204293 - DNA, 1230 bp, Zea Mays
cttcacttcaactccactcctttggatgtgggttcagcacagcacttgccaggagattagatgcagactagtattcttacccccaaaaaaatatcagcttttgcagaagtattggatgcacggagttgattatttcaaaggaaatcatcatttttgtccgactttccagcacaagtctggtctctagtgaggcggtttgatcaaccacagcttttcaagccctttgtgagccggtgtgaaatgaagggcaacattgagattggcagtgtcagggaggttaatgtaaagtctgggctgccagccacaagaagcacggagaggctggaactgttagatgacaatgagcacatactcagcgtcagatttgttggaggtgatcacaggctgcagaactactcgtccatcctcaccgtccaccccgaggtcatcgacggccgaccggggacgctcgtgatcgagtccttcgtggtggacgtccccgacggcaacaccaaggacgagacctgctacttcgtggaggccctgctcaagtgcaacctcaagtcgctcgcggaggtgtccgagcgacaggtcgtcaaggatcaaacggagccccttgaccggtgatgggggagatacatacatacatgtcgaacgatatgttcggatcactgcattgcattgcttacgatgtgcagagctaatcttcaacggagcccctaggttcctggagaaaagagctttgagggactgctactgctactgctatgccgcgtcgttcaaagttaagtttcctccttgcgattgtgtttgctgtccttttctccggcgttgtacgtcgcacaaggagaaggacaggcagaatatgatgtgctattgtagtattgaaaaatgaaaggaaaaaaagaactgtgaggctctgaacatcttcattcccatggtcaatgtgtggacttgagggtttctctgtaattagattcgctctagattgccaaccccccccttcccccttcctgttttctttttttattgtgtgtgttgtgtaaatacatgttcctagtgtataattaattctctatgggtttgtttggctactctagtattcaccccaatacacatgggttgagggagattgtggtgtaaattaaactaatttacatcacaatcctcttcaacccatgtgtattgagataaattactagaatattcaaacatagcctagagggttgtccatgagcattgttattaaag

SEQ ID NO: 204294 - DNA, 1100 bp, Zea Mays
gctgaatctgctttttgccagattattttggggtttcaatctaggtctggtctctagtgaggcggtttgatcaaccacagcttttcaagccctttgtgagccggtgtgaaatgaagggcaacattgagattggcagtgtcagggaggttaatgtaaagtctgggctgccagccacaagaagcacggagaggctggaactgttagatgacaatgagcacatactcagcgtcagatttgttggaggtgatcacaggctgcagaactactcgtccatcctcaccgtccaccccgaggtcatcgacggccgaccggggacgctcgtgatcgagtccttcgtggtggacgtccccgacggcaacaccaaggacgagacctgctacttcgtggaggccctgctcaagtgcaacctcaagtcgctcgcggaggtgtccgagcgacaggtcgtcaaggatcaaacggagccccttgaccggtgatgggggagatacatacatacatgtcgaacgatatgttcggatcactgcattgcattgcttacgatgtgcagagctaatcttcaacggagcccctaggttcctggagaaaagagctttgagggactgctactgctactgctatgccgcgtcgttcaaagttaagtttcctccttgcgattgtgtttgctgtccttttctccggcgttgtacgtcgcacaaggagaaggacaggcagaatatgatgtgctattgtagtattgaaaaatgaaaggaaaaaaagaactgtgaggctctgaacatcttcattcccatggtcaatgtgtggacttgagggtttctctgtaattagattcgctctagattgccaaccccccccttcccccttcctgttttctttttttattgtgtgtgttgtgtaaatacatgttcctagtgtataattaattctctatgggtttgtttggctactctagtattcaccccaatacacatgggttgagggagattgtggtgtaaattaaactaatttacatcacaatcctcttcaacccatgtgtattgagataaattactagaatattcaaacatagcctagagggttgtccatgagcattgttattaaag

SEQ ID NO: 204295 - DNA, 2508 bp, Zea Mays
cttccttccagcttccacacgcaaaggcaaagctcagtactctacctgcttcgcatctcagcagcagtgctgtcagatgactggacttatttgatgctcttgccgttctcgacttggggcgcgagccgatggatctcctccggatgaaacttctcctgccctccttcatcagctgccttcttctgatgcaggcagcactatgtgatggcgccgccgccaccaccaccaccaccggcgaaaacggaacggcaaactggacatgtgtgtgcgcagctcatcctctcggtgaaccagactccaacagcagcttgctgtccaattgctcttcctcctgccattgccaccgagcagatgagaacggcggcggcggcggcggcggcgcaggctcgtggaactgcacgtgtgcctctggtgatgagggccttcagaaggaagagcatgctgagctacgtgacgggagctgtttcacttcctgcaactgcacgtcgggtactggaacttcagaggaagggagaaagcgtgtctcaagcaaaacagtcatagctacgctcctggtctgcgtggttctcaccaccaccgctttcctcgtcaccaccgtatactacttccgccgcaaggacgccctctctccgcgatcgcagatatactccttcgatagatacactactagctggagcagcaggtcgaacctcgtcagcagtcgatcgtctccgcttccccagatgaaacccaaaccaaagcttggtggtctgaaagagtttctgtgcagctgcaatcttgtcatctgtgggggagagagcggcgcattccccggtgtcgtcgcccggttctcgtacgcagagctggagcaagcgaccgggagattctcggacgaccaccttatcggagtcggtgggtcaagcaaggtgtaccgcggccagctcggcgatggcagagtcgttgccgtgaagaagcttaggccgctaggaggcacggacgaagacttggagttcctgtcagagatcgagctgctgtcgaggctgaaccactgccacgtggtgccgttgctggggtactgctcggagagccagggccggcagctggagcggctgctggtgttcgagtgcatggccaacggcaacctgagggactgcctagacctgaagcgagggaggaagcccatggactggcagacgcgggtgagcgtcgcgctcggcgccgcgagggggctggagtacctgcacgaggcggcggcgccgcgcatcctccaccgcgacatcaagtccaccaacatcctcctggacgacaagttcagagccaagatcactgacctcggcatggccaagtgcctgatgaacgacggcgtgaccagctgctcgagctccccggcgcggatgctgggcacgttcggctacttcgcaccggagtacgccatcgtgggcaaggcgtcgctcaagtccgacgtcttcagcttcggcgtcgttgtgctggagctcatcaccggccggcagcccatccacaagtcgtcgtcgacgagggccgacgagagcctcgtactctgggcgacgtcgcggctgcgggacagcgggctggtggtcacggagctgccggacccgacgctgcagggcaagttcccggcggaggagatgcagatcatggcgcacctggcgcgggagtgcctgcagtgggaccccgaggccaggcccaccatgacggaggtcgtgcacatcctcgccaccatcgcaccactccagcacggcgccaagcgtcggaaccttcccatcgccaccgccttcaacctcacgccatcgccgcacgtcgggcggtgtgacccggagcctaaagacgacgacatcgagaggcagatgcagcagcaggagtgctcgccgacgacggctgtccagtggcaacaacaacaagcgcgctgcacccacgcgccaacgggccgcgcgtcgtggcccggcgacagggggaacgttgtgagcagaggcgcggcggtgtcgggcgagctggtgaacgggacggtgctgatgaacccccacgggcggggcagctggcggcggccgccgccgcttggcgacgaggaggcagtggacgtggatctgacggagccccggatggaggcgttcacgcagccggcggcgtttcagcctttcaggtgacggaaggattaggatcaggtggtggtggttctgattggtgcggcggcggcgggtgctgctgtacatcttcttgttcgtgcctccacgatccacaccaggatcatctgcttctgcatctgcgttcatgaatgtacagtacaggcaaatacatctagattggcaacgggaaaagaaaagaaaggcatcgagatcgttatgggatataggacctagattgaacacgagatcaatgcatgaatctgaatccacggcgcgcgtcattggacacatcactgttgtacacaagcaaacagacaatgagtgttcacagaagcaaaaaatataagaccgagttcaatgcatgaatctcaaaagcagctcttttcag

SEQ ID NO: 204296 - DNA, 2058 bp, Zea Mays
gagcttgtcatgcagcaggctcccctcctcgcccgcccccgtacgtgtccatctctccactcctttcctttccttgttggtaagagcaaggcgagacgtaacgtaatccggccatggcgttcttccggggcctcaccgcggtctcgagactgcgatcccgcatggcgcaggaggccaccacgctgggtggtgtgagatggctgcagatgcagagcgcgtccgacctcgatcttaagtcccagctgcgggaactgattccggaacagcaggaccgcttaaagaagcttaaatcagagcatgggaaggttcagcttggaaacataactgtggatatggtccttggtggaatgagagggatcattggaatgctttgggagacatccctagtcgacccagaggagggtattcgttttaggggcctctcaattccagagtgccgaaaagtgctgccaacagcagttgagggtggtgaacctttgcctgagggtctcctctggcttcttttgacagggaaggtcccaaccaaagatcaagttgatgctctatcaaaagaattgcttgcgcgctcaactgtcccaggtattttgatcacaccgctggctacttgtgttattgttttgaccaattaaatctacaaatcatctgaatgaactgatgctgatgtctccctgttctaaagttcaaaggtagtcacagattgatagagaggtctatatgattctgtcagtatgattgtgttaatgtttatatgctttatcttgctactctctagcggctcataattaatatccttgcagctcatgtctataaggtaatagatgctctcccagtaactgcacatcctatgacacaatttaccgcaggaataatggctcttcaggttgagagcgaatttcaaaaagcttacggcaatggattgcccaaaatcaaagctttgggagcctacttatgaagactgcttaaatttgattgctcggcttccaccagtggcttcttatgtttaccggagaattttcaaggatgggaaatcaatagaagctgatgattctctggattatgcggcaaatttatcacatatgcttggttttgacgaccccaggatgctggagctgatgcggctccattgatcatgaaggcgggaatatcagttctcatactggtcatctggttggaagtgctctgtcagatccttatctttctttcgcatcatctgtgaatgggttagctgggccactacatggccttgcaaatcaggaagcgcttctatggctcaagtctataattcaggaaacagggagcgacgttacgacagaccaactcaaagactatgtctggaagacactgaagagtggaaaggttgttcatggatttggtcatggagttctgcgtaggacggacccacggtatctatgccaaagggagtttgccctgaagtatttgccagaggatccgcttttccaactgctgtccaagttatatgaggtcgtgcctccgatcctcactgagctgggaaaggtcaagaacccatggcccaatgttgacgctcacagtggactcttgctgaaccactttggactatctgaaacacggtatcacactgtcttgttcggtgtttcgagaagcatgggggtaggatcccagctcatctgggaccgtgcccttggcctgccactcgagaggcccaagagcgttaccatggagtggctggagaactactgcaagaacaaggctgcctgaagcttttcacaaatgctgctgctttttttccccccagccttggctgttaatgattaaacatgagttgtagaactattctttttccccccattggccgttgaataacgcaatagcagcgtgctctcgggcgctagaattctgtatctctccgtcacttggtggacgtccagatagacagttcatctgcggcaacactgtgcagaagagattaggacatttcacttggtgtatgccgacacttgagtttttgtttaacgttatgtttggcagagttaatcggtaattacagatttgggctatggcatgttatgttatcatgta

SEQ ID NO: 204297 - DNA, 1728 bp, Zea Mays
cccctcctcgcccgcccccgtacgtgtccatctctccactcctttcctttccttgttggtaagagcaaggcgagacgtaacgtaatccggccatggcgttcttccggggcctcaccgcggtctcgagactgcgatcccgcatggaccgcttaaagaagcttaaatcagagcatgggaaggttcagcttggaaacataactgtggatatggtccttggtggaatgagagggatcattggaatgctttgggagacatccctagtcgacccagaggagggtattcgttttaggggcctctcaattccagagtgccgaaaagtgctgccaacagcagttgagggtggtgaacctttgcctgagggtctcctctggcttcttttgacagggaaggtcccaaccaaagatcaagttgatgctctatcaaaagaattgcttgcgcgctcaactgtcccagctcatgtctataaggtaatagatgctctcccagtaactgcacatcctatgacacaatttaccgcaggaataatggctcttcaggttgagagcgaatttcaaaaagcttacggcaatggattgcccaaaatcaaagctttgggagcctacttatgaagactgcttaaatttgattgctcggcttccaccagtggcttcttatgtttaccggagaattttcaaggatgggaaatcaatagaagctgatgattctctggattatgcggcaaatttatcacatatgcttggttttgacgaccccaggatgctggagctgatgcggctccatgtaacaattcacgctgatcatgaaggcgggaatatcagttctcatactggtcatctggttggaagtgctctgtcagatccttatctttctttcgcatcatctgtgaatgggttagctgggccactacatggccttgcaaatcaggaagcgcttctatggctcaagtctataattcaggaaacagggagcgacgttacgacagaccaactcaaagactatgtctggaagacactgaagagtggaaaggttgttcatggatttggtcatggagttctgcgtaggacggacccacggtatctatgccaaagggagtttgccctgaagtatttgccagaggatccgcttttccaactgctgtccaagttatatgaggtcgtgcctccgatcctcactgagctgggaaaggtcaagaacccatggcccaatgttgacgctcacagtggactcttgctgaaccactttggactatctgaaacacggtatcacactgtcttgttcggtgtttcgagaagcatgggggtaggatcccagctcatctgggaccgtgcccttggcctgccactcgagaggcccaagagcgttaccatggagtggctggagaactactgcaagaacaaggctgcctgaagcttttcacaaatgctgctgctttttttccccccagccttggctgttaatgattaaacatgagttgtagaactattctttttccccccattggccgttgaataacgcaatagcagcgtgctctcgggcgctagaattctgtatctctccgtcacttggtggacgtccagatagacagttcatctgcggcaacactgtgcagaagagattaggacatttcacttggtgtatgccgacacttgagtttttgtttaacgttatgtttggcagagttaatcggtaattacagatttgggctatggcatgttatgttatcatgta

SEQ ID NO: 204298 - DNA, 2048 bp, Zea Mays
ctcctcgcccgcccccgtacgtgtccatctctccactcctttcctttccttgttggtaagagcaaggcgagacgtaacgtaatccggccatggcgttcttccggggcctcaccgcggtctcgagactgcgatcccgcatggcgcaggaggccaccacgctgggtggtgtgagatggctgcagatgcagagcgcgtccgacctcgatcttaagtcccagctgcgggaactgattccggaacagcaggaccgcttaaagaagcttaaatcagagcatgggaaggttcagcttggaaacataactgtggatatggtccttggtggaatgagagggatcattggaatgctttgggagacatccctagtcgacccagaggagggtattcgttttaggggcctctcaattccagagtgccgaaaagtgctgccaacagcagttgagggtggtgaacctttgcctgagggtctcctctggcttcttttgacagggaaggtcccaaccaaagatcaagttgatgctctatcaaaagaattgcttgcgcgctcaactgtcccaggtattttgatcacaccgctggctacttgtgttattgttttgaccaattaaatctacaaatcatctgaatgaactgatgctgatgtctccctgttctaaagttcaaaggtagtcacagattgatagagaggtctatatgattctgtcagtatgattgtgttaatgtttatatgctttatcttgctactctctagcggctcataattaatatccttgcagctcatgtctataaggtaatagatgctctcccagtaactgcacatcctatgacacaatttaccgcaggaataatggctcttcaggttgagagcgaatttcaaaaagcttacggcaatggattgcccaaaatcaaagctttgggagcctacttatgaagactgcttaaatttgattgctcggcttccaccagtggcttcttatgtttaccggagaattttcaaggatgggaaatcaatagaagctgatgattctctggattatgcggcaaatttatcacatatgcttggttttgacgaccccaggatgctggagctgatgcggctccatgtaacaattcacgctgatcatgaaggcgggaatatcagttctcatactggtcatctggttggaagtgctctgtcagatccttatctttctttcgcatcatctgtgaatgggttagctgggccactacatggccttgcaaatcaggaagcgcttctatggctcaagtctataattcaggaaacagggagcgacgttacgacagaccaactcaaagactatgtctggaagacactgaagagtggaaaggttgttcatggatttggtcatggagttctgcgtaggacggacccacggtatctatgccaaagggagtttgccctgaagtatttgccagaggatccgcttttccaactgctgtccaagttatatgaggtcgtgcctccgatcctcactgagctgggaaaggtcaagaacccatggcccaatgttgacgctcacagtggactcttgctgaaccactttggactatctgaaacacggtatcacactgtcttgttcggtgtttcgagaagcatgggggtaggatcccagctcatctgggaccgtgcccttggcctgccactcgagaggcccaagagcgttaccatggagtggctggagaactactgcaagaacaaggctgcctgaagcttttcacaaatgctgctgctttttttccccccagccttggctgttaatgattaaacatgagttgtagaactattctttttccccccattggccgttgaataacgcaatagcagcgtgctctcgggcgctagaattctgtatctctccgtcacttggtggacgtccagatagacagttcatctgcggcaacactgtgcagaagagattaggacatttcacttggtgtatgccgacacttgagtttttgtttaacgttatgtttggcagagttaatcggtaattacagatttgggctatggcatgttatgttatcatgta

SEQ ID NO: 204299 - DNA, 1915 bp, Zea Mays
gttcagtcaggatggaaggcttatagtacattcctccttctgggccgtaccgcgcggaccttcaaagcctgtatcatgctgcatcttccttccctggggccagcctcgtcaactccgcttccggttctggcccattggcgttgcttcacatcgacgcgcctgcgccgccggtccgccgcgccttcccctcccttctcccccgcgtgccctcctattccttctctgcggcggcgtggggagctgcatctgccttcgtctggaggagtgggaagaagcgctgccgaaggggtgatttacgaagccagagagcggctgggagcaagagtgcctgggactgggagttgaagctagagaggctagttgcttgtttggtgcgctgccaaaccgccctcaacatctgacccgtctctccctcacttccacggttccagcgagcggcgcaaccgcgcaactgagcagctagcatgggggacgaagaagatgatcctgactggctccgcgcgtttcagatacctcccctgaagctagtcctacaagaaccagtacatctagaaaacaaaacaagggagagaagcacgctagtccagatcatgcacgtgatagagatggtgcttcacaaaataaaaacaaaatctcagcagctactagaagaaaaaaccttgtcagtaaaaaagaggggtcaactatggatgaaaaacaagctaatactcctagacgcttgactccaaagaaggatatggtaacactttcatctggttctgatgcttcaccgggaaacagcctttcgagggcccatgaagataaccatgaagagggctcacttagcactgccaagagaaagaatgctcaacaaactaagactaaaaaaacaaaggatgctggaacaaaaactggtgcagaccaagcagggaatggagatgctgaggatgatgtgcaagataaactcacagggaactctgtctcccagaggttaccattaatatttccagataaagttcaacgttcaaaggcattgattgaatgtgatggtgactcgatagatttaagtggagatattggtgcggttgggaggatagtagtttcaaatggtcctactgcaaaacaggatttgttgttggacctgaaaggaacaatatacaaaacaactatagttccatccaggacattttgtgttgtgagtgtgggacaatcagaagcaaagatagaggctataatgaatgacttcattcaactggaaccacaatccaatttatttgaagcagagactatggtggaaggtacccttgatggattcacatttgattcagatgaggagggtgacaaactctatgaaccacaggctaatcaaaacgatctgaataataacgaagatgaaggtcaacctaaggcaaagaccaaaaggaaagcagagaaaacaacggggaaggcaccgaagaaggcgaaggttgcaggaaagggccctaaaaagggcacgaggaaaacccaacctgcgaagagaggtaggaaggctaagaaatgatgacatgttgatttcctcggataagaagaaaaagtctattgagaacctggatagctggcaacaaagatgtgaatttttcaacgcatagtcatggctgtgaggcgcgtcgtcagttcaacatcatgcagtacttgttttagagagagagaacatgtaaagctgtaaacgttgttgtgtactctatgagcgttcagctttggatcattgaaaagaccgagatgttcacgtggaggcgaactgacttctctattttttttcacaaattaaaatctatcagtaaggctttgttcgtttatgccggattggtggatcgaaacgattcctaactggattgcttctctaatttatataaactttgattaggtaaaacgattccgggtgcaatccgacataaac

SEQ ID NO: 204300 - DNA, 1846 bp, Zea Mays
ctgggccgtaccgcgcggaccttcaaagcctgtatcatgctgcatcttccttccctggggccagcctcgtcaactccgcttccggttctggcccattggcgttgcttcacatcgacgcgcctgcgccgccggtccgccgcgccttcccctcccttctcccccgcgtgccctcctattccttctctgcggcggcgtggggagctgcatctgccttcgtctggaggagtgggaagaagcgctgccgaaggggtgatttacgaagccagagagcggctgggagcaagagtgcctgggactgggagttgaagctagagaggctagttgcttgtttggtgcgctgccaaaccgccctcaacatctgacccgtctctccctcacttccacggttccagcgagcggcgcaaccgcgcaactgagcagctagcatgggggacgaagaagatgatcctgactggctccgcgcgtttcagatacctcccctgaagctagtcctacaagaaccagtacatctagaaaacaaaacaagggagagaagcacgctagtccagatcatgcacgtgatagagatggtgcttcacaaaataaaaacaaaatctcagcagctactagaagaaaaaaccttgtcagtaaaaaagaggggtcaactatggatgaaaaacaagctaatactcctagacgcttgactccaaagaaggatatggtaacactttcatctggttctgatgcttcaccgggaaacagcctttcgagggcccatgaagataaccatgaagagggctcacttagcactgccaagagaaagaatgctcaacaaactaagactaaaaaaacaaaggatgctggaacaaaaactggtgcagaccaagcagggaatggagatgctgaggatgatgtgcaagataaactcacagggaactctgtctcccagaggttaccattaatatttccagataaagttcaacgttcaaaggcattgattgaatgtgatggtgactcgatagatttaagtggagatattggtgcggttgggaggatagtagtttcaaatggtcctactgcaaaacaggatttgttgttggacctgaaaggaacaatatacaaaacaactatagttccatccaggacattttgtgttgtgagtgtgggacaatcagaagcaaagatagaggctataatgaatgacttcattcaactggaaccacaatccaatttatttgaagcagagactatggtggaagatgaggagggtgacaaactctatgaaccacaggctaatcaaaacgatctgaataataacgaagatgaaggtcaacctaaggcaaagaccaaaaggaaagcagagaaaacaacggggaaggcaccgaagaaggcgaaggttgcaggaaagggccctaaaaagggcacgaggaaaacccaacctgcgaagagaggtaggaaggctaagaaatgatgacatgttgatttcctcggataagaagaaaaagtctattgagaacctggatagctggcaacaaagatgtgaatttttcaacgcatagtcatggctgtgaggcgcgtcgtcagttcaacatcatgcagtacttgttttagagagagagaacatgtaaagctgtaaacgttgttgtgtactctatgagcgttcagctttggatcattgaaaagaccgagatgttcacgtggaggcgaactgacttctctattttttttcacaaattaaaatctatcagtaaggctttgttcgtttatgccggattggtggatcgaaacgattcctaactggattgcttctctaatttatataaactttgattaggtaaaacgattccgggtgcaatccgacataaac

SEQ ID NO: 204301 - DNA, 1666 bp, Zea Mays
cttcaaagcctgtatcatgctgcatcttccttccctggggccagcctcgtcaactccgcttccggttctggcccattggcgttgcttcacatcgacgcgcctgcgccgccggtccgccgcgccttcccctcccttctcccccgcgtgccctcctattccttctctgcggcggcgtggggagctgcatctgccttcgtctggaggagtgggaagaagcgctgccgaaggggtgatttacgaagccagagagcggctgggagcaagagtgcctgggactgggagttgaagctagagaggctagttgcttgtttggtgcgctgccaaaccgccctcaacatctgacccgtctctccctcacttccacggttccagcgagcggcgcaaccgcgcaactgagcagctagcatgggggacgaagaagatgatcctgactggctccgcgcgtttcagaggggtcaactatggatgaaaaacaagctaatactcctagacgcttgactccaaagaaggatatggtaacactttcatctggttctgatgcttcaccgggaaacagcctttcgagggcccatgaagataaccatgaagagggctcacttagcactgccaagagaaagaatgctcaacaaactaagactaaaaaaacaaaggatgctggaacaaaaactggtgcagaccaagcagggaatggagatgctgaggatgatgtgcaagataaactcacagggaactctgtaaagtctcccagaggttaccattaatatttccagataaagttcaacgttcaaaggcattgattgaatgtgatggtgactcgatagatttaagtggagatattggtgcggttgggaggatagtagtttcaaatggtcctactgcaaaacaggatttgttgttggacctgaaaggaacaatatacaaaacaactatagttccatccaggacattttgtgttgtgagtgtgggacaatcagaagcaaagatagaggctataatgaatgacttcattcaactggaaccacaatccaatttatttgaagcagagactatggtggaagatgaggagggtgacaaactctatgaaccacaggctaatcaaaacgatctgaataataacgaagatgaaggtcaacctaaggcaaagaccaaaaggaaagcagagaaaacaacggggaaggcaccgaagaaggcgaaggttgcaggaaagggccctaaaaagggcacgaggaaaacccaacctgcgaagagaggtaggaaggctaagaaatgatgacatgttgatttcctcggataagaagaaaaagtctattgagaacctggatagctggcaacaaagatgtgaatttttcaacgcatagtcatggctgtgaggcgcgtcgtcagttcaacatcatgcagtacttgttttagagagagagaacatgtaaagctgtaaacgttgttgtgtactctatgagcgttcagctttggatcattgaaaagaccgagatgttcacgtggaggcgaactgacttctctattttttttcacaaattaaaatctatcagtaaggctttgttcgtttatgccggattggtggatcgaaacgattcctaactggattgcttctctaatttatataaactttgattaggtaaaacgattccgggtgcaatccgacataaac

SEQ ID NO: 204302 - DNA, 1691 bp, Zea Mays
cttcaaagcctgtatcatgctgcatcttccttccctggggccagcctcgtcaactccgcttccggttctggcccattggcgttgcttcacatcgacgcgcctgcgccgccggtccgccgcgccttcccctcccttctcccccgcgtgccctcctattccttctctgcggcggcgtggggagctgcatctgccttcgtctggaggagtgggaagaagcgctgccgaaggggtgatttacgaagccagagagcggctgggagcaagagtgcctgggactgggagttgaagctagagaggctagttgcttgtttggtgcgctgccaaaccgccctcaacatctgacccgtctctccctcacttccacggttccagcgagcggcgcaaccgcgcaactgagcagctagcatgggggacgaagaagatgatcctgactggctccgcgcgtttcagaggggtcaactatggatgaaaaacaagctaatactcctagacgcttgactccaaagaaggatatggtaacactttcatctggttctgatgcttcaccgggaaacagcctttcgagggcccatgaagataaccatgaagagggctcacttagcactgccaagagaaagaatgctcaacaaactaagactaaaaaaacaaaggatgctggaacaaaaactggtgcagaccaagcagggaatggagatgctgaggatgatgtgcaagataaactcacagggaactctgtctcccagaggttaccattaatatttccagataaagttcaacgttcaaaggcattgattgaatgtgatggtgactcgatagatttaagtggagatattggtgcggttgggaggatagtagtttcaaatggtcctactgcaaaacaggatttgttgttggacctgaaaggaacaatatacaaaacaactatagttccatccaggacattttgtgttgtgagtgtgggacaatcagaagcaaagatagaggctataatgaatgacttcattcaactggaaccacaatccaatttatttgaagcagagactatggtggaaggtacccttgatggattcacatttgattcagatgaggagggtgacaaactctatgaaccacaggctaatcaaaacgatctgaataataacgaagatgaaggtcaacctaaggcaaagaccaaaaggaaagcagagaaaacaacggggaaggcaccgaagaaggcgaaggttgcaggaaagggccctaaaaagggcacgaggaaaacccaacctgcgaagagaggtaggaaggctaagaaatgatgacatgttgatttcctcggataagaagaaaaagtctattgagaacctggatagctggcaacaaagatgtgaatttttcaacgcatagtcatggctgtgaggcgcgtcgtcagttcaacatcatgcagtacttgttttagagagagagaacatgtaaagctgtaaacgttgttgtgtactctatgagcgttcagctttggatcattgaaaagaccgagatgttcacgtggaggcgaactgacttctctattttttttcacaaattaaaatctatcagtaaggctttgttcgtttatgccggattggtggatcgaaacgattcctaactggattgcttctctaatttatataaactttgattaggtaaaacgattccgggtgcaatccgacataaac

SEQ ID NO: 204303 - DNA, 912 bp, Zea Mays
ggaaagagcaagtggtgtggcggcgaggcgcatgggcaatgcagaaccctgccccgcctacggagggtcgaggcacaacaagtgggtaatgcggagaagaagggaatctggttctacgactctacaaggagagggcacatgggtggtggccgtgcgtcgtgcctgtctgccctgagggctgcctgatttgctcggatctgcggtctgcctgcctgtgcgtacaacagacagggccagtgccgccggcagagtggtagacaacagactgccatgcgtgcctcacgttgtatccatggagatgaggacgacattgcctccaagtctgctccaccggcatccatcgacggtgcaaggtgaggtgaatttaatgctgacggcttatctcttggagcagaagcaacaggtgagctcattgagccctcaatggtaggtggctggacctggtggaccgaagatcctgagccattctgcataccagcacatgggcgcaattccacagcgccaacaacaaactcctttccatacttggtggtaataaattacggagatgcattagctcaggataaacaatgctccatagatcatgaagcagatgctcccgccacctaaggatttggagattgctatagtgcaagtagagtgtagtgattatgtagctatagtgcaagcagatgcccccgccacctaagtagcttctttggtgtacacaaaataatgttcaaaggctacaagcattagccgggacatagtccaagcctgatacaagaaaagtgtcacttaacgttatgcccaacattgttttgtttgtgctacgagctgtataactatttaagcaattatgtagctatttttatttcagtttcactagcattgtctagaacacagtgttcgatatacatgttttatagtaat

SEQ ID NO: 204304 - DNA, 789 bp, Zea Mays
ccctgccccgcctacggagggtcgaggcacaacaagtgggtaatgcggagaagaagggaatctggttctacgactctacaaggagagggcacatgggtggtggccgtgcgtcgtgcctgtctgccctgagggctgcctgatttgctcggatctgcggtctgcctgcctgtgcgtacaacagacagggccagtgccgccggcagagtggtagacaacagactgccatgcgtgcctcacgttgtatccatggagatgaggacgacattgcctccaagtctgctccaccggcatccatcgacggtgcaaggtgaggtgaatttaatgctgacggcttatctcttggagcagaagcaacaggtgagctcattgagccctcaatggtaggtggctggacctggtggaccgaagatcctgagccattctgcataccagcacatggataaacaatgctccatagatcatgaagcagatgctcccgccacctaaggatttggagattgctatagtgcaagtagagtgtagtgattatgtagctatagtgcaagcagatgcccccgccacctaagtagcttctttggtgtacacaaaataatgttcaaaggctacaagcattagccgggacatagtccaagcctgatacaagaaaagtgtcacttaacgttatgcccaacattgttttgtttgtgctacgagctgtataactatttaagcaattatgtagctatttttatttcagtttcactagcattgtctagaacacagtgttcgatatacatgttttatagtaat

SEQ ID NO: 204305 - DNA, 801 bp, Zea Mays
ccctgccccgcctacggagggtcgaggcacaacaagtgggtaatgcggagaagaagggaatctggttctacgactctacaaggagagggcacatgggtggtggccgtgcgtcgtgcctgtctgccctgagggctgcctgatttgctcggatctgcggtctgcctgcctgtgcgtacaacagacagggccagtgccgccggcagagtggtagacaacagactgccatgcgtgcctcacgttgtatccatggagatgaggacgacattgcctccaagtctgctccaccggcatccatcgacggtgcaagcatcatttacaggtgaggtgaatttaatgctgacggcttatctcttggagcagaagcaacaggtgagctcattgagccctcaatggtaggtggctggacctggtggaccgaagatcctgagccattctgcataccagcacatggataaacaatgctccatagatcatgaagcagatgctcccgccacctaaggatttggagattgctatagtgcaagtagagtgtagtgattatgtagctatagtgcaagcagatgcccccgccacctaagtagcttctttggtgtacacaaaataatgttcaaaggctacaagcattagccgggacatagtccaagcctgatacaagaaaagtgtcacttaacgttatgcccaacattgttttgtttgtgctacgagctgtataactatttaagcaattatgtagctatttttatttcagtttcactagcattgtctagaacacagtgttcgatatacatgttttatagtaat

SEQ ID NO: 204306 - DNA, 1507 bp, Zea Mays
ctcactccgtcccaccgtaaataggcagacacatcagaagagagagggagcacccttccgaagccacgccaccgacatcgcctcgtgacccgacgcactgcgccagggacccagccagctagctacatccactgatccacgcgcattccccgtaccaccgccaccgcgccgcgtcacggaaggaggaggatgtcgtcgtctccctcgccggcggccacccgcctggatctggatggcaaccccatcgctcccctcaccatctgcatgatcggcgccggcggcttcatcggctcccacctctgcgagaagctaatggccgagacgcaccacaccgtcctcgctgttgacgtctactgcgacaagatccgccaccttgtcgaccccgcgccgccgcacctcgccgggcgcatctcattccaccgccttaacataaaaaacgactccaggctagaggggctcatcaagatggccgatctggagcctgaattttatgttcttaaagaagatgagtcgccctgtatttttggtccaatcgtgaaacaaagatggtcctatgcatgcgcaaagcaacttattgagaggcttgtatttgctgaaggtgcagaaaatggccttgatttcacaatcgtgagacctttcaattggattggaccaaggatggacttcattcctggtgttgatggtcctagtgaaggtgtgcctcgggttttggcttgcttcagtaacaatctgctccggagagagcccttgaagcttgttgatgggggtcagtctcagagaacctttgtctacatcaaggatgctatcgaagctgtagtgctgatgattgaaaatcctgctcgagccaatggccacatcttcaatgttgggaatccgaacaatgaagttaccgttagggagttggcccaaatgatgacagaggtctacgcaaatgtctcaggagaggcaccgctggatgagcccatgattgacgtgagctcgagtcagttctacggtgaaggatacgatgatagcgacaagaggatccccgacatgactataatcaacaagcagctaggttggaacccaaagacgcctctcaaggatctgctggagacaacactgacatatcagcacaagacatacaaagaagctgtgaaaaggcaaatgtcgcaggcttcagcgtcgacttagatagcgtgcccctggctctcgtctagagcctagtcgcagctgttaagatgtttcggaagcgcaggtcacacatacgctagtgatcttttttttgaggccctagatgtccgtgttgttagataaccaagggatgctgtatcagtatgatatatttgtggcagagttgatgtattccatcgttgagctgttatatattgctgtttgagtgtagaactagttgctcagttatatgttattggttcatgagattagcgcccacatcaatctgttgatagcacatacatactatagcagggcaatgatgaatctcattcgtcagccatcaagtttcaga

SEQ ID NO: 204307 - DNA, 1478 bp, Zea Mays
acattttacggccacaaaaaatgtataaaataggaaatgggaaaaccccatcacagctccacgcctccactgctatccctctcttcctctctgctttccccttccaatggaatcctgtagcttccgtgccgcaaccgcgccttctccctttccctccgctccttcttcatcttcatccccgcgcgccccatgccccatactccgatttcccaggccaagaaaagggaggcagattggggtgcggaggagggcgtccggatttgatgccttcgcgtctttcgccggcaaggtcttcgtggatgagttatgctgtgactgtgtaaccggttagctgctggagggctcagagttgacagcgattggagcggaatatggggagggcttcgaaacatttcgaatggatggaccactcaaggttgatgtggattatctgaatgaaaaattgcaagagtgcttccttcaaaggataaggcatgctatgaagccggatgaggcgtttggtctaattttttcgtgggacaatgttattgctgatacagactcgctaaagttgaatgcttggagacaacttgctttggaggaaggtaaggatatcccaagtggtgctcatgtccggaagagcattattcatggtgctgctgaccatgttcttagaaaggttttgtactgggcaaaagaggaagataaaatggaaaaattgaaggcacgccttatagagttgtactacgagaacctgttcaaactcgatacacctgtagaaggattgagagaatggctggatgctgttcagacagcagggataccttgtgctgtcgcatcaccccttgacaggagatgcatgatcgaagctttggatcggatggcgctaagcaaatatttcaaggcgatcgtgactgacgaagatgatatggagtcgatagcaaatcgatttctgtcagctgctatgaagttggatcgtaaaccctcgaagtgtgtggtgttcgaggatgacccaaggggcgtcacagccgcccacaactgtacaatgatggcagtcgcattgattggtgctcatccagcgtatgagttggtacaggcagaccttgccattgcaaagtacagcgagctctcagtgatcaacctcagaaggctgtttgcgaacaagggaatcagcttcatggacttgcagaagcagataatcgagaagtcacctcccaagaggaggctgacagtagacaccattttctgatagatacacttttatttggtgtctgcctgttgttcttgagtagccaacaaccttcggcattatggcggtggcgttgtatataagatagtgctgatgttaggtgatccgctgtgtacctccttgtgaatgcaatgcggtagttccatcaaggtaccatgaggaagactgctgcaacaatgttgttgctgatgtaagctgatattattcaaatttattcatatttcatggtcgatatctagctcgtcgacat

SEQ ID NO: 204308 - DNA, 1600 bp, Zea Mays
taagagaatctacttaacacatggatcgcctaaagaagcttaaatcagagcatgggaaggttcagcttggaaacataactgtggatatggtccttggtggaatgagagggatgattggaatgctttgggaaacatccctacttgacccagaggagggtattcgttttaggggtctctcgattccagagtgccaaaaagtgctgccaacagcagttaagggtggtgaacctttgcctgagggtctcctttggcttcttttgacagggaaggtcccaaccaaagagcaagttgatgcactatcaaaggaattgcttgcgcgctcaactgtcccagctcatgtctataaggcaatagatgctctcccagtaactgcacatcctatgacacagtttaccacgggagtaatggctcttcaggttgagagcgaatttcaaaaagcttatgacaatggattgccaaaatcaaagttttgggagcctacttatgaagactgcttaaacatgattgctcggcttccaccagtggcttcttatgtttaccggagaattttcaagggtgggaaatcaatagaaactgacaattctctggattatgcggcaaatttctcacacatgcttggttttgatgaccctaaaatgctggagctgatgcggctctatgtaacaattcacactgatcatgaaggcgggaatgtcagtgctcatactggtcatctggttggaagtgctctgtcagatccttatctttctttcgcagcggctctaaatgggttagctgggccactacatggccttgcaaatcaggaagtgcttctatggatcaaatctgtaattcaggaaactgggagtgatgttacaacggatcaactcaaagagtatgtctggaagacactaaagagtggaaaggttgttcctggatttggtcatggagttctgcgtaagacagacccacggtattcatgtcaaagggagtttgccctgaagcatttgcccgaggatccacttttccaactggtgtccaagttatatgaagtcgtacctccgatcctcactgagctaggaaaggtcaagaacccgtggccgaatgttgatgctcacagtggagttttgctgaaccactttggactatctgaagcacggtattacactgtcttgttcggtgtttcgagaagcatggggataggatcccagctcatctgggaccgtgcccttggcctgccacttgagaggccgaagagtgttaccatggagtggctggagaactactgcaataacaaggctgcctgaagattttaacagttgctgttttttcccaaccatggctgataataattaaacatgcgttatagagttttttcccccttttgactgttggataatacaagagcaacatgctctagaattttgtatcttccatcacttagtcggcatccagattgttgatctgcggcaacactgcagaagagattaggacatgctgattaatctttgcagagttaattggtaattacagaattgggcttttgcatgtatcatgtatgccaattatctcgttgtggcagttctgttttaagttgatccgcgacatggctggattgctg

SEQ ID NO: 204309 - DNA, 2053 bp, Zea Mays
gaaaacccagccagcgaaaagaaatcggctctcgagtcgtcggtcgtcgccgtgtcggtgtcgctcgccatatccccttttccccctcccttcgtctcccgactcctgcgatccgccccacctgaaccctactccacgtcgcctcgcctcgccggtaatcgacttccttctcttggcccttatgcaatcggttcgtactccatgctcggattctccatctgatccctatataccaactgcgccgattgtattgtcttaggttgggttgtggctgagccgatctgacccgatcgggtgggtccttgcgccgccgctgcgtgggctcatctcggtcccccgcctgctcggctcgatcggccggggacggcggcggcggcggctagatctgcgatggagggcaacaaggacgacgcggccaagtgcctgcgcatcggcaagggcgcgctcgaagccggggaccgcgcgcgcgccatcaaatttatgtccaaggcaaagcgcctcgacccctcgctgcccatcgatgacctgctcacctcccttctcaacgcgcaagacgactccccggcttcctcatcatcatcgccgcctccaccaccgcaaactgccgcagcaggggcatcggaggcagctgagactgatgggctgagagagaggaagcacaagggcaagaagagggaggaggaggaggaggcgactcctgctgccagggagtacaccgcggagcagctcgaggttgtgcgccaggtcaagaagcacaccagggactactaccagatcctcggcctggaaaaggactgcagtgtcgaggacgtgcgcaaggcctaccggaagctctcgctcaaggtgcaccccgacaagaacaaggcccctggcgcagaggacgccttcaaggccgtctccaaggccttccagtgcctgagtgatgcggagagccgcaagcgctacgaccttgttggctcggatgagccagtaacacaccacaggagggcctccactgcccgtgcatacaatgggttctatgaggatgactttgacccagatgagatattcagaaacttcttctttggcggtatggcgcctgcaaccaccaggcagtttggacagtttggaactttccattttaggactggtgggatgcatgcccatgcccatgcccaacaaaactctggtggctcaactgtcaggatgcttattcagctgttgcctgtcctactgctgctgttgctcaacttccttccatcctctgagcctgtctactcgctgtcccgttcatacccttatgagcataagttccaaaccccacgtggagttgcatactatgtcaagatgtctaatttcgaggaacagtatccataccaaagcactgagcgagcgacgctggagcggcatgttgagagggattattactccataatcacacagaattgcagggttgagctgcagcgtcgccaatgggggctgtcataccagacaccacattgtgatatgcttaaaaattttgaggctgcagcaaagtaataactcatccaattctgtaaggagactatcacaggctggctctcagcactgtatccaggtctgaggaaaaaccagaaaaggctaagtcattccagccgccaaacccactgtgtttgtgtgttgacaggcggagagagactgctggccactcatgtaaaggcgctgccttagccgccagcttcaagtttgaggggacattttagtttggcttagtagtaaattttgtggaataagtgcctttgataactatacaccactgtccagatgctccctcttagtagtggcaaggagtgcgttaagtagttacttcaaaaagatatgcaagcttcataggggttgatcacatgcaaaccagtgtatgtatatgaagtatatctatctcattcttttaacttttttgaagtgaagactgtagttaaaacagaaatgcaactataacacaaatgtgatattcattttatattagctcgtgtgctgagatgtccaaagatgctaaaatacgatcatcggacatcattccgttggtattggatct

SEQ ID NO: 204310 - DNA, 1136 bp, Zea Mays
cgccggcccaatattacactgaggagtgaggagcacaattccttccaggatcccagaagattcgacgttccacgggctccggcggcggcaggaacgcctcccgatttcgacggcagaactagagagcgatggcgctgactaacttcatcgtgacggtggccgtggttggcgcgggggtgcttctctttaccaccgacatccgcaggtctggcgccctcttccgccgcaacgcgcgccagctccggctgtggctcgaggaggacacggcctccgccgcgtccaagtctgcaaaagaagcagctccaaagaaactcgactcgacggtccccaaggagaagccaaaggaagatagtcactgattggagctgtttatatgaacggagaggaaaccgtcggcattctgaatcagatagaggtgacgcaacctgggacagctgccgggtggacggtccgtcgactggtggaggaggagaggtgagcagcgactgtacgagtcggaaggtggtgttgaatgatggctgctccagtgcagtgcatgggatcactcgaggttgcactagcaactttcgacgtggttgttggttcagttaggtttgcaatcgtcgtcgtccctcgcagatcatcacagggtggcgaggagatactaacagtgtatggacggtgagtctgaggagaccatcatgcctttgtcgttcagagccgggctagcacttgactgattggcctgcagagcggaaatggaaagccagagccaaaccctgctctgctcaccgtcggagataagagctcgcattgcatcagccggtctcttccgcgcacagccggactctcttcaccaaggcacacggccacacgggtcacgaggaaagtttcctttaaatacccactcggtactcatatagtataagacataaccacttttttattttatccccacgatataaagtgttctctctaaatagtgttctctctctaaatatacgtgaattgatgtaatattattagtactaatatagagaattaaatacatttattggttttgaaccagaggtgggtacaccttatatactaggacaaagagattatgatctgttcagttgggttattgctatgaaaaaagctatcatgggttgtag

SEQ ID NO: 204311 - DNA, 2353 bp, Zea Mays
cggaggcccgccgcgaaacccagcacgaccgatccatccacctcacaccgcgtcttcgtccagctcactcccccgccgcgcccccgctccgctcccctctcttcctcgccgcgggtcgcgcgcagccaggcgccgagccgccgaccagtaaccgacgtatatctcatccttccccctcccccctgcacagccccctctacaactccccgattaaaccctagaatctcccaactcccaaatgcgcgcccccacctaggcccccgaattcggcatccgctccgcggaaggtgtgcaagccagggtgcacacaatgagtgcgggtttcaacaagcagatactggctcagaagctttcgaagcttaatagctcacagcagagcatagaaactttatcacattggtgtgtctttcatcatcgttactgccaacaagttgtagaaacatgggattgcgagtttcatgcagctcctggagagaggagggtatctttgctgtaccttgcaaatgatattatgcagaatagcagaaaagaaggcaatggatatataactgaattcatgagggtcatccctgctgccttgaatgaagtgttgactatcagagatgattttgggcggaatgttccaaaaagactgattgacatatgggaagaccgtaaaatatttgatactcaggcacaaagcctcaaagatgactttttcagaaggttaaaggacattagaaacaaattgaaaaatacgggcagtgagctgctggagaaggttgtctctagctacaaacatgtcctgaatgctcctatggatgaggatactctgatgcgaaaatgccaagcagctcttatcaattttgatgaactcaataaaacgtatggaaacaactctgttttaggtagcagcaatcaatcggaatttatgcagggggtgcaggaacaacacaacattctcagaaactccattgaacaactcaaattgtcagaatcactcagggccactctgatttctcatttgaaggaagcgctgaatgagcaggagctcaaagtggaacaagtcagaagcctgcttcaggcagctcagcctcgattcaagagagctgctgagctctgcgtggggcttggaagcaacatggaaatgcatgagccatcaaatcaagggcataagaggtctagcctctctgatccacttagtactgttgctccaggagctgagaagtctcttcaaaagggacagtcaagtgcagtgttgtattcacaggagggaaatggttttgagcacatcatgacagagacaaagcttgctgcaggtgatgcttcagacaatatacgtggtggtgatttgccttcacaagtgaatgggggcaacaccaagctgaaaatagaagagcacacttctggtaacaagaggcagaagctagaggatgacacagatatttctcagcctcaatcacagtcaccgccaccgccacccccattccctcatcctgacgcattcgaaccaccaccaccaccaccacctgaggttcctccatcaccagagcctagcccaccaccaccgccaacttcaccgccacccaatatgatccccccgccgccgccggcaatgccaccccaaatgatctcacatgtaccacctccagctggtacatttgtaccttttcctgctggaccacctggtccaatgtattccagctacccaccttttactcctgtggtcaacttccccataaccagcccaccagctggtttccctagtccaagcccgcctccgccttttcaaggattagtgggtacattctatggccctcagttccccaccgcacccccaccagcagacaggaaatgagtgtagtaacctaccggcagcccccctcatcatactagtttatttccccttttcaacagagaatatgactcggggggtggggggggggggggggggcgctccatcagcatgtgttgtggagctcagaagattgttgtaaatttagccagtcagtgcgcagcagtgaattttctgaactagttgtggtcttggtcctggagtagaagtgtagaacctgtagatttcgactgctagagagaattagggattctgagagccgagaacaaatgcctgcgacagattaataataagttgtggtcttgttggagtaaaaactgtagattcccacagcttagagagagagcatggaactcggtagcatgacatgttgtaactcatgtacaattgtgttcattgccagatcatccgagaacatgtacatgttcccgtgatgttttgagcgtgtaattctgttgttctgtgtaagatatggcttgagccgctgtcgatggttgaaactttttgctctcggttatt

SEQ ID NO: 204312 - DNA, 1211 bp, Zea Mays
gaggcccgccgcgaaacccagcacgaccgatccatccacctcacaccgcgtcttcgtccagctcactcccccgccgcgcccccgctccgctcccctctcttcctcgccgcgggtcgcgcgcagccaggcgccgagccgccgaccagtaaccgacgtatatctcatccttccccctcccccctgcacagccccctctacaactccccgattaaaccctagaatctcccaactcccaaatgcgcgcccccacctaggcccccgaattcggcatccgctccgcggaaggtgtgcaagccagggtgcacacaatgagtgcgggtttcaacaagcagatactggctcagaagctttcgaagcttaatagctcacagcagagcatagaaactttatcacattggtgtgtctttcatcatcgttactgccaacaagttgtagaaacatgggattgcgagtttcatgcagctcctggagagaggagggtatctttgctgtaccttgcaaatgatattatgcagaatagcagaaaagaaggcaatggatatataactgaattcatgagggtcatccctgctgccttgaatgaagtgttgactatcagagatgattttgggcggaatgttccaaaaagactgattgacatatgggaagaccgtaaaatatttgatactcaggcacaaagcctcaaagatgactttttcagaaggttaaaggacattagaaacaaattgaaaaatacgggcagtgagctgctggagaaggttgtctctagctacaaacatgtcctgaatgctcctatggatgaggatactctgatgcgaaaatgccaagcagctcttatcaattttgatgaactcaataaaacgtatggaaacaactctgttttagggttttcacaaaaccaacaaactaccatggtctcaagcataacacattgatgtttatctgtgcatgggtttgctgggttttagcaggagctaaggagatcggtagtatgggcttagttgctgccctgggcgaggtcgggtctagtttcagtactactatgtaattcccttcgggataatgtgggtctttgggagatttgctctgcaacatctcctcttttgtaatgtctcctttcctctttaatatataagatgcgcagttctcctgcgcgttctcaaaaaaaaaactgtgcatgggtttgttgtatctaggttgatgtagctaat

SEQ ID NO: 204313 - DNA, 1701 bp, Zea Mays
cccgccgcgaaacccagcacgaccgatccatccacctcacaccgcgtcttcgtccagctcactcccccgccgcgcccccgctccgctcccctctcttcctcgccgcgggtcgcgcgcagccaggcgccgagccgccgaccagtaaccgacgtatatctcatccttccccctcccccctgcacagccccctctacaactccccgattaaaccctagaatctcccaactcccaaatgcgcgcccccacctaggcccccgaattcggcatccgctccgcggaaggtgtgcaagccagggtgcacacaatgagtgcgggtttcaacaagcagatactggctcagaagctttcgaagcttaatagctcacagcagagcatagaaactttatcacattggtgtgtctttcatcatcgttactgccaacaagttgtagaaacatgggattgcgagtttcatgcagctcctggagagaggagggtatctttgctgtaccttgcaaatgatattatgcagaatagcagaaaagaaggcaatggatatataactgaattcatgagggtcatccctgctgccttgaatgaagtgttgactatcagagatgattttgggcggaatgttccaaaaagactgattgacatatgggaagaccgtaaaatatttgatactcaggcacaaagcctcaaagatgactttttcagaaggttaaaggacattagaaacaaattgaaaaatacgggcagtgagctgctggagaaggttgtctctagctacaaacatgtcctgaatgctcctatggatgaggatactctgatgcgaaaatgccaagcagctcttatcaattttgatgaactcaataaaacgtattcagcctcagaattcagaattggtattggacagcttgattaccgttgtttggatgcacaagaatttggcactggaatttgagtccagtaccaactcgacattcacttcacctgtgcccccttgccaccaattcggagcctcacccctccgttttgtggggaattaggccactaggaaaaaaaaacttcggcctttcaattctgtgttctgtacatccaaacagatatcgagtttgatggtttctatgattccaaaagtcaattttatggccatccaaacaacggatttcaattgtgttccatttcaatatcaaggctgatttggtattctctccaattcaattccttcccttccaatatcaacatccaaacaaagcctaaggatattctcacatgtcctgtcattatttactagttaatatgtagctcatagcatgcagaaactagtgattatgtggagttatagtttggtctgcaagttcttcacctcagttgcggtgcaccacatatgcagggttttcacaaaaccaacaaactaccatggtctcaagcataacacattgatgtttatctgtgcatgggtttgctgggttttagcaggagctaaggagatcggtagtatgggcttagttgctgccctgggcgaggtcgggtctagtttcagtactactatgtaattcccttcgggataatgtgggtctttgggagatttgctctgcaacatctcctcttttgtaatgtctcctttcctctttaatatataagatgcgcagttctcctgcgcgttctcaaaaaaaaaactgtgcatgggtttgttgtatctaggttgatgtagctaat

SEQ ID NO: 204314 - DNA, 1304 bp, Zea Mays
cctcccagaaaaattcctcccaccgcgcccgcgacagcgacgagcacgggcccctccaccgcctccgcctccgcctcgccgcgtgcggcctccgcgccgccccgacgtcgtcccctccgccctccccctcggccctcgacgcgccgccgcccgccctccgccgccgccgccgcggcgggctcggtctcctctggaagctcccctccacccgcgcgccgccccgcccggctccgatggacgcgcgcgcgcccccgcctccgcagccccatccgtcgcgcgccccgtcgccgcagccccatctgtcgcgcgccccgtcgccgcagcccccgcccgcgccgtctaggaggtacggcgtgcacttctcggcgtccagcttcatccaggcgccgctcaccgcgctgctcgagtactccggcatcctccggcccgatcccggttgtggaatccaacagccagggaccggggccgggccgggcgaggtgtcgatccggattgtggcgcccggcgaggcggggacgtcgtctgagagggccgaggaggtgatcgtcgaggaggaggaagaggatggacaggcaacaaggacgcgccccgaggactcatcacctgccgctggcggcggggagggcggcagggaaacctcgtcgtcgtaccagcggtacgacatacagcaggtggccaggtgggtggagcagatactgcccttctcactgctgctgctcgtcgtcttcatccgacaacatttgcaaggtttctttgtgacaatttggattgctgcggtgatgttcaagtccaacgatatcctgtgtaagcagactgctctgaagagggagagaaaaattccagttcttgtcgggattacaatattatttgttgttcatgtatctggattttactggtgttacaagaacgaggatcttataagacctctcatgatgcttcctccaaaagaaataccaccattttggcacgcaatattcatcatcttggtgaacgatacaatgggtcaaatgttgacgattgtggaatattttctacttttgtaccgtgcattattgcctacacctatgtggtaccgttttttcctgaacaaggagtatggaagcctattttcgtctctaaccactggcttgtatctcactttcaagttgacatctgttgtggaaaagattggaaaaggatggtgcgtagctgcaaaagagaggacatcttgcttttgtgctcgcaagaaggatgcaaaggatctgtgatgatcagctgctgttttgggttcttgtcatgtaacatctcctatttttaaagagcaa

SEQ ID NO: 204315 - DNA, 664 bp, Zea Mays
cacaactgctgattctgcagtctatactgtcttccatacagggcttgatgctaaccttactgtactcatttcacaactgcaatattcatccttgacatggccaaagcctatgtgattcagctaatgccctagagaaacgatcaaaagacatcgcaaacaagacgttacttgaagagggtgtgctgcgccgttccacacgtgtccgggcccagccaaaggacaatccgtccatggcattcctcaagtatgtcaacaagtggagggataactgaggtactctgagctatgtaggcttttgctcggttaggtcgttgcagtgactcgccatactcatggctggtttactgacacctcattagctagtgaaacctgtatcagaacctacttttcttctctctctttttttttttaaattttaacttagctttcatgtgtgttcacaaatgaacccctcccccccctccgtaattgaactatgctaggctttaccgtttttagaacagtggccaaattttttgcatggatgatgtaaacgtgacaaggccggtgtggagatgcttcgatctgcaagggtgggccgcgggccaatgttggggatttttgacttaatactactgccttgaattttttagcaccattttcgctagtcttgcatcgagacata

SEQ ID NO: 204316 - DNA, 599 bp, Zea Mays
gaaaaaacgaggaatcagtaggcaatggactaactcattcctcaaccaaacacccttaatgccctagagaaacgatcaaaagacatcgcaaacaagacgttacttgaagagggtgtgctgcgccgttccacacgtgtccgggcccagccaaaggacaatccgtccatggcattcctcaagtatgtcaacaagtggagggataactgaggtactctgagctatgtaggcttttgctcggttaggtcgttgcagtgactcgccatactcatggctggtttactgacacctcattagctagtgaaacctgtatcagaacctacttttcttctctctctttttttttttaaattttaacttagctttcatgtgtgttcacaaatgaacccctcccccccctccgtaattgaactatgctaggctttaccgtttttagaacagtggccaaattttttgcatggatgatgtaaacgtgacaaggccggtgtggagatgcttcgatctgcaagggtgggccgcgggccaatgttggggatttttgacttaatactactgccttgaattttttagcaccattttcgctagtcttgcatcgagacata

SEQ ID NO: 204317 - DNA, 947 bp, Zea Mays
tagctgcttcaaatttaggtcttcaattgattttactggtctccaaacaatttttccctcatttagctgttggatttgaagaccctcgtgtgtcattacacattggagatggggttgcctttttgaaaaatgctccagaaggtacttatgacgcagtaattgtggactcatctgatccgataggtcctgctcaagagctttttgagaagcctttcttccagttggtggccagagctttgcgtccaggtggagttgtatgcacccaagcagagagcatatggctacatatgcacattattgaagatattgttgtcaattgtcgacaagttttcaaaggctcggttaactatgcttggacaacggtgcctacataccctagcggagttattgggttcatgctttgctccaccgaagggcctgctgttgatttccagcaccctgttttcaacatcgaggaggatgagcatcctatgaaatcaaagggaccccttaagttctacaactcggagatccacacggcatcattctgtttgccttcttttgcaaagagggtaatcgagtcaaaagcgaactagatgtgaagggtatctccaagggctaagtaccttaggcgcgcaacacagaatttgttgtagtgtgaaaagcggatgcctccctcccttttctcccactttgatgaatagtataagcacaggagatgagatgcaacagttatcggagttatcggtctacatggtcctgaccagtcgtatgtctcggctgcctggtgcagctatgaaaacgttttgcaatagcttttttcggcagtcctcacatcatcacggttgtgtttccgcttccatatctgaatggaatacatatacgtatgaaataaaactgtgtaatggctgttgctcggatccttttcaaaacaggttcagctctcgtcgagtgatttgtaggtcctt

SEQ ID NO: 204318 - DNA, 719 bp, Zea Mays
acatctagagcggaacaggcccaaagcccgcagctcgggctaaaaccctaacgacctggcctcgccaagacgccaacacaccggaacccccaaaatggcaccggcgccggaaccgaccgcagcggccgccggccgcaagcgcaagaaaccgcacgggccctccaaaatcatcgcgaagaaatccgcggatcccaaacgggcatacgcgaagaagaagaaagagaagcataagcaaaaggagaagaagtcgcggctaaaacccgccgagccggaccaaatcgccgccaccatcggagatggcgtcgcaggggcaacggtcctactgtcggcattgatgcagccgtcgcggcagctcgagtttctcctccgtagcttcgagcgcgcctctaagatgcgcctctctcctctcgaactcgattcctactcagagggctgcatggtgcagcttgcggagggagcagcccaggacgtcgagagcttcggtgatcatgtaaaaggggtgttcggctcttcgtggaaggaagagctctgtgagggaaatcacatcgatggtgagatcgccgtgggcagcccaacacttctggttatcagctcatctgctttgcgatctttagacctactgaggggtttgaagatgtttactaaagaatgccgaccagtaaagctctttgccaaacacttgaaagtggaggagcagattttgattttcccaattcaaa

SEQ ID NO: 204319 - DNA, 2201 bp, Zea Mays
ccctcatctctcctcccgtgacgtcgcgccacatcgtcctcttcctccgcgtgccgctgctaccgtggcccccttgcctgctcgcctccacggccacacgaaggccccctgtgttgctctcggatatgcgctgccatcgccggcgtagccggagctggccgtccacgcaaccctgccacgggagggcgacgcgttgatgctggagctcacaaggtgtcgctgctggagcagcttcatgcacgaagacttgccgttctgaaggcccttacttcctgttccactagtagttctgagatgatggaaaagctaaacgaaatcgtgtttgacatcttggaaaaggttggccatccataatttgagtattctttgtacagttacattagtctttaaactacttttctcatcctcactaattatattgtcggcaatatattgtcgacaagaatggttctggatatattgaatgttcaatggtactcctattggataatcctatcagcacgacaagtgcttccatagcttatgatgttgaattttgctgctccatggcagcagcagcagcccctgccagttgaccattctgacgccttctcctagcattatgctttcttgtagcttcatttggaaaaggcagattgctcaaggaatttcatgcttagttgcaccacaccagggtatcatcaatcattcagccccattctactgatgtaaattgtgcaaatcctttttctttgagacttttgagagtggtctgtcgattacttgcaagaaatatgaacctttgtttctgtgcatgggcataaaacaaacagcttctagcctcttttacggtacttgcacttgcaagaaatgtgaactccttttcatttctgtatgtggacataatgccaaagcatccaggatttttcatggttgttgatgtctttacacagttcatctccaccagtatgccctcctcgtactctatataaacacatcaacagcaccgcaattagccacataaacacatctcgcagccacctttttttgttctgttgtaagtatactttcccttaccatctttatttgttagtttaatttgtaattgggaagtattagtggaaagaggatgagacgctatcatctatgtactctgcaaatgcatctgacattatatgggctgcttcatataatttgaattgctccattcttgccgacaatatattgcaaggtacatgtctaggagctatttaaactacgtcgacctcactaattataagcattgaaaaagcaacaattgctacagtgcacttaaacttgcagctcattattatctggctaagatgatgggccaacttagtttatttgatctaaaaattgtgagtcttatgttctgaactcaaacttgtgacaatttattttattttcgcagtctattatacgtggtaatttgcaatatgcttctttaagtgcactcagaaggcatccacttgatctcggtaatcaagcattcctccaccgagctgtggaaggattaaatacaggaacatgacccctgaagcagctttggatcatgtacgatccattaggcctcgagtgcttttggcaccctcgcagtggtatgtatgcaaccttttgtgattgcattataagttattagtacaatactactgcgttaagacactttatgacaccatgtgctgcatcaggttagtaagctgtcatggttctgttttaatacacgcaggtcactcaagtagatctaaagttattctttgagtccatatgtggtgagctaaaagtttgcagaaatggcaccatcaagatcgatctggagaccaacaagatcatggacttcatcaagtttgacgtcggcaatgtggtcatggtgaccggcgggaggaacaccgggcgtgtaggagtgatcaagaacagggagaagcacaagggcagcttcgagaccatccacgtgctgcttggagctttttgctatgtctagttttctcctatttgttgtacaggaaaacatagaatggaattcaaatttggtggccacaaaagtgtggagacttgaattcatataaagttagccttaacattagtgcaaacagttgtatcttagtttagatttagagtacacttatgtatgcgttgtttgacaatgcttatttatgatatattgaatggtacttatttatattatattaattataatgttgttc

SEQ ID NO: 204320 - DNA, 946 bp, Zea Mays
gtggatgccaatcatcactgttctcctgtgatagacttcctatcttctagatgctcaaagtggaatgagtgtgtcccctagagttgctgcccaggatatgaaagaaagccaagaagttaaagaagcactgagagcgcagatggaagtgcaacgaaggctgcatgaacaagtggaggtccaaaagcgcgtgcagatcagaatggaagcacttgagaagtacatcgacagtatcctagagagcgcatgcaagatggttactgaacaatttgcttcgagtggcttcagtatctccaaccctgatctcccggagatatcccctggaggggtcatgtgtggctccacggacacgttgggctcgtcggtgttgaaccagctttctgtgagctccatcgactcgcacagtccaggaggcaaaccttctccatcaggcatggaaggtccgacactgctccagaagtcgcctgagctcaagcggaggtcctcttgaactgtgacagcgaattctgaggttggcggtgatggctgtctctgtggagtgtctgaatatggtggtgacaatggaaatggtggcccagtcttgtggtagctgactttctctccaggtagcaggacgtgctgtgtttgttgatcaatccaagtatcaaacggacctactatgttcatgtgaacttcctcaagtgctagttaaaaagttttcatgcttctgtcatgagattatgatcctagtagcatccttagcacacttgaaacgttgactcgtgtcctagtgtcgtttgtgttagtccatatgtgaacaatgattcatgttggaacatgctagctaacaccagatgattcaagcttcgtatttttgtctcaattgtccatgcaggcttcccagcacttgctgcaatttattcccagcacttcctgcaatttattcgacttaaaggctactgtatttagc

SEQ ID NO: 204321 - DNA, 1887 bp, Zea Mays
gagtcgatccgcccgtacgtctctctcttgttcctctccggcttttccttcccctccgcctccgccacgccacctcccctcccctcccgccgtgcgccccgatccctcgccgccccacgccggcctcatctcgccgaggactggatcgccggggggacatcctgggtgtccttcacacacatgcggcgttaggtgatgacgagcttgcctgagaggggagaatcacctgtgccgccactcgattctctgcgccaggactctgccgtgaccgtcctagcggctgccgccgttgcctcttcctccgctggctccgatcgcaaggaagacagcggctccaggcagcccaaggcctccatcctgtccggcgtcttctctcccccttttgccatattcgaggggcagcagcagggctcctcgtcgccggcgtgcgacgccaggtcgacaaagtcgtcctcagggtcctatggtttatccaggatcctgaggaggttcgtgggcagcggctccatgtggcgacttctggggtgcggcagggtcttgacctccagtgacgtgtggttccttggtaaatgctataaggtgtcgcctgaagaagaggagtctggcgactcggagtccgacagcgggcatgctgcgtttctggaagatttctcttccaggatatggatcacttaccggaaaggctttgatgcaatatctgattccaagctaactagtgatgtgaactggggatgcatggttagaagcagtcaaatgctggttgctcaggcgctgatttttcaccaccttggaagatcttggagaaagcccccagagaagctggaaggaattatggtctggctgctggatcatggttgggtccatatgctatgtgccgggcatggcagacccttattcgcacaaatagagagcaagctgatgctgtagatgggaaggaaaatttccctatggcgctgtatgtggtttcgggtgatgaagatggcgaaagaggtggagctccagttgtttgcattgatgttgctgctcagctttgctctgatttcaacaaaggaccatctacatggtcacctattcttttgttagttcctctggttcttggccttgacaaaattaacccaaggtacatcccattactaaaggagacatttatgttcccacaaagcttgggcattttaggtggaaaacctggtacatcaacatacattgctggggtacaggatgatagggctctctacctagatccccatgaagttcagatgacggttgacattgcactggataacttggaggcagacacttcctcataccactgcagcgttgtccgagccttagctctggaacaaatagatccctccctggctattggtttttactgtcgtgacaaagacgactttgatgatttctgttctcgggcctctgagttggcggagaaggccaatggcgcgccactctttactgttgtgcagtcaatcgagccatcgaaacaaatgtataaacaggatgatggactgggttgttctggcagtagcatggccaatgacgacgaccttgatggctctggtgaagcagaagagtggcagatcctttagacgaggctaagacatgttgggctgaagaaaaaaaaacttgcattgaaaatgttgtctgaatgccctcgtctgcgtgtgaatagaggggattatttgtgtgatctcggggtggaaatgttcagaacatacactcgtagtcgtggatgataataattaaatgtatttattattccatattctaacatcgttttaccacggcgtggttgtttctcaattgttggctacagttgcacctgccaaaaagtttgtggtgttggtatgttacatttgcaatgccaacatatcgctgtttgatgtg

SEQ ID NO: 204322 - DNA, 2776 bp, Zea Mays
aaggggatgggccgcgaccagtgaccgtgagcccattgaaacgtcacagccccggctctctgtccccgcttcgcatttcctttccacccaaagtctccctcacctgccagtctgccactcgctcgctctcttccacaacccgcttcccccaaaaaccagatctaccacctgctcggccttagggcgcttcttgggccgagccctagcagtccggaattccgatctcggccaccacctcctcttctctcctctcctctcctgaaagcaatctcaaaagttcagcgggtagcctatcaagatggccgaggaaactgccaatgacgctcaggtggcacaagataacgagattgctctcagcaatgaggcaatccaaggtgatgagttggtccatgttgaagagctgtcccaaggtgatgatttggttcaaggaaatgagctagttgtttctgaggtgacaactcctactattggaaccagacgcaggagaaagaagtctttggtatgggagcacttcactattgaagccgtcgcaggtggggccactagggcatgctgcaagctctgcaagcaaacctttgcttacagctctggttcaaagattgctgggactagccatctcaagaggcacatcaccttgggctcttgtcctaagataaagaatcaagagcagaggctggcgctgccttcaactggagggactgacaatgatggcgagggaactatagagcggcgaaccaagagacgctacagatacactggttatgcaaatgctgcttttgatcaggaccgcagttgctcatacttggcaaagttgatcattcagcatgactacccacttcacattgttcaacagccgtcatttgccatttttattgaaagtctgcagccacgtttcaagattgtggatgttgaaacgatggaaggagaggtatatgctgtttatcagaaagaaaaggagaacctgcttcaagcattcaacagtatgcctggaaggatcagcctcactataggattgtggacaactagtcagactcttgggtacgtttcacttgcagggcagtttattgactctgagtggaaagtgcaccgaagaatgcttaacttcatgatggtgtcatctcctcattcagagaatgcacttagtgaggcaattagcatgagcctttctgactggaatatgaaggacaggctattcaccatcacattggataatgaatgctcctcacatgatatctacagtgcaaatctgagggaccatctctccaacaagaacaatctcatgcttaagggacagctctttgttgtgaggtgctatgcccatatccttaatgctgttgccctagatgtcattgcttcaattcatggtgttgtatacagcattcgtgaaagcataaagttcataaaagcttcttctgcccgcgaagagaagtttgctgagattgctctgcagctggagattcccagtaccaagaccctctgtctggatgttacaacccagtggaacaccacctatctgatgctgctggctgctttggattataagcagactttcactacactagaaacatgtgatgataactacaatgaagctccatcagcagaggattggaagaaagttgaggctgcctgtaattacctgaaactgctatacgattctgcacatagtatcatggcggcagcaaacccaactgcaaacatctttttccatgaagcctggaaacttcagctagagctggcaaatggcacaggccacgaagatcccactttcagtagcatcgccaaggatatgcatgagaggttcgacaagtactggaaagattgcagcctcgtgttagccattgctgttgtcatggatccacgtttcaagatgaagctcgttgagttcagttactcgaaaatctatggggctggggctgcaaagtatgttaaggtggtcgatgatgctgtacatgagctgtataaggagtatgtggctcagccactcccactgaccccagcctatgttgaccaaggcgaagggaataatggaccagccaatgcgaatagcagtcaaggggctcctgcttccactggtgatgggcttctagacttcgatatgtacctttctgagatccaaagtagccagccctcgaaatctgagctggagcagtacctagatgaatccctcactccacgtatccaggagtttgatatcctgaactggtggaagctaaacacggtcaagtttccaaccctctctaaaatggcccgtgatatcttggccattccagtgtccatggtaagcagtggcagctctatattctgtgctggaacaggaagtcacatgctcgatgactacagaagctctctgcggcctgagattgtggaagcacttgtttgcgcgaaagactggctccagtattcaccacctgccaccgaggcaccgagttctgcactggtgaaggctcaaggatcgtaggtttgtcgtggtcactgcctgccttgtggaagcaaagcaagaatccatttacccatctgtcgtatctctgagtgtagttaactgtaggtgtattgtaggctgagattgtgaaccgattttgatatattctggtatctatcacgtaaaggtgtaacatgtgttgaactctgctgaactcgtggctgttctgatgtcgtctgactttgcagtttgcacacttccctatgtgcttgtacaagccgtgggatgtatcttgtttttgtattaaatttgttttataccgtggattgatgtctcagtctatatataagcaggaac

SEQ ID NO: 204323 - DNA, 3519 bp, Zea Mays
ccaaagtctccctcacctgccagtctgccactcgctcgctctcttccacaacccgcttcccccaaaaaccagatctaccacctgctcggccttagggcgcttcttgggccgagccctagcagtccggaattccgatctcggccaccacctcctcttctctcctctcctctcctgaaagcagtaagctcctccgttgccatactcgtccgcccggtctccctcccctcccctgctccagctcgtctggtggcgttatgatttcctcgcgctcgcgagttcatcctagatctgcatggtctgggctagattccgccggatctgtggcggccgtttaaatctgtgggcttttattttgctgcgtttaagcgcgattttgaaaggttttcgcccgtcccgatttgggcctagtgggccatgctgggatttcttccgatttcctgaaattttaccggtcggtgtgcggtctacaagtccaggccatagaggagctcccgtggctgctgttcatagtaggatttcgaatttggggcgcgaggttctgttccgcgggccagatgagatctgtagtctcctccatgcgccatggcagtaatttggggaaaactctgcggcgagcggacttttgattctcagtcagctgtgtcgactgggaaacgctcaggtgattgaattcagaagtttgcgggtacataatcatgtggcacattcttgcgagaccaaggatgcttagggtttgagcagctgtggacatggtctgaagctctgtagcttaaccgtgtcatgcagccccctttgaagttctatagcttaaaccatggcatggtgaaagcccaagctcaatggcgctccagtgtctcacgcacgaattgaagatggcactagcaagtagtgtttcgtctaaacaaggaaaagaaagttaggattttggtgatttatgagcttgttcaagaatacgagtggttgaggaagtaagggcatacgtttttggcttttatgcattttgtttgacgatctcaaaagttcagcgggtagcctatcaagatggccgaggaaactgccaatgacgctcaggtggcacaagataacgagattgctctcagcaatgaggcaatccaaggtgatgagttggtccatgttgaagagctgtcccaaggtgatgatttggttcaaggaaatgagctagttgtttctgaggtgacaactcctactattggaaccagacgcaggagaaagaagtctttggtatgggagcacttcactattgaagccgtcgcaggtggggccactagggcatgctgcaagctctgcaagcaaacctttgcttacagctctggttcaaagattgctgggactagccatctcaagaggcacatcaccttgggctcttgtcctaagataaagaatcaagagcagaggctggcgctgccttcaactggagggactgacaatgatggcgagggaactatagagcggcgaaccaagagacgctacagatacactggttatgcaaatgctgcttttgatcaggaccgcagttgctcatacttggcaaagttgatcattcagcatgactacccacttcacattgttcaacagccgtcatttgccatttttattgaaagtctgcagccacgtttcaagattgtggatgttgaaacgatggaaggagaggtatatgctgtttatcagaaagaaaaggagaacctgcttcaagcattcaacagtatgcctggaaggatcagcctcactataggattgtggacaactagtcagactcttgggtacgtttcacttgcagggcagtttattgactctgagtggaaagtgcaccgaagaatgcttaacttcatgatggtgtcatctcctcattcagagaatgcacttagtgaggcaattagcatgagcctttctgactggaatatgaaggacaggctattcaccatcacattggataatgaatgctcctcacatgatatctacagtgcaaatctgagggaccatctctccaacaagaacaatctcatgcttaagggacagctctttgttgtgaggtgctatgcccatatccttaatgctgttgccctagatgtcattgcttcaattcatggtgttgtatacagcattcgtgaaagcataaagttcataaaagcttcttctgcccgcgaagagaagtttgctgagattgctctgcagctggagattcccagtaccaagaccctctgtctggatgttacaacccagtggaacaccacctatctgatgctgctggctgctttggattataagcagactttcactacactagaaacatgtgatgataactacaatgaagctccatcagcagaggattggaagaaagttgaggctgcctgtaattacctgaaactgctatacgattctgcacatagtatcatggcggcagcaaacccaactgcaaacatctttttccatgaagcctggaaacttcagctagagctggcaaatggcacaggccacgaagatcccactttcagtagcatcgccaaggatatgcatgagaggttcgacaagtactggaaagattgcagcctcgtgttagccattgctgttgtcatggatccacgtttcaagatgaagctcgttgagttcagttactcgaaaatctatggggctggggctgcaaagtatgttaaggtggtcgatgatgctgtacatgagctgtataaggagtatgtggctcagccactcccactgaccccagcctatgttgaccaaggcgaagggaataatggaccagccaatgcgaatagcagtcaaggggctcctgcttccactggtgatgggcttctagacttcgatatgtacctttctgagatccaaagtagccagccctcgaaatctgagctggagcagtacctagatgaatccctcactccacgtatccaggagtttgatatcctgaactggtggaagctaaacacggtcaagtttccaaccctctctaaaatggcccgtgatatcttggccattccagtgtccatggtaagcagtggcagctctatattctgtgctggaacaggaagtcacatgctcgatgactacagaagctctctgcggcctgagattgtggaagcacttgtttgcgcgaaagactggctccagtattcaccacctgccaccgaggcaccgagttctgcactggtgaaggctcaaggatcgtaggtttgtcgtggtcactgcctgccttgtggaagcaaagcaagaatccatttacccatctgtcgtatctctgagtgtagttaactgtaggtgtattgtaggctgagattgtgaaccgattttgatatattctggtatctatcacgtaaaggtgtaacatgtgttgaactctgctgaactcgtggctgttctgatgtcgtctgactttgcagtttgcacacttccctatgtgcttgtacaagccgtgggatgtatcttgtttttgtattaaatttgttttataccgtggattgatgtctcagtctatatataagcaggaac

SEQ ID NO: 204324 - DNA, 3447 bp, Zea Mays
ctcgctcgctctcttccacaacccgcttcccccaaaaaccagatctaccacctgctcggccttagggcgcttcttgggccgagccctagcagtccggaattccgatctcggccaccacctcctcttctctcctctcctctcctgaaagcagtaagctcctccgttgccatactcgtccgcccggtctccctcccctcccctgctccagctcgtctggtggcgttatgatttcctcgcgctcgcgagttcatcctagatctgcatggtctgggctagattccgccggatctgtggcggccgtttaaatctgtgggcttttattttgctgcgtttaagcgcgattttgaaaggttttcgcccgtcccgatttgggcctagtgggccatgctgggatttcttccgatttcctgaaattttaccggtcggtgtgcggtctacaagtccaggccatagaggagctcccgtggctgctgttcatagtaggatttcgaatttggggcgcgaggttctgttccgcgggccagatgagatctgtagtctcctccatgcgccatggcagtaatttggggaaaactctgcggcgagcggacttttgattctcagtcagctgtgtcgactgggaaacgctcaggtgattgaattcagaagtttgcgggtacataatcatgtggcacattcttgcgagaccaaggatgcttagggtttgagcagctgtggacatggtctgaagctctgtagcttaaccgtgtcatgcagccccctttgaagttctatagcttaaaccatggcatggtgaaagcccaagctcaatggcgctccagtgtctcacgcacgaattgaagatggcactagcaagtagtgtttcgtctaaacaaggaaaagaaagttaggattttggtgatttatgagcttgttcaagaatacgagtggttgaggaaatctcaaaagttcagcgggtagcctatcaagatggccgaggaaactgccaatgacgctcaggtggcacaagataacgagattgctctcagcaatgaggcaatccaaggtgatgagttggtccatgttgaagagctgtcccaaggtgatgatttggttcaaggaaatgagctagttgtttctgaggtgacaactcctactattggaaccagacgcaggagaaagaagtctttggtatgggagcacttcactattgaagccgtcgcaggtggggccactagggcatgctgcaagctctgcaagcaaacctttgcttacagctctggttcaaagattgctgggactagccatctcaagaggcacatcaccttgggctcttgtcctaagataaagaatcaagagcagaggctggcgctgccttcaactggagggactgacaatgatggcgagggaactatagagcggcgaaccaagagacgctacagatacactggttatgcaaatgctgcttttgatcaggaccgcagttgctcatacttggcaaagttgatcattcagcatgactacccacttcacattgttcaacagccgtcatttgccatttttattgaaagtctgcagccacgtttcaagattgtggatgttgaaacgatggaaggagaggtatatgctgtttatcagaaagaaaaggagaacctgcttcaagcattcaacagtatgcctggaaggatcagcctcactataggattgtggacaactagtcagactcttgggtacgtttcacttgcagggcagtttattgactctgagtggaaagtgcaccgaagaatgcttaacttcatgatggtgtcatctcctcattcagagaatgcacttagtgaggcaattagcatgagcctttctgactggaatatgaaggacaggctattcaccatcacattggataatgaatgctcctcacatgatatctacagtgcaaatctgagggaccatctctccaacaagaacaatctcatgcttaagggacagctctttgttgtgaggtgctatgcccatatccttaatgctgttgccctagatgtcattgcttcaattcatggtgttgtatacagcattcgtgaaagcataaagttcataaaagcttcttctgcccgcgaagagaagtttgctgagattgctctgcagctggagattcccagtaccaagaccctctgtctggatgttacaacccagtggaacaccacctatctgatgctgctggctgctttggattataagcagactttcactacactagaaacatgtgatgataactacaatgaagctccatcagcagaggattggaagaaagttgaggctgcctgtaattacctgaaactgctatacgattctgcacatagtatcatggcggcagcaaacccaactgcaaacatctttttccatgaagcctggaaacttcagctagagctggcaaatggcacaggccacgaagatcccactttcagtagcatcgccaaggatatgcatgagaggttcgacaagtactggaaagattgcagcctcgtgttagccattgctgttgtcatggatccacgtttcaagatgaagctcgttgagttcagttactcgaaaatctatggggctggggctgcaaagtatgttaaggtggtcgatgatgctgtacatgagctgtataaggagtatgtggctcagccactcccactgaccccagcctatgttgaccaaggcgaagggaataatggaccagccaatgcgaatagcagtcaaggggctcctgcttccactggtgatgggcttctagacttcgatatgtacctttctgagatccaaagtagccagccctcgaaatctgagctggagcagtacctagatgaatccctcactccacgtatccaggagtttgatatcctgaactggtggaagctaaacacggtcaagtttccaaccctctctaaaatggcccgtgatatcttggccattccagtgtccatggtaagcagtggcagctctatattctgtgctggaacaggaagtcacatgctcgatgactacagaagctctctgcggcctgagattgtggaagcacttgtttgcgcgaaagactggctccagtattcaccacctgccaccgaggcaccgagttctgcactggtgaaggctcaaggatcgtaggtttgtcgtggtcactgcctgccttgtggaagcaaagcaagaatccatttacccatctgtcgtatctctgagtgtagttaactgtaggtgtattgtaggctgagattgtgaaccgattttgatatattctggtatctatcacgtaaaggtgtaacatgtgttgaactctgctgaactcgtggctgttctgatgtcgtctgactttgcagtttgcacacttccctatgtgcttgtacaagccgtgggatgtatcttgtttttgtattaaatttgttttataccgtggattgatgtctcagtctatatataagcaggaac

SEQ ID NO: 204325 - DNA, 412 bp, Zea Mays
cttgcttgcaggttcctcttcttccgtcgctctcgctctcggtctcggactacggttgagcgaagtcgtcactgtaatctactgatctgcaaatggcggaggcggaggcgacggtggggcgactgatgctgtactcgtactggcgcagctcgtgctcccaccgtgcccgcatcgctctcaatctcaaaggtgtggattacgagtacaaggcggtgaaccttctcaagggcgagcagtctgatccagaattcgtcaagcttaatcctatgaagttcgtccctgcgttggttgatggcagttctgtaataggtgactcttacgcgataacactgtatttggaggacaagtacccagagcctcctcttctacctcaagaccttcaaaagaaagctttgaatcaccagattgcatg

SEQ ID NO: 204326 - DNA, 1874 bp, Zea Mays
ttttaactacagcctccaatctcatgcgttcgaggacaagccgaaaaggagaaagtaccccgttccgtcggccgcacctgcacccaccgcacgccgagtcacgccccccccccccccccccccccccccccccccccctggaccagccaacgtgacactccaccgccgccggcgccgcggcagcccgtagcaaccgccaccgcctgcccatctcctctctatcccgcgccgcatggccgcgtacttcaaccactcctcgtcctacccgccgccgcctcccccgccgggcacttccccgtacggcgcgtaccgccacgcctacccgccggcgccggcacccccggccgcttacggcgcctactacgaccgcgcagagcaggccctcccggcgcgggacgaggtccgcaccctcttcatcgctggcctccccgccgacgccaagccgcgcgaagtctacaacctcttccgcgatttccccggatacgtctcctcccacctccgcacgggcaaatcctctcagggaatggtatttgatcttgagaaaaattgttctcttcatgtagatctcgcaaaatccaattccagatcaaagcgcttgagatcagatgatacttcaccttattctcctgaaaaaagaaataggaaaccaaggggatttcctgattcaggtatgactcaagtagctttttgggcagaatggcatgaaagaaaccatctgtattttcacaccacgaagatcttggtgcttacagcttatgggaggtccactacaatcacttgaacaatataagatgttccaaatccacagttctccctcctagcaatcacaattgatttctaactttcaggggaattagtttatattgtccctataatatatattctactatttcctttgtgttaataccctactaaatgttatatcagtaacttcatatcctcaatgaagtgcctctttactcacatagctgaaaattcttacaaagcactcatcttgcacatctttggcacactttgcgccctatcaggtgctggaagcaatatttacatatctggaatgggtagtacttcacacagcttgagtggttatccttctgcacaaagttacacaagccttgagtctagtgcttctctcagcaaggacccatccacatttgcccctcaaaataatcctccatgccctactctttttgttgcgaacctggctccagcttgttcagagcaacagctgatagatgttttctcaagttgtgcgggatttgtgaaactcaagatgcaaaacaagcttggagctccagttgcatttgttgatttcaaggatgcaatcagttcaactgaagccataaatcgtctccaaggagttatcctgtactcatcatctggcgagggaatgcgtttagaatatgcaaaatcacggatgggccttcggaagcgtgataagcacccctaagtgcagctgaaagacgacacggcagttgtattttcattcagcacaagcggcagctgagcatgctcaatgatgtctaatagcagacgacctgtcctgacacctgagtccaatgtcatcttcatgcagcgaacgttttgctcatgagttaggctatgaggtccttcagctgcgtagcattatgttacttggtctggttgtatcacttattattacatgtgcacctctttttttcctccttcggaccttgcctcctagtcatcttcagattttaagctaggattatcccttatttacagttggagttattattagaatctattgtgcctgaaaggatcaatctgaactatcaatctgaacgagagggtgaattagttttttctaaaaaatctatataaattaaaatctattaatgaccctattttat

SEQ ID NO: 204327 - DNA, 611 bp, Zea Mays
acctttagagctaatataatgtctactgaatgggtgaagggaaaaccaatggatgaagtcttgacaatcaagaatactgagattgcaaagcacttgtcccttccaccagtaaagctccattgcagcatgcttgcggaggatgccattaaagctgctgtgaaagactacgaagccaagaaggcgaagatggggcaaaagagtgaagacagtccatcagagaaagctgctgaagcatgaaagtttctgccttttttaagtgtaattgagctgatatgtttctcagtccatgactccccgctgcttcagataaatgcttctgattgcgaggcgaggcgagggaccgcgtgtaatgttcacaaattctggtagtgcggcatgtgccttaactcttttgaggatggtgacaaccaatttcaaataaatttggtgccatcttagaattagaagtactatgtggatatcacatagtggaagtgttttctgtcaactacataattgaattacggccgtcgttgcacggaggctattttaaaatgttgtattgtatgtggtatggattcgcttacgggcctgaaactgttctattggaatcgataattttatttataggc

SEQ ID NO: 204328 - DNA, 1883 bp, Zea Mays
agaaacctcgtctcctccctcttctgtcttctcccgctcaccgcccaccgcccgacctgtgctgccgcccatggcgagacgccttctctcccgcggccgcctcattaagctcgaccggcccatcctacccgccgctctcacccgtctgctttcgcgcggcccgcccactccgacgactagcgaaccggaggacaagggcaaaaaagcggcggctgtcctagtggaggcggtcgccacgaaccacaaaaaggacgcggaggtcgggagagatggatccgaggaggacgacgaggatacgagcccgccctggaggagctggaggccggacgtcgcgtggctctccaaggcactcgagcccgcactggacctgtacaagcaatacagctggaagcctttcgcgtcttctggtcgtgtggaaaacatccctgcaagcactcgtacatttagtgagatcctaagcgacctccagagaagtaagataagcataaaggactggagcctcagtgatctcaccattggcctctacctcatttacctcagccaagcatcctcaaagaactcggaagctttcaagggcgttcagatatcctccaataagatggttcaagaactaatttatcaccttgaacttgcaagaggttgttataaaggtaatgcagctgggcttgcaaggtatagcatgcttcggaagagaaatgttgtaaagtttgtgaaagactctagtattttgagacctggatattacattggcattgacccacgagctaaattggtgattcttgggattcgtgggactcatacagtctatgatcttgttactgatttgattgctctaagcgataagaaagtatcacctaaaggtttctcaacacactttggaacatacgaggcagctcgttggtaccttcgccatgagctgggaataatcagaaaatgtttggaaaaacacaaggactatgagttacggttggtaggtcactctcttggaggagcatcagcggcgttgcttgctataatgctacggaagaagtcaaaggaagagcttggtttcagtccagacattatttctgctgttggatttggaacaccgccttgcatatcaaaggaagctgctgaaagttgtgcaagctatgtctctactgttgtgctccaggatgatattatacctaggctcagtgcagcttcgttggcaagactgcgaaatgaaatactcaaaacagattgggtaagtgttctggaaaaggaagacttgaagcatatagtggatatcgtgactaatgctaagcttgttgtttcgtcaattcaagatgtggcgcgtaaacttggtgattatgccaaaattgtatcaccatcgacaaattctggtgttaccaaagatccaactaactcgacagagatggcgacatcgattagtagaaatgatgtgtttgtgcctgaggatctcttccttcctgggaccctgtattacctgcagagggacattgaggatataaatgacgttgaagaagagtcatacacgctctggaaaggtgatccaggggaaaattttcagaggatattgttgtctggtaatttgatatctgatcacagatgcgaaagcatatactacgctctgagagaagtgctcaagacacttcccccaccccggactctggatgaatgatctttcttttcttctgttctctcaggagctttaatctgtagtggctggatgcctgctttccgtagttttctgatggctgttcctttggtctttttgttggcctgtgaatgttgtacagtataagctgctgtgctaaaaaagcaagaatacgcgccgggcaatgtgatcttgcaagtccgatttgggtgttgtcttttaaccgtgtgcttttgagttgacg

SEQ ID NO: 204329 - DNA, 557 bp, Zea Mays
cactggatcaaactatttacgagaaagtctatttcaaagcgacagaccccttcagtgagaggtggcagagcgcatggatcataactgccttctgggatgtccttgcgtttgtgttgcttcttgtgatttgttatctgtgggcaccttcccaaagctcgcaaagatatgcatattctggtgaagctgctgacgatgacgatgaggaatctcaatctctgacgaaaggagatggtgaagtagggatggtaaaaattgacaaggacagaaatgctggtgtcagcagtgctttcggcttagaagatgaggctgaggaggacaagcgggaatagccatttcttgttcctgatgtcccctaggtcccagaaacaatcgatattttggagcagcaatattgcaagaatacttctttttcaagttacatgtggttgctgtagaagtgcttggtattgtaaacatgcgaactctatttaaaagaaaaggattaggaattctaatccaaaggcaaaaactaacgtgcaattaagctttacatacaaccgtgctgcaattaaactatc

SEQ ID NO: 204330 - DNA, 792 bp, Zea Mays
tgcgcgcgacgagcgctgaactggattcgggattcacggagttcgttgcaacaacctcgtccgccagctattagacttcgaaccgatctatcctggggctataaagtcgtacgctgggtcccctctccctttccatctccgtatcccgaccgccgtccacaagagagaaaggaagcagcgtcgccatggtgaatttgtgccgtcgccacttgttcaccatcgattggtcagccgaaggaattcaccagagaccggagatcctcctcgcgctaaaaggctacgccaggggggtatcacacttggccaattgctcaccgacgagcaagtgactgaggaacccgaagcaccgcaagttgaagattctgagcaggagctcgctgaaagcaagttgtgcccttgatcacattctttgaaccaataatgttcttgtttctaataatcactatgacatgcttaggttaacttgatgggacctaataggttacctatttttgtttgccccatactttgcatagaaatgaattatttggtagtcttgctattgctctaccttgttttgggttaatgttacttatgattcacgctcatgttccattatgatttattactgttgactttattatgatacaagataagataattttgttaattggaacatggagcaaccacccgagtcaaaagtgcaaccacaaaaactatatggctctggtattggccaactaattaggaaggctagcgtgggataatcctttcccaaaaggtgcaagcggctaggtgtcgctatagagtata

SEQ ID NO: 204331 - DNA, 3373 bp, Zea Mays
gaatattagctataacctatgtttgattgtgtatatttgtatacttttattgtgtttcaggaaggacaaaatcatgttgtacaggatcctcccacatatggtgcaccaaagtttgatagaacccccagttagtcatgtcgtgacatgttcttatctctactactaattatgtgcctatcgtaggcgttcacaattccttggttctgtcgtcgcgctcgcctgccatctccctccgcgctccatccgccaccatccgcgctcgcctcccttcgcgcatcctacaaccgcgtgctccttccttcgatggtgcggatcccccgtgactaccatctccctccgccctcccgcgctccatccgccaccatccgcgcttcctacagccgcgcgctccttcgacggcgcggatcccgcaccctcgaatcacgccagcagatcccacaatcaagcagcggcgacaggaataggggcgggctacgcgggcgctactacgacgagggtgagggcgagcgctccggcgccgcggcgccattcatcataatcggtcgagctcctggagggaacggctgcagagcggacgagatcgaggagcgggcgggcgggtgccgcccgtgacggcgcctaggctcaggctccgcgacggccgccacctcgccgcgcaaaggtctcaccggctcccgagaggacagcgcccgcgcctcccaggtttcaaaaaaccttctgagaaggcatgtataaaactttgggcaaaaggagatcttcctacctagcatatcttgcctcggaggagggttgttatattcaatactatgggtttgatggaggtaatttttaacaggcctgttgatattctaaggaaattgtttgatgggaacaccttgagatcacaaatcaaagaattctttaatcgctttggtgctggagaggctgctgcaatgtgcttaatgatagctgcgaagctactttatgttgaagatagtctgataagcaattctgtttctgagaaagccactgaggcatttgaggaccctgggcttgttgggatgcctcaaattgttggtaccactgctttatctaatacacgaacttaggctggaggctttactatgggccaagttgttcaagaagcataacctttgttttctggtgcatatgaagggctttgtttgtgctcgtcaagactactttatctcatatgggagtttcctattatagtgattcgaagaccggctggtactaataaatgcaaggatggtgtaattgtttgtaggctttcagctggggccatgaaaattcttgagagcaagattcattcactggaaacatttttaagatctagaagaaataagagaaggggccacgcagtaccattgacacttaccctcaaggttgttgtaattgaagcgggtcaagacatagcatttgcaaagatttagttcattctgatcactctgcaatatttcggtagtcgatggatggagaatggtggatcgaggagaccgatgacatactgctgcatcccgtgctgctcaatgggaagcagtaccggccagtctggtcaaacgacggcaccgtgatccacgcagatttctagttaagtttcttctgatggtgatggtactaaagaggactatgttcatatccgggcaaagcgaggccaagccactaacagccaaagccttgcagaaagactagggagaaagaagataagtgagaggatgaagcttcttcaagatcttgttcctgaatgcagtaagatcattggcaaggcaatcatgctcgatgagattatcaactatgtgcagtcattgcaacgacaagtcgagatcatatccaaacaagtaaagccacccactcgatcaccatatctccctctaggatcaagcggccttactggcccatttaaccaaggaatcatgcagccataattgatgtgcaccattgccaatcccgttgatgttttgcatggagctattcacgaggcgtcaacaatgaaccattattgatttgtccactgttatgttcgttgctggtgcaatcatgggatacattatgttcactgaatctacactcccagttcacactgaacttacccctaaatcttgtggcttccaagattgcagtctagactacggtgatgaatccaataaccaaatatccttggacttttattgtagctttttgtgtgcatttgttccgatacttaacaattaacattatatgacaccatagtttctctaatcacatgtaactccatctagccatctaggtttgtcctaagtcaaacatatcttttaattttgattagaaatatctataaaaaataattgtcttaaataagcagagttatttggttttagtaatgaatttagcaatgccaatgctatttttatcgttctatataaattttagatattcatggtcaaacttaaaaatgtttgacttggacaaatatagatagacctacacatgcattgtgattttaggaagtcctacaattctcctccccaaagtctgctatcaacttctaacagttagtccagttttcatgaacaaatttagttttaatcattctatgttgtgccaaccgccagcaactaataatcagagctgggtcatatcatcatatcatagtagattgtatagctttcttccctgtgcatgcttactggttactagatgaaaaaggtcgtgttacgttatggcgcactcctctcctttgaataggacatgctttcacactctcaattcggcatatccttctagagactagctcacactccaatggtcttctaaatgaatagcacactatagtcaagagtatgacttaccaaattcattattggttccaagcatcttgaaagagaagtccatcgtctctcttactgtcatctcagcatggctaacagaagcacgcagcgacaagattaccccacatgttgtatcatggtttactagctagagaggctactcaagatgaggaatttgaagttatgtatggtgaggacgatgatgaagacaaagatgacgaggatgatgatgattatgatacaaagaccaagggggctactggagggggaagggcagcagcgaacgacctgttgagtgcaagcaggagtgagtgctgcacattgaatattggcatgcattggttgtggagcaattagtctggttctacttgatgcaaggtcattgagttattgaagtgatattttgtcgaatattttatatgccattgcaaagcacgggcatctaactagtctttcttatatatgtacactacaatacataatcatttatgccattgtttactacaaatatatatattaggcaactcttgaactggttgcaaggaatatttccactaaatctgcag

SEQ ID NO: 204332 - DNA, 3497 bp, Zea Mays
gaatattagctataacctatgtttgattgtgtatatttgtatacttttattgtgtttcaggaaggacaaaatcatgttgtacaggatcctcccacatatggtgcaccaaagtttgatagaacccccagttagtcatgtcgtgacatgttcttatctctactactaattatgtgcctatcgtaggcgttcacaattccttggttctgtcgtcgcgctcgcctgccatctccctccgcgctccatccgccaccatccgcgctcgcctcccttcgcgcatcctacaaccgcgtgctccttccttcgatggtgcggatcccccgtgactaccatctccctccgccctcccgcgctccatccgccaccatccgcgcttcctacagccgcgcgctccttcgacggcgcggatcccgcaccctcgaatcacgccagcagatcccacaatcaagcagcggcgacaggaataggggcgggctacgcgggcgctactacgacgagggtgagggcgagcgctccggcgccgcggcgccattcatcataatcggtcgagctcctggagggaacggctgcagagcggacgagatcgaggagcgggcgggcgggtgccgcccgtgacggcgcctaggctcaggctccgcgacggccgccacctcgccgcgcaaaggtctcaccggctcccgagaggacagcgcccgcgcctcccaggtttcaaaaaaccttctgagaaggcatgtataaaactttgggcaaaaggagatcttcctacctagcatatcttgcctcggaggagggttgttatattcaatactatgggtttgatggagcctacagttgttgtaattgaagcgggtcaagacatagcatttgcaaagatttagttcattctgatcactctgcaatatttcggtagtcgatggatggagaatggtggatcgaggagaccgatgacatactgctgcatcccgtgctgctcaatgggaagcagtaccggccagtctggtcaaacgacggcaccgtgatccacgcagatttctagttaagtttcttctgatggtgatggtactaaagaggactatgttcatatccgggcaaagcgaggccaagccactaacagccaaagccttgcagaaagactagggagaaagaagataagtgagaggatgaagcttcttcaagatcttgttcctgaatgcagtaagatcattggcaaggcaatcatgctcgatgagattatcaactatgtgcagtcattgcaacgacaagtcgaggtagtgttagtgcatctgtagctgaattgttttgtaatatatgtggcatcttgttagtgcatctgcagttcttgtcaatgaaactcgcaactgttaaccccgagcttggctttgacattgagcagatcatatccaaacaagtaaagccacccactcgatcaccatatctccctctaggatcaagcggccttactggcccatttaaccaaggaatcatgcagccataattgatgtgcaccattgccaatcccgttgatgttttgcatggagctattcacgaggcgtcaacaatgaaccattattgatttgtccactgttatgttcgttgctggtgcaatcatgggatacattatgttcactgaatctacactcccagttcacactgaacttacccctaaatcttgtggcttccaagattgcagtctagactacggtgatgaatccaataaccaaatatccttggacttttattgtagctttttgtgtgcatttgttccgatacttaacaattaacattatatgacaccatagtttctctaatcacatgtaactccatctagccatctaggtttgtcctaagtcaaacatatcttttaattttgattagaaatatctataaaaaataattgtcttaaataagcagagttatttggttttagtaatgaatttagcaatgccaatgctatttttatcgttctatataaattttagatattcatggtcaaacttaaaaatgtttgacttggacaaatatagatagacctacacatgcattgtgattttaggaagtcctacaattctcctccccaaagtctgctatcaacttctaacagttagtccagttttcatgaacaaatttagttttaatcattctatgttgtgccaaccgccagcaactaataatcagagctgggtcatatcatcatatcatagtagattgtatagctttcttccctgtgcatgcttactggttactagatgaaaaaggtcgtgttacgttatggcgcactcctctcctttgaataggacatgctttcacactctcaattcggcatatccttctagagactagctcacactccaatggtcttctaaatgaatagcacactatagtcaagagtatgacttaccaaattcattattggttccaagcatcttgaaagagaagtccatcgtctctcttactgtcatctcagcatggctaacagaagcacgcagtaggagtttctccaccttcctttcatcatgctacttcttgctgagggtggcgtgaaaaagtcagcaacaagttcctctatggtggcgacagagaagacaagggaggctctggcgacattgtggcgacgacgagaagcgagcaaggatataaatcgatctgtttctttggaaattagctgtagtagaatatttacgtgatacaaatctctattctctatatctctatatctattacgtttctcatgtctctatttttattataatggtttggaaaaatgtcgctcatcttctgctctaatctttcgaaattaggtgtagtggaatattattgccagatattgctacactacaatagtgaaattattgtccaaaattgaagattgccgtatgccttaggtcactataaaatcgagttattttataataatagttttttgttttacataagccccactcttttatctaaaagcccataaattattgtccaaaatggaagattaagagtttgtttattacttctaaattatcctttctatatctaccatatgtaccatcagcgacaagattaccccacatgttgtatcatggtttactagctagagaggctactcaagatgaggaatttgaagttatgtatggtgaggacgatgatgaagacaaagatgacgaggatgatgatgattatgatacaaagaccaagggggctactggagggggaagggcagcagcgaacgacctgttgagtgcaagcaggagtgagtgctgcacattgaatattggcatgcattggttgtggagcaattagtctggttctacttgatgcaaggtcattgagttattgaagtgatattttgtcgaatattttatatgccattgcaaagcacgggcatctaactagtctttcttatatatgtacactacaatacataatcatttatgccattgtttactacaaatatatatattaggcaactcttgaactggttgcaaggaatatttccactaaatctgcag

SEQ ID NO: 204333 - DNA, 3695 bp, Zea Mays
gaatattagctataacctatgtttgattgtgtatatttgtatacttttattgtgtttcaggaaggacaaaatcatgttgtacaggatcctcccacatatggtgcaccaaagtttgatagaacccccagttagtcatgtcgtgacatgttcttatctctactactaattatgtgcctatcgtaggcgttcacaattccttggttctgtcgtcgcgctcgcctgccatctccctccgcgctccatccgccaccatccgcgctcgcctcccttcgcgcatcctacaaccgcgtgctccttccttcgatggtgcggatcccccgtgactaccatctccctccgccctcccgcgctccatccgccaccatccgcgcttcctacagccgcgcgctccttcgacggcgcggatcccgcaccctcgaatcacgccagcagatcccacaatcaagcagcggcgacaggaataggggcgggctacgcgggcgctactacgacgagggtgagggcgagcgctccggcgccgcggcgccattcatcataatcggtcgagctcctggagggaacggctgcagagcggacgagatcgaggagcgggcgggcgggtgccgcccgtgacggcgcctaggctcaggctccgcgacggccgccacctcgccgcgcaaaggtctcaccggctcccgagaggacagcgcccgcgcctcccaggtttcaaaaaaccttctgagaaggcatgtataaaactttgggcaaaaggagatcttcctacctagcatatcttgcctcggaggagggttgttatattcaatactatgggtttgatggagcctacagttgttgtaattgaagcgggtcaagacatagcatttgcaaagatttagttcattctgatcactctgcaatatttcggtagtcgatggatggagaatggtggatcgaggagaccgatgacatactgctgcatcccgtgctgctcaatgggaagcagtaccggccagtctggtcaaacgacggcaccgtgatccacgcagatttctagttaagtttcttctgatggtgatggtactaaagaggactatgttcatatccgggcaaagcgaggccaagccactaacagccaaagccttgcagaaagactagggagaaagaagataagtgagaggatgaagcttcttcaagatcttgttcctgaatgcagtaagatcattggcaaggcaatcatgctcgatgagattatcaactatgtgcagtcattgcaacgacaagtcgagatcatatccaaacaagtaaagccacccactcgatcaccatatctccctctagtcaaaccaggatcaagcggccttactggcccatttaaccaaggaatcatgcagccataattgatgtgcaccattgccaatcccgttgatgttttgcatggagctattcacgaggcgtcaacaatgaaccattattgatttgtccactgttatgttcgttgctggtgcaatcatgggatacattatgttcactgaatctacactcccagttcacactgaacttacccctaaatcttgtggcttccaagattgcagtctagactacggtgatgaatccaataaccaaatatccttggacttttattgtagctttttgtgtgcatttgttccgatacttaacaattaacattatatgacaccatagtttctctaatcacatgtaactccatctagccatctaggtttgtcctaagtcaaacatatcttttaattttgattagaaatatctataaaaaataattgtcttaaataagcagagttatttggttttagtaatgaatttagcaatgccaatgctatttttatcgttctatataaattttagatattcatggtcaaacttaaaaatgtttgacttggacaaatatagatagacctacacatgcattgtgattttaggaagtcctacaattctcctccccaaagtctgctatcaacttctaacagttagtccagttttcatgaacaaatttagttttaatcattctatgttgtgccaaccgccagcaactaataatcagagctgggtcatatcatcatatcatagtagattgtatagctttcttccctgtgcatgcttactggttactagatgaaaaaggtcgtgttacgttatggcgcactcctctcctttgaataggacatgctttcacactctcaattcggcatatccttctagagactagctgtgagttgggtcctaaatgtttcttccatgttcaattcgaatggcattgttgtgttaattagccgtcctgttttgtatttttttcctacaagttatagtggttacattaatgactaaatcaagatcttgacccactttattgatgacacccttttttcttcttattgcttctcctatcgtctctgagtttgtcattccattcaaacacgaaatttgtgtcagtatagatgccatggaaattttggtttagcttgagtattttgtagatacttcattcttgagtattcttgagtttgccttgttataaattgcagcacactccaatggtcttctaaatgaatagcacactatagtcaagagtatgacttaccaaattcattattggttccaagcatcttgaaagagaagtccatcgtctctcttactgtcatctcagcatggctaacagaagcacgcagtaggagtttctccaccttcctttcatcatgctacttcttgctgagggtggcgtgaaaaagtcagcaacaagttcctctatggtggcgacagagaagacaagggaggctctggcgacattgtggcgacgacgagaagcgagcaaggatataaatcgatctgtttctttggaaattagctgtagtagaatatttacgtgatacaaatctctattctctatatctctatatctattacgtttctcatgtctctatttttattataatggtttggaaaaatgtcgctcatcttctgctctaatctttcgaaattaggtgtagtggaatattattgccagatattgctacactacaatagtgaaattattgtccaaaattgaagattgccgtatgccttaggtcactataaaatcgagttattttataataatagttttttgttttacataagccccactcttttatctaaaagcccataaattattgtccaaaatggaagattaagagtttgtttattacttctaaattatcctttctatatctaccatatgtaccatcagcgacaagattaccccacatgttgtatcatggtttactagctagagaggctactcaagatgaggaatttgaagttatgtatggtgaggacgatgatgaagacaaagatgacgaggatgatgatgattatgatacaaagaccaagggggctactggagggggaagggcagcagcgaacgacctgttgagtgcaagcaggagtgagtgctgcacattgaatattggcatgcattggttgtggagcaattagtctggttctacttgatgcaaggtcattgagttattgaagtgatattttgtcgaatattttatatgccattgcaaagcacgggcatctaactagtctttcttatatatgtacactacaatacataatcatttatgccattgtttactacaaatatatatattaggcaactcttgaactggttgcaaggaatatttccactaaatctgcag

SEQ ID NO: 204334 - DNA, 3168 bp, Zea Mays
gaatattagctataacctatgtttgattgtgtatatttgtatacttttattgtgtttcaggaaggacaaaatcatgttgtacaggatcctcccacatatggtgcaccaaagtttgatagaacccccagttagtcatgtcgtgacatgttcttatctctactactaattatgtgcctatcgtaggcgttcacaattccttggttctgtcgtcgcgctcgcctgccatctccctccgcgctccatccgccaccatccgcgctcgcctcccttcgcgcatcctacaaccgcgtgctccttccttcgatggtgcggatcccccgtgactaccatctccctccgccctcccgcgctccatccgccaccatccgcgcttcctacagccgcgcgctccttcgacggcgcggatcccgcaccctcgaatcacgccagcagatcccacaatcaagcagcggcgacaggaataggggcgggctacgcgggcgctactacgacgagggtgagggcgagcgctccggcgccgcggcgccattcatcataatcggtcgagctcctggagggaacggctgcagagcggacgagatcgaggagcgggcgggcgggtgccgcccgtgacggcgcctaggctcaggctccgcgacggccgccacctcgccgcgcaaaggtctcaccggctcccgagaggacagcgcccgcgcctcccaggtttcaaaaaaccttctgagaaggcatgtataaaactttgggcaaaaggagatcttcctacctagcatatcttgcctcggaggagggttgttatattcaatactatgggtttgatggagtagtcgatggatggagaatggtggatcgaggagaccgatgacatactgctgcatcccgtgctgctcaatgggaagcagtaccggccagtctggtcaaacgacggcaccgtgatccacgcagatttctagttaagtttcttctgatggtgatggtactaaagaggactatgttcatatccgggcaaagcgaggccaagccactaacagccaaagccttgcagaaagactagggagaaagaagataagtgagaggatgaagcttcttcaagatcttgttcctgaatgcagtaaggatcaagcggccttactggcccatttaaccaaggaatcatgcagccataattgatgtgcaccattgccaatcccgttgatgttttgcatggagctattcacgaggcgtcaacaatgaaccattattgatttgtccactgttatgttcgttgctggtgcaatcatgggatacattatgttcactgaatctacactcccagttcacactgaacttacccctaaatcttgtggcttccaagattgcagtctagactacggtgatgaatccaataaccaaatatccttggacttttattgtagctttttgtgtgcatttgttccgatacttaacaattaacattatatgacaccatagtttctctaatcacatgtaactccatctagccatctaggtttgtcctaagtcaaacatatcttttaattttgattagaaatatctataaaaaataattgtcttaaataagcagagttatttggttttagtaatgaatttagcaatgccaatgctatttttatcgttctatataaattttagatattcatggtcaaacttaaaaatgtttgacttggacaaatatagatagacctacacatgcattgtgattttaggaagtcctacaattctcctccccaaagtctgctatcaacttctaacagttagtccagttttcatgaacaaatttagttttaatcattctatgttgtgccaaccgccagcaactaataatcagagctgggtcatatcatcatatcatagtagattgtatagctttcttccctgtgcatgcttactggttactagatgaaaaaggtcgtgttacgttatggcgcactcctctcctttgaataggacatgctttcacactctcaattcggcatatccttctagagactagctcacactccaatggtcttctaaatgaatagcacactatagtcaagagtatgacttaccaaattcattattggttccaagcatcttgaaagagaagtccatcgtctctcttactgtcatctcagcatggctaacagaagcacgcagtaggagtttctccaccttcctttcatcatgctacttcttgctgagggtggcgtgaaaaagtcagcaacaagttcctctatggtggcgacagagaagacaagggaggctctggcgacattgtggcgacgacgagaagcgagcaaggatataaatcgatctgtttctttggaaattagctgtagtagaatatttacgtgatacaaatctctattctctatatctctatatctattacgtttctcatgtctctatttttattataatggtttggaaaaatgtcgctcatcttctgctctaatctttcgaaattaggtgtagtggaatattattgccagatattgctacactacaatagtgaaattattgtccaaaattgaagattgccgtatgccttaggtcactataaaatcgagttattttataataatagttttttgttttacataagccccactcttttatctaaaagcccataaattattgtccaaaatggaagattaagagtttgtttattacttctaaattatcctttctatatctaccatatgtaccatcagcgacaagattaccccacatgttgtatcatggtttactagctagagaggctactcaagatgaggaatttgaagttatgtatggtgaggacgatgatgaagacaaagatgacgaggatgatgatgattatgatacaaagaccaagggggctactggagggggaagggcagcagcgaacgacctgttgagtgcaagcaggagtgagtgctgcacattgaatattggcatgcattggttgtggagcaattagtctggttctacttgatgcaaggtcattgagttattgaagtgatattttgtcgaatattttatatgccattgcaaagcacgggcatctaactagtctttcttatatatgtacactacaatacataatcatttatgccattgtttactacaaatatatatattaggcaactcttgaactggttgcaaggaatatttccactaaatctgcag

SEQ ID NO: 204335 - DNA, 3233 bp, Zea Mays
gaatattagctataacctatgtttgattgtgtatatttgtatacttttattgtgtttcaggaaggacaaaatcatgttgtacaggatcctcccacatatggtgcaccaaagtttgatagaacccccagttagtcatgtcgtgacatgttcttatctctactactaattatgtgcctatcgtaggcgttcacaattccttggttctgtcgtcgcgctcgcctgccatctccctccgcgctccatccgccaccatccgcgctcgcctcccttcgcgcatcctacaaccgcgtgctccttccttcgatggtgcggatcccccgtgactaccatctccctccgccctcccgcgctccatccgccaccatccgcgcttcctacagccgcgcgctccttcgacggcgcggatcccgcaccctcgaatcacgccagcagatcccacaatcaagcagcggcgacaggaataggggcgggctacgcgggcgctactacgacgagggtgagggcgagcgctccggcgccgcggcgccattcatcataatcggtcgagctcctggagggaacggctgcagagcggacgagatcgaggagcgggcgggcgggtgccgcccgtgacggcgcctaggctcaggctccgcgacggccgccacctcgccgcgcaaaggtctcaccggctcccgagaggacagcgcccgcgcctcccaggtttcaaaaaaccttctgagaaggcctgttgatattctaaggaaattgtttgatgggaacaccttgagatcacaaatcaaagaattctttaatcgctttggtgctggagaggctgctgcaatgtgcttaatgatagctgcgaagctactttatgttgaagatagtctgataagcaattctgtttctgagaaagccactgaggcatttgaggaccctgggcttgttgggatgcctcaaattgttggtaccactgctttatctaatacacgaacttaggctggaggctttactatgggccaagttgttcaagaagcataacctttgttttctggtgcatatgaagggctttgtttgtgctcgtcaagactactttatctcatatgggagtttcctattatagtgattcgaagaccggctggtactaataaatgcaaggatggtgtaattgtttgtaggctttcagctggggccatgaaaattcttgagagcaagattcattcactggaaacatttttaagatctagaagaaataagagaaggggccacgcagtaccattgacacttaccctcaaggcctacagttgttgtaattgaagcgggtcaagacatagcatttgcaaagatttagttcattctgatcactctgcaatatttcggtagtcgatggatggagaatggtggatcgaggagaccgatgacatactgctgcatcccgtgctgctcaatgggaagcagtaccggccagtctggtcaaacgacggcaccgtgatccacgcagatttctagttaagtttcttctgatggtgatggtactaaagaggactatgttcatatccgggcaaagcgaggccaagccactaacagccaaagccttgcagaaagactagggagaaagaagataagtgagaggatgaagcttcttcaagatcttgttcctgaatgcagtaagatcattggcaaggcaatcatgctcgatgagattatcaactatgtgcagtcattgcaacgacaagtcgagatcatatccaaacaagatcaagcggccttactggcccatttaaccaaggaatcatgcagccataattgatgtgcaccattgccaatcccgttgatgttttgcatggagctattcacgaggcgtcaacaatgaaccattattgatttgtccactgttatgttcgttgctggtgcaatcatgggatacattatgttcactgaatctacactcccagttcacactgaacttacccctaaatcttgtggcttccaagattgcagtctagactacggtgatgaatccaataaccaaatatccttggacttttattgtagctttttgtgtgcatttgttccgatacttaacaattaacattatatgacaccatagtttctctaatcacatgtaactccatctagccatctaggtttgtcctaagtcaaacatatcttttaattttgattagaaatatctataaaaaataattgtcttaaataagcagagttatttggttttagtaatgaatttagcaatgccaatgctatttttatcgttctatataaattttagatattcatggtcaaacttaaaaatgtttgacttggacaaatatagatagacctacacatgcattgtgattttaggaagtcctacaattctcctccccaaagtctgctatcaacttctaacagttagtccagttttcatgaacaaatttagttttaatcattctatgttgtgccaaccgccagcaactaataatcagagctgggtcatatcatcatatcatagtagattgtatagctttcttccctgtgcatgcttactggttactagatgaaaaaggtcgtgttacgttatggcgcactcctctcctttgaataggacatgctttcacactctcaattcggcatatccttctagagactagctcacactccaatggtcttctaaatgaatagcacactatagtcaagagtatgacttaccaaattcattattggttccaagcatcttgaaagagaagtccatcgtctctcttactgtcatctcagcatggctaacagaagcacgcagcgacaagattaccccacatgttgtatcatggtttactagctagagaggctactcaagatgaggaatttgaagttatgtatggtgaggacgatgatgaagacaaagatgacgaggatgatgatgattatgatacaaagaccaagggggctactggagggggaagggcagcagcgaacgacctgttgagtgcaagcaggagtgagtgctgcacattgaatattggcatgcattggttgtggagcaattagtctggttctacttgatgcaaggtcattgagttattgaagtgatattttgtcgaatattttatatgccattgcaaagcacgggcatctaactagtctttcttatatatgtacactacaatacataatcatttatgccattgtttactacaaatatatatattaggcaactcttgaactggttgcaaggaatatttccactaaatctgcag

SEQ ID NO: 204336 - DNA, 3930 bp, Zea Mays
gaatattagctataacctatgtttgattgtgtatatttgtatacttttattgtgtttcaggaaggacaaaatcatgttgtacaggatcctcccacatatggtgcaccaaagtttgatagaacccccagttagtcatgtcgtgacatgttcttatctctactactaattatgtgcctatcgtaggcgttcacaattccttggttctgtcgtcgcgctcgcctgccatctccctccgcgctccatccgccaccatccgcgctcgcctcccttcgcgcatcctacaaccgcgtgctccttccttcgatggtgcggatcccccgtgactaccatctccctccgccctcccgcgctccatccgccaccatccgcgcttcctacagccgcgcgctccttcgacggcgcggatcccgcaccctcgaatcacgccagcagatcccacaatcaagcagcggcgacaggaataggggcgggctacgcgggcgctactacgacgagggtgagggcgagcgctccggcgccgcggcgccattcatcataatcggtcgagctcctggagggaacggctgcagagcggacgagatcgaggagcgggcgggcgggtgccgcccgtgacggcgcctaggctcaggctccgcgacggccgccacctcgccgcgcaaaggtctcaccggctcccgagaggacagcgcccgcgcctcccaggtttcaaaaaaccttctgagaaggcatgtataaaactttgggcaaaaggagatcttcctacctagcatatcttgcctcggaggagggttgttatattcaatactatgggtttgatggaggtaatttttaacaggcctgttgatattctaaggaaattgtttgatgggaacaccttgagatcacaaatcaaagaattctttaatcgctttggtgctggagaggctgctgcaatgtgcttaatgatagctgcgaagctactttatgttgaagatagtctgataagcaattctgtttctgagaaagccactgaggcatttgaggaccctgggcttgttgggatgcctcaaattgttggtaccactgctttatctaatacacgaacttaggctggaggctttactatgggccaagttgttcaagaagcataacctttgttttctggtgcatatgaagggctttgtttgtgctcgtcaagactactttatctcatatgggagtttcctattatagtgattcgaagaccggctggtactaataaatgcaaggatggtgtaattgtttgtaggctttcagctggggccatgaaaattcttgagagcaagattcattcactggaaacatttttaagatctagaagaaataagagaaggggccacgcagtaccattgacacttaccctcaaggttgttgtaattgaagcgggtcaagacatagcatttgcaaagatttagttcattctgatcactctgcaatatttcggtagtcgatggatggagaatggtggatcgaggagaccgatgacatactgctgcatcccgtgctgctcaatgggaagcagtaccggccagtctggtcaaacgacggcaccgtgatccacgcagatttctagttaagtttcttctgatggtgatggtactaaagaggactatgttcatatccgggcaaagcgaggccaagccactaacagccaaagccttgcagaaagactagggagaaagaagataagtgagaggatgaagcttcttcaagatcttgttcctgaatgcagtaagatcattggcaaggcaatcatgctcgatgagattatcaactatgtgcagtcattgcaacgacaagtcgagatcatatccaaacaagtaaagccacccactcgatcaccatatctccctctaggatcaagcggccttactggcccatttaaccaaggaatcatgcagccataattgatgtgcaccattgccaatcccgttgatgttttgcatggagctattcacgaggcgtcaacaatgaaccattattgatttgtccactgttatgttcgttgctggtgcaatcatgggatacattatgttcactgaatctacactcccagttcacactgaacttacccctaaatcttgtggcttccaagattgcagtctagactacggtgatgaatccaataaccaaatatccttggacttttattgtagctttttgtgtgcatttgttccgatacttaacaattaacattatatgacaccatagtttctctaatcacatgtaactccatctagccatctaggtttgtcctaagtcaaacatatcttttaattttgattagaaatatctataaaaaataattgtcttaaataagcagagttatttggttttagtaatgaatttagcaatgccaatgctatttttatcgttctatataaattttagatattcatggtcaaacttaaaaatgtttgacttggacaaatatagatagacctacacatgcattgtgattttaggaagtcctacaattctcctccccaaagtctgctatcaacttctaacagttagtccagttttcatgaacaaatttagttttaatcattctatgttgtgccaaccgccagcaactaataatcagagctgggtcatatcatcatatcatagtagattgtatagctttcttccctgtgcatgcttactggttactagatgaaaaaggtcgtgttacgttatggcgcactcctctcctttgaataggacatgctttcacactctcaattcggcatatccttctagagactagctcacactccaatggtcttctaaatgaatagcacactatagtcaagagtatgacttaccaaattcattattggttccaagcatcttgaaagagaagtccatcgtctctcttactgtcatctcagcatggctaacagaagcacgcagtaggagtttctccaccttcctttcatcatgctacttcttgctgagggtggcgtgaaaaagtcagcaacaagttcctctatggtggcgacagagaagacaagggaggctctggcgacattgtggcgacgacgagaagcgagcaaggatataaatcgatctgtttctttggaaattagctgtagtagaatatttacgtgatacaaatctctattctctatatctctatatctattacgtttctcatgtctctatttttattataatggtttggaaaaatgtcgctcatcttctgctctaatctttcgaaattaggtgtagtggaatattattgccagatattgctacactacaatagtgaaattattgtccaaaattgaagattgccgtatgccttaggtcactataaaatcgagttattttataataatagttttttgttttacataagccccactcttttatctaaaagcccataaattattgtccaaaatggaagattaagagtttgtttattacttctaaattatcctttctatatctaccatatgtaccatcagcgacaagattaccccacatgttgtatcatggtttactagctagagaggctactcaagatgaggaatttgaagttatgtatggtgaggacgatgatgaagacaaagatgacgaggatgatgatgattatgatacaaagaccaagggggctactggagggggaagggcagcagcgaacgacctgttgagtgcaagcaggagtgagtgctgcacattgaatattggcatgcattggttgtggagcaattagtctggttctacttgatgcaaggtcattgagttattgaagtgatattttgtcgaatattttatatgccattgcaaagcacgggcatctaactagtctttcttatatatgtacactacaatacataatcatttatgccattgtttactacaaatatatatattaggcaactcttgaactggttgcaaggaatatttccactaaatctgcag

SEQ ID NO: 204337 - DNA, 3276 bp, Zea Mays
gaatattagctataacctatgtttgattgtgtatatttgtatacttttattgtgtttcaggaaggacaaaatcatgttgtacaggatcctcccacatatggtgcaccaaagtttgatagaacccccagttagtcatgtcgtgacatgttcttatctctactactaattatgtgcctatcgtaggcgttcacaattccttggttctgtcgtcgcgctcgcctgccatctccctccgcgctccatccgccaccatccgcgctcgcctcccttcgcgcatcctacaaccgcgtgctccttccttcgatggtgcggatcccccgtgactaccatctccctccgccctcccgcgctccatccgccaccatccgcgcttcctacagccgcgcgctccttcgacggcgcggatcccgcaccctcgaatcacgccagcagatcccacaatcaagcagcggcgacaggaataggggcgggctacgcgggcgctactacgacgagggtgagggcgagcgctccggcgccgcggcgccattcatcataatcggtcgagctcctggagggaacggctgcagagcggacgagatcgaggagcgggcgggcgggtgccgcccgtgacggcgcctaggctcaggctccgcgacggccgccacctcgccgcgcaaaggtctcaccggctcccgagaggacagcgcccgcgcctcccaggtttcaaaaaaccttctgagaaggcctgttgatattctaaggaaattgtttgatgggaacaccttgagatcacaaatcaaagaattctttaatcgctttggtgctggagaggctgctgcaatgtgcttaatgatagctgcgaagctactttatgttgaagatagtctgataagcaattctgtttctgagaaagccactgaggcatttgaggaccctgggcttgttgggatgcctcaaattgttggtaccactgctttatctaatacacgaacttaggctggaggctttactatgggccaagttgttcaagaagcataacctttgttttctggtgcatatgaagggctttgtttgtgctcgtcaagactactttatctcatatgggagtttcctattatagtgattcgaagaccggctggtactaataaatgcaaggatggtgtaattgtttgtaggctttcagctggggccatgaaaattcttgagagcaagattcattcactggaaacatttttaagatctagaagaaataagagaaggggccacgcagtaccattgacacttaccctcaaggcctacagttgttgtaattgaagcgggtcaagacatagcatttgcaaagatttagttcattctgatcactctgcaatatttcggtcgatggatggagaatggtggatcgaggagaccgatgacatactgctgcatcccgtgctgctcaatgggaagcagtaccggccagtctggtcaaacgacggcaccgtgatccacgcagatttctagttaagtttcttctgatggtgatggtactaaagaggactatgttcatatccgggcaaagcgaggccaagccactaacagccaaagccttgcagaaagactagggagaaagaagataagtgagaggatgaagcttcttcaagatcttgttcctgaatgcagtaagatcattggcaaggcaatcatgctcgatgagattatcaactatgtgcagtcattgcaacgacaagtcgagatcatatccaaacaagtaaagccacccactcgatcaccatatctccctctagtcaaaccaggatcaagcggccttactggcccatttaaccaaggaatcatgcagccataattgatgtgcaccattgccaatcccgttgatgttttgcatggagctattcacgaggcgtcaacaatgaaccattattgatttgtccactgttatgttcgttgctggtgcaatcatgggatacattatgttcactgaatctacactcccagttcacactgaacttacccctaaatcttgtggcttccaagattgcagtctagactacggtgatgaatccaataaccaaatatccttggacttttattgtagctttttgtgtgcatttgttccgatacttaacaattaacattatatgacaccatagtttctctaatcacatgtaactccatctagccatctaggtttgtcctaagtcaaacatatcttttaattttgattagaaatatctataaaaaataattgtcttaaataagcagagttatttggttttagtaatgaatttagcaatgccaatgctatttttatcgttctatataaattttagatattcatggtcaaacttaaaaatgtttgacttggacaaatatagatagacctacacatgcattgtgattttaggaagtcctacaattctcctccccaaagtctgctatcaacttctaacagttagtccagttttcatgaacaaatttagttttaatcattctatgttgtgccaaccgccagcaactaataatcagagctgggtcatatcatcatatcatagtagattgtatagctttcttccctgtgcatgcttactggttactagatgaaaaaggtcgtgttacgttatggcgcactcctctcctttgaataggacatgctttcacactctcaattcggcatatccttctagagactagctcacactccaatggtcttctaaatgaatagcacactatagtcaagagtatgacttaccaaattcattattggttccaagcatcttgaaagagaagtccatcgtctctcttactgtcatctcagcatggctaacagaagcacgcagcgacaagattaccccacatgttgtatcatggtttactagctagagaggctactcaagatgaggaatttgaagttatgtatggtgaggacgatgatgaagacaaagatgacgaggatgatgatgattatgatacaaagaccaagggggctactggagggggaagggcagcagcgaacgacctgttgagtgcaagcaggagtgagtgctgcacattgaatattggcatgcattggttgtggagcaattagtctggttctacttgatgcaaggtcattgagttattgaagtgatattttgtcgaatattttatatgccattgcaaagcacgggcatctaactagtctttcttatatatgtacactacaatacataatcatttatgccattgtttactacaaatatatatattaggcaactcttgaactggttgcaaggaatatttccactaaatctgcag

SEQ ID NO: 204338 - DNA, 3043 bp, Zea Mays
gaatattagctataacctatgtttgattgtgtatatttgtatacttttattgtgtttcaggaaggacaaaatcatgttgtacaggatcctcccacatatggtgcaccaaagtttgatagaacccccagttagtcatgtcgtgacatgttcttatctctactactaattatgtgcctatcgtaggcgttcacaattccttggttctgtcgtcgcgctcgcctgccatctccctccgcgctccatccgccaccatccgcgctcgcctcccttcgcgcatcctacaaccgcgtgctccttccttcgatggtgcggatcccccgtgactaccatctccctccgccctcccgcgctccatccgccaccatccgcgcttcctacagccgcgcgctccttcgacggcgcggatcccgcaccctcgaatcacgccagcagatcccacaatcaagcagcggcgacaggaataggggcgggctacgcgggcgctactacgacgagggtgagggcgagcgctccggcgccgcggcgccattcatcataatcggtcgagctcctggagggaacggctgcagagcggacgagatcgaggagcgggcgggcgggtgccgcccgtgacggcgcctaggctcaggctccgcgacggccgccacctcgccgcgcaaaggtctcaccggctcccgagaggacagcgcccgcgcctcccaggtttcaaaaaaccttctgagaaggcatgtataaaactttgggcaaaaggagatcttcctacctagcatatcttgcctcggaggagggttgttatattcaatactatgggtttgatggagtcgatggatggagaatggtggatcgaggagaccgatgacatactgctgcatcccgtgctgctcaatgggaagcagtaccggccagtctggtcaaacgacggcaccgtgatccacgcagatttctagttaagtttcttctgatggtgatggtactaaagaggactatgttcatatccgggcaaagcgaggccaagccactaacagccaaagccttgcagaaagactagggagaaagaagataagtgagaggatgaagcttcttcaagatcttgttcctgaatgcagtaagatcattggcaaggcaatcatgctcgatgagattatcaactatgtgcagtcattgcaacgacaagtcgagatcatatccaaacaagtaaagccacccactcgatcaccatatctccctctaggatcaagcggccttactggcccatttaaccaaggaatcatgcagccataattgatgtgcaccattgccaatcccgttgatgttttgcatggagctattcacgaggcgtcaacaatgaaccattattgatttgtccactgttatgttcgttgctggtgcaatcatgggatacattatgttcactgaatctacactcccagttcacactgaacttacccctaaatcttgtggcttccaagattgcagtctagactacggtgatgaatccaataaccaaatatccttggacttttattgtagctttttgtgtgcatttgttccgatacttaacaattaacattatatgacaccatagtttctctaatcacatgtaactccatctagccatctaggtttgtcctaagtcaaacatatcttttaattttgattagaaatatctataaaaaataattgtcttaaataagcagagttatttggttttagtaatgaatttagcaatgccaatgctatttttatcgttctatataaattttagatattcatggtcaaacttaaaaatgtttgacttggacaaatatagatagacctacacatgcattgtgattttaggaagtcctacaattctcctccccaaagtctgctatcaacttctaacagttagtccagttttcatgaacaaatttagttttaatcattctatgttgtgccaaccgccagcaactaataatcagagctgggtcatatcatcatatcatagtagattgtatagctttcttccctgtgcatgcttactggttactagatgaaaaaggtcgtgttacgttatggcgcactcctctcctttgaataggacatgctttcacactctcaattcggcatatccttctagagactagctgtgagttgggtcctaaatgtttcttccatgttcaattcgaatggcattgttgtgttaattagccgtcctgttttgtatttttttcctacaagttatagtggttacattaatgactaaatcaagatcttgacccactttattgatgacacccttttttcttcttattgcttctcctatcgtctctgagtttgtcattccattcaaacacgaaatttgtgtcagtatagatgccatggaaattttggtttagcttgagtattttgtagatacttcattcttgagtattcttgagtttgccttgttataaattgcagcacactccaatggtcttctaaatgaatagcacactatagtcaagagtatgacttaccaaattcattattggttccaagcatcttgaaagagaagtccatcgtctctcttactgtcatctcagcatggctaacagaagcacgcagcgacaagattaccccacatgttgtatcatggtttactagctagagaggctactcaagatgaggaatttgaagttatgtatggtgaggacgatgatgaagacaaagatgacgaggatgatgatgattatgatacaaagaccaagggggctactggagggggaagggcagcagcgaacgacctgttgagtgcaagcaggagtgagtgctgcacattgaatattggcatgcattggttgtggagcaattagtctggttctacttgatgcaaggtcattgagttattgaagtgatattttgtcgaatattttatatgccattgcaaagcacgggcatctaactagtctttcttatatatgtacactacaatacataatcatttatgccattgtttactacaaatatatatattaggcaactcttgaactggttgcaaggaatatttccactaaatctgcag

SEQ ID NO: 204339 - DNA, 3584 bp, Zea Mays
gaatattagctataacctatgtttgattgtgtatatttgtatacttttattgtgtttcaggaaggacaaaatcatgttgtacaggatcctcccacatatggtgcaccaaagtttgatagaacccccagttagtcatgtcgtgacatgttcttatctctactactaattatgtgcctatcgtaggcgttcacaattccttggttctgtcgtcgcgctcgcctgccatctccctccgcgctccatccgccaccatccgcgctcgcctcccttcgcgcatcctacaaccgcgtgctccttccttcgatggtgcggatcccccgtgactaccatctccctccgccctcccgcgctccatccgccaccatccgcgcttcctacagccgcgcgctccttcgacggcgcggatcccgcaccctcgaatcacgccagcagatcccacaatcaagcagcggcgacaggaataggggcgggctacgcgggcgctactacgacgagggtgagggcgagcgctccggcgccgcggcgccattcatcataatcggtcgagctcctggagggaacggctgcagagcggacgagatcgaggagcgggcgggcgggtgccgcccgtgacggcgcctaggctcaggctccgcgacggccgccacctcgccgcgcaaaggtctcaccggctcccgagaggacagcgcccgcgcctcccaggtttcaaaaaaccttctgagaaggcctgttgatattctaaggaaattgtttgatgggaacaccttgagatcacaaatcaaagaattctttaatcgctttggtgctggagaggctgctgcaatgtgcttaatgatagctgcgaagctactttatgttgaagatagtctgataagcaattctgtttctgagaaagccactgaggcatttgaggaccctgggcttgttgggatgcctcaaattgttggtaccactgctttatctaatacacgaacttaggctggaggctttactatgggccaagttgttcaagaagcataacctttgttttctggtgcatatgaagggctttgtttgtgctcgtcaagactactttatctcatatgggagtttcctattatagtgattcgaagaccggctggtactaataaatgcaaggatggtgtaattgtttgtaggctttcagctggggccatgaaaattcttgagagcaagattcattcactggaaacatttttaagatctagaagaaataagagaaggggccacgcagtaccattgacacttaccctcaaggcctacagttgttgtaattgaagcgggtcaagacatagcatttgcaaagatttagttcattctgatcactctgcaatatttcggtagtcgatggatggagaatggtggatcgaggagaccgatgacatactgctgcatcccgtgctgctcaatgggaagcagtaccggccagtctggtcaaacgacggcaccgtgatccacgcagatttctagttaagtttcttctgatggtgatggtactaaagaggactatgttcatatccgggcaaagcgaggccaagccactaacagccaaagccttgcagaaagactagggagaaagaagataagtgagaggatgaagcttcttcaagatcttgttcctgaatgcagtaagatcattggcaaggcaatcatgctcgatgagattatcaactatgtgcagtcattgcaacgacaagtcgagatcatatccaaacaagtaaagccacccactcgatcaccatatctccctctaggatcaagcggccttactggcccatttaaccaaggaatcatgcagccataattgatgtgcaccattgccaatcccgttgatgttttgcatggagctattcacgaggcgtcaacaatgaaccattattgatttgtccactgttatgttcgttgctggtgcaatcatgggatacattatgttcactgaatctacactcccagttcacactgaacttacccctaaatcttgtggcttccaagattgcagtctagactacggtgatgaatccaataaccaaatatccttggacttttattgtagctttttgtgtgcatttgttccgatacttaacaattaacattatatgacaccatagtttctctaatcacatgtaactccatctagccatctaggtttgtcctaagtcaaacatatcttttaattttgattagaaatatctataaaaaataattgtcttaaataagcagagttatttggttttagtaatgaatttagcaatgccaatgctatttttatcgttctatataaattttagatattcatggtcaaacttaaaaatgtttgacttggacaaatatagatagacctacacatgcattgtgattttaggaagtcctacaattctcctccccaaagtctgctatcaacttctaacagttagtccagttttcatgaacaaatttagttttaatcattctatgttgtgccaaccgccagcaactaataatcagagctgggtcatatcatcatatcatagtagattgtatagctttcttccctgtgcatgcttactggttactagatgaaaaaggtcgtgttacgttatggcgcactcctctcctttgaataggacatgctttcacactctcaattcggcatatccttctagagactagctgtgagttgggtcctaaatgtttcttccatgttcaattcgaatggcattgttgtgttaattagccgtcctgttttgtatttttttcctacaagttatagtggttacattaatgactaaatcaagatcttgacccactttattgatgacacccttttttcttcttattgcttctcctatcgtctctgagtttgtcattccattcaaacacgaaatttgtgtcagtatagatgccatggaaattttggtttagcttgagtattttgtagatacttcattcttgagtattcttgagtttgccttgttataaattgcagcacactccaatggtcttctaaatgaatagcacactatagtcaagagtatgacttaccaaattcattattggttccaagcatcttgaaagagaagtccatcgtctctcttactgtcatctcagcatggctaacagaagcacgcagcgacaagattaccccacatgttgtatcatggtttactagctagagaggctactcaagatgaggaatttgaagttatgtatggtgaggacgatgatgaagacaaagatgacgaggatgatgatgattatgatacaaagaccaagggggctactggagggggaagggcagcagcgaacgacctgttgagtgcaagcaggagtgagtgctgcacattgaatattggcatgcattggttgtggagcaattagtctggttctacttgatgcaaggtcattgagttattgaagtgatattttgtcgaatattttatatgccattgcaaagcacgggcatctaactagtctttcttatatatgtacactacaatacataatcatttatgccattgtttactacaaatatatatattaggcaactcttgaactggttgcaaggaatatttccactaaatctgcag

SEQ ID NO: 204340 - DNA, 3827 bp, Zea Mays
gaatattagctataacctatgtttgattgtgtatatttgtatacttttattgtgtttcaggaaggacaaaatcatgttgtacaggatcctcccacatatggtgcaccaaagtttgatagaacccccagttagtcatgtcgtgacatgttcttatctctactactaattatgtgcctatcgtaggcgttcacaattccttggttctgtcgtcgcgctcgcctgccatctccctccgcgctccatccgccaccatccgcgctcgcctcccttcgcgcatcctacaaccgcgtgctccttccttcgatggtgcggatcccccgtgactaccatctccctccgccctcccgcgctccatccgccaccatccgcgcttcctacagccgcgcgctccttcgacggcgcggatcccgcaccctcgaatcacgccagcagatcccacaatcaagcagcggcgacaggaataggggcgggctacgcgggcgctactacgacgagggtgagggcgagcgctccggcgccgcggcgccattcatcataatcggtcgagctcctggagggaacggctgcagagcggacgagatcgaggagcgggcgggcgggtgccgcccgtgacggcgcctaggctcaggctccgcgacggccgccacctcgccgcgcaaaggtctcaccggctcccgagaggacagcgcccgcgcctcccaggtttcaaaaaaccttctgagaaggcctgttgatattctaaggaaattgtttgatgggaacaccttgagatcacaaatcaaagaattctttaatcgctttggtgctggagaggctgctgcaatgtgcttaatgatagctgcgaagctactttatgttgaagatagtctgataagcaattctgtttctgagaaagccactgaggcatttgaggaccctgggcttgttgggatgcctcaaattgttggtaccactgctttatctaatacacgaacttaggctggaggctttactatgggccaagttgttcaagaagcataacctttgttttctggtgcatatgaagggctttgtttgtgctcgtcaagactactttatctcatatgggagtttcctattatagtgattcgaagaccggctggtactaataaatgcaaggatggtgtaattgtttgtaggctttcagctggggccatgaaaattcttgagagcaagattcattcactggaaacatttttaagatctagaagaaataagagaaggggccacgcagtaccattgacacttaccctcaaggcctacagttgttgtaattgaagcgggtcaagacatagcatttgcaaagatttagttcattctgatcactctgcaatatttcggtagtcgatggatggagaatggtggatcgaggagaccgatgacatactgctgcatcccgtgctgctcaatgggaagcagtaccggccagtctggtcaaacgacggcaccgtgatccacgcagatttctagttaagtttcttctgatggtgatggtactaaagaggactatgttcatatccgggcaaagcgaggccaagccactaacagccaaagccttgcagaaagactagggagaaagaagataagtgagaggatgaagcttcttcaagatcttgttcctgaatgcagtaagatcattggcaaggcaatcatgctcgatgagattatcaactatgtgcagtcattgcaacgacaagtcgagatcatatccaaacaagtaaagccacccactcgatcaccatatctccctctaggatcaagcggccttactggcccatttaaccaaggaatcatgcagccataattgatgtgcaccattgccaatcccgttgatgttttgcatggagctattcacgaggcgtcaacaatgaaccattattgatttgtccactgttatgttcgttgctggtgcaatcatgggatacattatgttcactgaatctacactcccagttcacactgaacttacccctaaatcttgtggcttccaagattgcagtctagactacggtgatgaatccaataaccaaatatccttggacttttattgtagctttttgtgtgcatttgttccgatacttaacaattaacattatatgacaccatagtttctctaatcacatgtaactccatctagccatctaggtttgtcctaagtcaaacatatcttttaattttgattagaaatatctataaaaaataattgtcttaaataagcagagttatttggttttagtaatgaatttagcaatgccaatgctatttttatcgttctatataaattttagatattcatggtcaaacttaaaaatgtttgacttggacaaatatagatagacctacacatgcattgtgattttaggaagtcctacaattctcctccccaaagtctgctatcaacttctaacagttagtccagttttcatgaacaaatttagttttaatcattctatgttgtgccaaccgccagcaactaataatcagagctgggtcatatcatcatatcatagtagattgtatagctttcttccctgtgcatgcttactggttactagatgaaaaaggtcgtgttacgttatggcgcactcctctcctttgaataggacatgctttcacactctcaattcggcatatccttctagagactagctcacactccaatggtcttctaaatgaatagcacactatagtcaagagtatgacttaccaaattcattattggttccaagcatcttgaaagagaagtccatcgtctctcttactgtcatctcagcatggctaacagaagcacgcagtaggagtttctccaccttcctttcatcatgctacttcttgctgagggtggcgtgaaaaagtcagcaacaagttcctctatggtggcgacagagaagacaagggaggctctggcgacattgtggcgacgacgagaagcgagcaaggatataaatcgatctgtttctttggaaattagctgtagtagaatatttacgtgatacaaatctctattctctatatctctatatctattacgtttctcatgtctctatttttattataatggtttggaaaaatgtcgctcatcttctgctctaatctttcgaaattaggtgtagtggaatattattgccagatattgctacactacaatagtgaaattattgtccaaaattgaagattgccgtatgccttaggtcactataaaatcgagttattttataataatagttttttgttttacataagccccactcttttatctaaaagcccataaattattgtccaaaatggaagattaagagtttgtttattacttctaaattatcctttctatatctaccatatgtaccatcagcgacaagattaccccacatgttgtatcatggtttactagctagagaggctactcaagatgaggaatttgaagttatgtatggtgaggacgatgatgaagacaaagatgacgaggatgatgatgattatgatacaaagaccaagggggctactggagggggaagggcagcagcgaacgacctgttgagtgcaagcaggagtgagtgctgcacattgaatattggcatgcattggttgtggagcaattagtctggttctacttgatgcaaggtcattgagttattgaagtgatattttgtcgaatattttatatgccattgcaaagcacgggcatctaactagtctttcttatatatgtacactacaatacataatcatttatgccattgtttactacaaatatatatattaggcaactcttgaactggttgcaaggaatatttccactaaatctgcag

SEQ ID NO: 204341 - DNA, 3805 bp, Zea Mays
gaatattagctataacctatgtttgattgtgtatatttgtatacttttattgtgtttcaggaaggacaaaatcatgttgtacaggatcctcccacatatggtgcaccaaagtttgatagaacccccagttagtcatgtcgtgacatgttcttatctctactactaattatgtgcctatcgtaggcgttcacaattccttggttctgtcgtcgcgctcgcctgccatctccctccgcgctccatccgccaccatccgcgctcgcctcccttcgcgcatcctacaaccgcgtgctccttccttcgatggtgcggatcccccgtgactaccatctccctccgccctcccgcgctccatccgccaccatccgcgcttcctacagccgcgcgctccttcgacggcgcggatcccgcaccctcgaatcacgccagcagatcccacaatcaagcagcggcgacaggaataggggcgggctacgcgggcgctactacgacgagggtgagggcgagcgctccggcgccgcggcgccattcatcataatcggtcgagctcctggagggaacggctgcagagcggacgagatcgaggagcgggcgggcgggtgccgcccgtgacggcgcctaggctcaggctccgcgacggccgccacctcgccgcgcaaaggtctcaccggctcccgagaggacagcgcccgcgcctcccaggtttcaaaaaaccttctgagaaggcatgtataaaactttgggcaaaaggagatcttcctacctagcatatcttgcctcggaggagggttgttatattcaatactatgggtttgatggaggctttcagctggggccatgaaaattcttgagagcaagattcattcactggaaacatttttaagatctagaagaaataagagaaggggccacgcagtaccattgacacttaccctcaaggcctacagttgttgtaattgaagcgggtcaagacatagcatttgcaaagatttagttcattctgatcactctgcaatatttcggtagtcgatggatggagaatggtggatcgaggagaccgatgacatactgctgcatcccgtgctgctcaatgggaagcagtaccggccagtctggtcaaacgacggcaccgtgatccacgcagatttctagttaagtttcttctgatggtgatggtactaaagaggactatgttcatatccgggcaaagcgaggccaagccactaacagccaaagccttgcagaaagactagggagaaagaagataagtgagaggatgaagcttcttcaagatcttgttcctgaatgcagtaagatcattggcaaggcaatcatgctcgatgagattatcaactatgtgcagtcattgcaacgacaagtcgagatcatatccaaacaagtaaagccacccactcgatcaccatatctccctctaggatcaagcggccttactggcccatttaaccaaggaatcatgcagccataattgatgtgcaccattgccaatcccgttgatgttttgcatggagctattcacgaggcgtcaacaatgaaccattattgatttgtccactgttatgttcgttgctggtgcaatcatgggatacattatgttcactgaatctacactcccagttcacactgaacttacccctaaatcttgtggcttccaagattgcagtctagactacggtgatgaatccaataaccaaatatccttggacttttattgtagctttttgtgtgcatttgttccgatacttaacaattaacattatatgacaccatagtttctctaatcacatgtaactccatctagccatctaggtttgtcctaagtcaaacatatcttttaattttgattagaaatatctataaaaaataattgtcttaaataagcagagttatttggttttagtaatgaatttagcaatgccaatgctatttttatcgttctatataaattttagatattcatggtcaaacttaaaaatgtttgacttggacaaatatagatagacctacacatgcattgtgattttaggaagtcctacaattctcctccccaaagtctgctatcaacttctaacagttagtccagttttcatgaacaaatttagttttaatcattctatgttgtgccaaccgccagcaactaataatcagagctgggtcatatcatcatatcatagtagattgtatagctttcttccctgtgcatgcttactggttactagatgaaaaaggtcgtgttacgttatggcgcactcctctcctttgaataggacatgctttcacactctcaattcggcatatccttctagagactagctgtgagttgggtcctaaatgtttcttccatgttcaattcgaatggcattgttgtgttaattagccgtcctgttttgtatttttttcctacaagttatagtggttacattaatgactaaatcaagatcttgacccactttattgatgacacccttttttcttcttattgcttctcctatcgtctctgagtttgtcattccattcaaacacgaaatttgtgtcagtatagatgccatggaaattttggtttagcttgagtattttgtagatacttcattcttgagtattcttgagtttgccttgttataaattgcagcacactccaatggtcttctaaatgaatagcacactatagtcaagagtatgacttaccaaattcattattggttccaagcatcttgaaagagaagtccatcgtctctcttactgtcatctcagcatggctaacagaagcacgcagtaggagtttctccaccttcctttcatcatgctacttcttgctgagggtggcgtgaaaaagtcagcaacaagttcctctatggtggcgacagagaagacaagggaggctctggcgacattgtggcgacgacgagaagcgagcaaggatataaatcgatctgtttctttggaaattagctgtagtagaatatttacgtgatacaaatctctattctctatatctctatatctattacgtttctcatgtctctatttttattataatggtttggaaaaatgtcgctcatcttctgctctaatctttcgaaattaggtgtagtggaatattattgccagatattgctacactacaatagtgaaattattgtccaaaattgaagattgccgtatgccttaggtcactataaaatcgagttattttataataatagttttttgttttacataagccccactcttttatctaaaagcccataaattattgtccaaaatggaagattaagagtttgtttattacttctaaattatcctttctatatctaccatatgtaccatcagcgacaagattaccccacatgttgtatcatggtttactagctagagaggctactcaagatgaggaatttgaagttatgtatggtgaggacgatgatgaagacaaagatgacgaggatgatgatgattatgatacaaagaccaagggggctactggagggggaagggcagcagcgaacgacctgttgagtgcaagcaggagtgagtgctgcacattgaatattggcatgcattggttgtggagcaattagtctggttctacttgatgcaaggtcattgagttattgaagtgatattttgtcgaatattttatatgccattgcaaagcacgggcatctaactagtctttcttatatatgtacactacaatacataatcatttatgccattgtttactacaaatatatatattaggcaactcttgaactggttgcaaggaatatttccactaaatctgcag

SEQ ID NO: 204342 - DNA, 4229 bp, Zea Mays
gaatattagctataacctatgtttgattgtgtatatttgtatacttttattgtgtttcaggaaggacaaaatcatgttgtacaggatcctcccacatatggtgcaccaaagtttgatagaacccccagttagtcatgtcgtgacatgttcttatctctactactaattatgtgcctatcgtaggcgttcacaattccttggttctgtcgtcgcgctcgcctgccatctccctccgcgctccatccgccaccatccgcgctcgcctcccttcgcgcatcctacaaccgcgtgctccttccttcgatggtgcggatcccccgtgactaccatctccctccgccctcccgcgctccatccgccaccatccgcgcttcctacagccgcgcgctccttcgacggcgcggatcccgcaccctcgaatcacgccagcagatcccacaatcaagcagcggcgacaggaataggggcgggctacgcgggcgctactacgacgagggtgagggcgagcgctccggcgccgcggcgccattcatcataatcggtcgagctcctggagggaacggctgcagagcggacgagatcgaggagcgggcgggcgggtgccgcccgtgacggcgcctaggctcaggctccgcgacggccgccacctcgccgcgcaaaggtctcaccggctcccgagaggacagcgcccgcgcctcccaggtttcaaaaaaccttctgagaaggcctgttgatattctaaggaaattgtttgatgggaacaccttgagatcacaaatcaaagaattctttaatcgctttggtgctggagaggctgctgcaatgtgcttaatgatagctgcgaagctactttatgttgaagatagtctgataagcaattctgtttctgagaaagccactgaggcatttgaggaccctgggcttgttgggatgcctcaaattgttggtaccactgctttatctaatacacgaacttaggctggaggctttactatgggccaagttgttcaagaagcataacctttgttttctggtgcatatgaagggctttgtttgtgctcgtcaagactactttatctcatatgggagtttcctattatagtgattcgaagaccggctggtactaataaatgcaaggatggtgtaattgtttgtaggctttcagctggggccatgaaaattcttgagagcaagattcattcactggaaacatttttaagatctagaagaaataagagaaggggccacgcagtaccattgacacttaccctcaaggcctacagttgttgtaattgaagcgggtcaagacatagcatttgcaaagatttagttcattctgatcactctgcaatatttcggtagtcgatggatggagaatggtggatcgaggagaccgatgacatactgctgcatcccgtgctgctcaatgggaagcagtaccggccagtctggtcaaacgacggcaccgtgatccacgcagatttctagttaagtttcttctgatggtgatggtactaaagaggactatgttcatatccgggcaaagcgaggccaagccactaacagccaaagccttgcagaaagactagggagaaagaagataagtgagaggatgaagcttcttcaagatcttgttcctgaatgcagtaagatcattggcaaggcaatcatgctcgatgagattatcaactatgtgcagtcattgcaacgacaagtcgaggtagtgttagtgcatctgtagctgaattgttttgtaatatatgtggcatcttgttagtgcatctgcagttcttgtcaatgaaactcgcaactgttaaccccgagcttggctttgacattgagcagatcatatccaaacaagatcaagcggccttactggcccatttaaccaaggaatcatgcagccataattgatgtgcaccattgccaatcccgttgatgttttgcatggagctattcacgaggcgtcaacaatgaaccattattgatttgtccactgttatgttcgttgctggtgcaatcatgggatacattatgttcactgaatctacactcccagttcacactgaacttacccctaaatcttgtggcttccaagattgcagtctagactacggtgatgaatccaataaccaaatatccttggacttttattgtagctttttgtgtgcatttgttccgatacttaacaattaacattatatgacaccatagtttctctaatcacatgtaactccatctagccatctaggtttgtcctaagtcaaacatatcttttaattttgattagaaatatctataaaaaataattgtcttaaataagcagagttatttggttttagtaatgaatttagcaatgccaatgctatttttatcgttctatataaattttagatattcatggtcaaacttaaaaatgtttgacttggacaaatatagatagacctacacatgcattgtgattttaggaagtcctacaattctcctccccaaagtctgctatcaacttctaacagttagtccagttttcatgaacaaatttagttttaatcattctatgttgtgccaaccgccagcaactaataatcagagctgggtcatatcatcatatcatagtagattgtatagctttcttccctgtgcatgcttactggttactagatgaaaaaggtcgtgttacgttatggcgcactcctctcctttgaataggacatgctttcacactctcaattcggcatatccttctagagactagctgtgagttgggtcctaaatgtttcttccatgttcaattcgaatggcattgttgtgttaattagccgtcctgttttgtatttttttcctacaagttatagtggttacattaatgactaaatcaagatcttgacccactttattgatgacacccttttttcttcttattgcttctcctatcgtctctgagtttgtcattccattcaaacacgaaatttgtgtcagtatagatgccatggaaattttggtttagcttgagtattttgtagatacttcattcttgagtattcttgagtttgccttgttataaattgcagcacactccaatggtcttctaaatgaatagcacactatagtcaagagtatgacttaccaaattcattattggttccaagcatcttgaaagagaagtccatcgtctctcttactgtcatctcagcatggctaacagaagcacgcagtaggagtttctccaccttcctttcatcatgctacttcttgctgagggtggcgtgaaaaagtcagcaacaagttcctctatggtggcgacagagaagacaagggaggctctggcgacattgtggcgacgacgagaagcgagcaaggatataaatcgatctgtttctttggaaattagctgtagtagaatatttacgtgatacaaatctctattctctatatctctatatctattacgtttctcatgtctctatttttattataatggtttggaaaaatgtcgctcatcttctgctctaatctttcgaaattaggtgtagtggaatattattgccagatattgctacactacaatagtgaaattattgtccaaaattgaagattgccgtatgccttaggtcactataaaatcgagttattttataataatagttttttgttttacataagccccactcttttatctaaaagcccataaattattgtccaaaatggaagattaagagtttgtttattacttctaaattatcctttctatatctaccatatgtaccatcagcgacaagattaccccacatgttgtatcatggtttactagctagagaggctactcaagatgaggaatttgaagttatgtatggtgaggacgatgatgaagacaaagatgacgaggatgatgatgattatgatacaaagaccaagggggctactggagggggaagggcagcagcgaacgacctgttgagtgcaagcaggagtgagtgctgcacattgaatattggcatgcattggttgtggagcaattagtctggttctacttgatgcaaggtcattgagttattgaagtgatattttgtcgaatattttatatgccattgcaaagcacgggcatctaactagtctttcttatatatgtacactacaatacataatcatttatgccattgtttactacaaatatatatattaggcaactcttgaactggttgcaaggaatatttccactaaatctgcag

SEQ ID NO: 204343 - DNA, 3336 bp, Zea Mays
gaatattagctataacctatgtttgattgtgtatatttgtatacttttattgtgtttcaggaaggacaaaatcatgttgtacaggatcctcccacatatggtgcaccaaagtttgatagaacccccagttagtcatgtcgtgacatgttcttatctctactactaattatgtgcctatcgtaggcgttcacaattccttggttctgtcgtcgcgctcgcctgccatctccctccgcgctccatccgccaccatccgcgctcgcctcccttcgcgcatcctacaaccgcgtgctccttccttcgatggtgcggatcccccgtgactaccatctccctccgccctcccgcgctccatccgccaccatccgcgcttcctacagccgcgcgctccttcgacggcgcggatcccgcaccctcgaatcacgccagcagatcccacaatcaagcagcggcgacaggaataggggcgggctacgcgggcgctactacgacgagggtgagggcgagcgctccggcgccgcggcgccattcatcataatcggtcgagctcctggagggaacggctgcagagcggacgagatcgaggagcgggcgggcgggtgccgcccgtgacggcgcctaggctcaggctccgcgacggccgccacctcgccgcgcaaaggtctcaccggctcccgagaggacagcgcccgcgcctcccaggtttcaaaaaaccttctgagaaggcatgtataaaactttgggcaaaaggagatcttcctacctagcatatcttgcctcggaggagggttgttatattcaatactatgggtttgatggaggtaatttttaacaggcctgttgatattctaaggaaattgtttgatgggaacaccttgagatcacaaatcaaagaattctttaatcgctttggtgctggagaggctgctgcaatgtgcttaatgatagctgcgaagctactttatgttgaagatagtctgataagcaattctgtttctgagaaagccactgaggcatttgaggaccctgggcttgttgggatgcctcaaattgttggtaccactgctttatctaatacacgaacttaggctggaggctttactatgggccaagttgttcaagaagcataacctttgttttctggtgcatatgaagggctttgtttgtgctcgtcaagactactttatctcatatgggagtttcctattatagtgattcgaagaccggctggtactaataaatgcaaggatggtgtaattgtttgtaggctttcagctggggccatgaaaattcttgagagcaagattcattcactggaaacatttttaagatctagaagaaataagagaaggggccacgcagtaccattgacacttaccctcaaggttgttgtaattgaagcgggtcaagacatagcatttgcaaagatttagttcattctgatcactctgcaatatttcggtagtcgatggatggagaatggtggatcgaggagaccgatgacatactgctgcatcccgtgctgctcaatgggaagcagtaccggccagtctggtcaaacgacggcaccgtgatccacgcagatttctagttaagtttcttctgatggtgatggtactaaagaggactatgttcatatccgggcaaagcgaggccaagccactaacagccaaagccttgcagaaagactagggagaaagaagataagtgagaggatgaagcttcttcaagatcttgttcctgaatgcagtaagatcattggcaaggcaatcatgctcgatgagattatcaactatgtgcagtcattgcaacgacaagtcgagatcatatccaaacaagatcaagcggccttactggcccatttaaccaaggaatcatgcagccataattgatgtgcaccattgccaatcccgttgatgttttgcatggagctattcacgaggcgtcaacaatgaaccattattgatttgtccactgttatgttcgttgctggtgcaatcatgggatacattatgttcactgaatctacactcccagttcacactgaacttacccctaaatcttgtggcttccaagattgcagtctagactacggtgatgaatccaataaccaaatatccttggacttttattgtagctttttgtgtgcatttgttccgatacttaacaattaacattatatgacaccatagtttctctaatcacatgtaactccatctagccatctaggtttgtcctaagtcaaacatatcttttaattttgattagaaatatctataaaaaataattgtcttaaataagcagagttatttggttttagtaatgaatttagcaatgccaatgctatttttatcgttctatataaattttagatattcatggtcaaacttaaaaatgtttgacttggacaaatatagatagacctacacatgcattgtgattttaggaagtcctacaattctcctccccaaagtctgctatcaacttctaacagttagtccagttttcatgaacaaatttagttttaatcattctatgttgtgccaaccgccagcaactaataatcagagctgggtcatatcatcatatcatagtagattgtatagctttcttccctgtgcatgcttactggttactagatgaaaaaggtcgtgttacgttatggcgcactcctctcctttgaataggacatgctttcacactctcaattcggcatatccttctagagactagctcacactccaatggtcttctaaatgaatagcacactatagtcaagagtatgacttaccaaattcattattggttccaagcatcttgaaagagaagtccatcgtctctcttactgtcatctcagcatggctaacagaagcacgcagcgacaagattaccccacatgttgtatcatggtttactagctagagaggctactcaagatgaggaatttgaagttatgtatggtgaggacgatgatgaagacaaagatgacgaggatgatgatgattatgatacaaagaccaagggggctactggagggggaagggcagcagcgaacgacctgttgagtgcaagcaggagtgagtgctgcacattgaatattggcatgcattggttgtggagcaattagtctggttctacttgatgcaaggtcattgagttattgaagtgatattttgtcgaatattttatatgccattgcaaagcacgggcatctaactagtctttcttatatatgtacactacaatacataatcatttatgccattgtttactacaaatatatatattaggcaactcttgaactggttgcaaggaatatttccactaaatctgcag

SEQ ID NO: 204344 - DNA, 4158 bp, Zea Mays
gaatattagctataacctatgtttgattgtgtatatttgtatacttttattgtgtttcaggaaggacaaaatcatgttgtacaggatcctcccacatatggtgcaccaaagtttgatagaacccccagttagtcatgtcgtgacatgttcttatctctactactaattatgtgcctatcgtaggcgttcacaattccttggttctgtcgtcgcgctcgcctgccatctccctccgcgctccatccgccaccatccgcgctcgcctcccttcgcgcatcctacaaccgcgtgctccttccttcgatggtgcggatcccccgtgactaccatctccctccgccctcccgcgctccatccgccaccatccgcgcttcctacagccgcgcgctccttcgacggcgcggatcccgcaccctcgaatcacgccagcagatcccacaatcaagcagcggcgacaggaataggggcgggctacgcgggcgctactacgacgagggtgagggcgagcgctccggcgccgcggcgccattcatcataatcggtcgagctcctggagggaacggctgcagagcggacgagatcgaggagcgggcgggcgggtgccgcccgtgacggcgcctaggctcaggctccgcgacggccgccacctcgccgcgcaaaggtctcaccggctcccgagaggacagcgcccgcgcctcccaggtttcaaaaaaccttctgagaaggcctgttgatattctaaggaaattgtttgatgggaacaccttgagatcacaaatcaaagaattctttaatcgctttggtgctggagaggctgctgcaatgtgcttaatgatagctgcgaagctactttatgttgaagatagtctgataagcaattctgtttctgagaaagccactgaggcatttgaggaccctgggcttgttgggatgcctcaaattgttggtaccactgctttatctaatacacgaacttaggctggaggctttactatgggccaagttgttcaagaagcataacctttgttttctggtgcatatgaagggctttgtttgtgctcgtcaagactactttatctcatatgggagtttcctattatagtgattcgaagaccggctggtactaataaatgcaaggatggtgtaattgtttgtaggctttcagctggggccatgaaaattcttgagagcaagattcattcactggaaacatttttaagatctagaagaaataagagaaggggccacgcagtaccattgacacttaccctcaaggcctacagttgttgtaattgaagcgggtcaagacatagcatttgcaaagatttagttcattctgatcactctgcaatatttcggtcgatggatggagaatggtggatcgaggagaccgatgacatactgctgcatcccgtgctgctcaatgggaagcagtaccggccagtctggtcaaacgacggcaccgtgatccacgcagatttctagttaagtttcttctgatggtgatggtactaaagaggactatgttcatatccgggcaaagcgaggccaagccactaacagccaaagccttgcagaaagactagggagaaagaagataagtgagaggatgaagcttcttcaagatcttgttcctgaatgcagtaagatcattggcaaggcaatcatgctcgatgagattatcaactatgtgcagtcattgcaacgacaagtcgagttcttgtcaatgaaactcgcaactgttaaccccgagcttggctttgacattgagcagatcatatccaaacaagatcaagcggccttactggcccatttaaccaaggaatcatgcagccataattgatgtgcaccattgccaatcccgttgatgttttgcatggagctattcacgaggcgtcaacaatgaaccattattgatttgtccactgttatgttcgttgctggtgcaatcatgggatacattatgttcactgaatctacactcccagttcacactgaacttacccctaaatcttgtggcttccaagattgcagtctagactacggtgatgaatccaataaccaaatatccttggacttttattgtagctttttgtgtgcatttgttccgatacttaacaattaacattatatgacaccatagtttctctaatcacatgtaactccatctagccatctaggtttgtcctaagtcaaacatatcttttaattttgattagaaatatctataaaaaataattgtcttaaataagcagagttatttggttttagtaatgaatttagcaatgccaatgctatttttatcgttctatataaattttagatattcatggtcaaacttaaaaatgtttgacttggacaaatatagatagacctacacatgcattgtgattttaggaagtcctacaattctcctccccaaagtctgctatcaacttctaacagttagtccagttttcatgaacaaatttagttttaatcattctatgttgtgccaaccgccagcaactaataatcagagctgggtcatatcatcatatcatagtagattgtatagctttcttccctgtgcatgcttactggttactagatgaaaaaggtcgtgttacgttatggcgcactcctctcctttgaataggacatgctttcacactctcaattcggcatatccttctagagactagctgtgagttgggtcctaaatgtttcttccatgttcaattcgaatggcattgttgtgttaattagccgtcctgttttgtatttttttcctacaagttatagtggttacattaatgactaaatcaagatcttgacccactttattgatgacacccttttttcttcttattgcttctcctatcgtctctgagtttgtcattccattcaaacacgaaatttgtgtcagtatagatgccatggaaattttggtttagcttgagtattttgtagatacttcattcttgagtattcttgagtttgccttgttataaattgcagcacactccaatggtcttctaaatgaatagcacactatagtcaagagtatgacttaccaaattcattattggttccaagcatcttgaaagagaagtccatcgtctctcttactgtcatctcagcatggctaacagaagcacgcagtaggagtttctccaccttcctttcatcatgctacttcttgctgagggtggcgtgaaaaagtcagcaacaagttcctctatggtggcgacagagaagacaagggaggctctggcgacattgtggcgacgacgagaagcgagcaaggatataaatcgatctgtttctttggaaattagctgtagtagaatatttacgtgatacaaatctctattctctatatctctatatctattacgtttctcatgtctctatttttattataatggtttggaaaaatgtcgctcatcttctgctctaatctttcgaaattaggtgtagtggaatattattgccagatattgctacactacaatagtgaaattattgtccaaaattgaagattgccgtatgccttaggtcactataaaatcgagttattttataataatagttttttgttttacataagccccactcttttatctaaaagcccataaattattgtccaaaatggaagattaagagtttgtttattacttctaaattatcctttctatatctaccatatgtaccatcagcgacaagattaccccacatgttgtatcatggtttactagctagagaggctactcaagatgaggaatttgaagttatgtatggtgaggacgatgatgaagacaaagatgacgaggatgatgatgattatgatacaaagaccaagggggctactggagggggaagggcagcagcgaacgacctgttgagtgcaagcaggagtgagtgctgcacattgaatattggcatgcattggttgtggagcaattagtctggttctacttgatgcaaggtcattgagttattgaagtgatattttgtcgaatattttatatgccattgcaaagcacgggcatctaactagtctttcttatatatgtacactacaatacataatcatttatgccattgtttactacaaatatatatattaggcaactcttgaactggttgcaaggaatatttccactaaatctgcag

SEQ ID NO: 204345 - DNA, 3272 bp, Zea Mays
gaatattagctataacctatgtttgattgtgtatatttgtatacttttattgtgtttcaggaaggacaaaatcatgttgtacaggatcctcccacatatggtgcaccaaagtttgatagaacccccagttagtcatgtcgtgacatgttcttatctctactactaattatgtgcctatcgtaggcgttcacaattccttggttctgtcgtcgcgctcgcctgccatctccctccgcgctccatccgccaccatccgcgctcgcctcccttcgcgcatcctacaaccgcgtgctccttccttcgatggtgcggatcccccgtgactaccatctccctccgccctcccgcgctccatccgccaccatccgcgcttcctacagccgcgcgctccttcgacggcgcggatcccgcaccctcgaatcacgccagcagatcccacaatcaagcagcggcgacaggaataggggcgggctacgcgggcgctactacgacgagggtgagggcgagcgctccggcgccgcggcgccattcatcataatcggtcgagctcctggagggaacggctgcagagcggacgagatcgaggagcgggcgggcgggtgccgcccgtgacggcgcctaggctcaggctccgcgacggccgccacctcgccgcgcaaaggtctcaccggctcccgagaggacagcgcccgcgcctcccaggtttcaaaaaaccttctgagaaggcctgttgatattctaaggaaattgtttgatgggaacaccttgagatcacaaatcaaagaattctttaatcgctttggtgctggagaggctgctgcaatgtgcttaatgatagctgcgaagctactttatgttgaagatagtctgataagcaattctgtttctgagaaagccactgaggcatttgaggaccctgggcttgttgggatgcctcaaattgttggtaccactgctttatctaatacacgaacttaggctggaggctttactatgggccaagttgttcaagaagcataacctttgttttctggtgcatatgaagggctttgtttgtgctcgtcaagactactttatctcatatgggagtttcctattatagtgattcgaagaccggctggtactaataaatgcaaggatggtgtaattgtttgtaggctttcagctggggccatgaaaattcttgagagcaagattcattcactggaaacatttttaagatctagaagaaataagagaaggggccacgcagtaccattgacacttaccctcaaggttgttgtaattgaagcgggtcaagacatagcatttgcaaagatttagttcattctgatcactctgcaatatttcggtagtcgatggatggagaatggtggatcgaggagaccgatgacatactgctgcatcccgtgctgctcaatgggaagcagtaccggccagtctggtcaaacgacggcaccgtgatccacgcagatttctagttaagtttcttctgatggtgatggtactaaagaggactatgttcatatccgggcaaagcgaggccaagccactaacagccaaagccttgcagaaagactagggagaaagaagataagtgagaggatgaagcttcttcaagatcttgttcctgaatgcagtaagatcattggcaaggcaatcatgctcgatgagattatcaactatgtgcagtcattgcaacgacaagtcgagatcatatccaaacaagtaaagccacccactcgatcaccatatctccctctagtcaaaccaggatcaagcggccttactggcccatttaaccaaggaatcatgcagccataattgatgtgcaccattgccaatcccgttgatgttttgcatggagctattcacgaggcgtcaacaatgaaccattattgatttgtccactgttatgttcgttgctggtgcaatcatgggatacattatgttcactgaatctacactcccagttcacactgaacttacccctaaatcttgtggcttccaagattgcagtctagactacggtgatgaatccaataaccaaatatccttggacttttattgtagctttttgtgtgcatttgttccgatacttaacaattaacattatatgacaccatagtttctctaatcacatgtaactccatctagccatctaggtttgtcctaagtcaaacatatcttttaattttgattagaaatatctataaaaaataattgtcttaaataagcagagttatttggttttagtaatgaatttagcaatgccaatgctatttttatcgttctatataaattttagatattcatggtcaaacttaaaaatgtttgacttggacaaatatagatagacctacacatgcattgtgattttaggaagtcctacaattctcctccccaaagtctgctatcaacttctaacagttagtccagttttcatgaacaaatttagttttaatcattctatgttgtgccaaccgccagcaactaataatcagagctgggtcatatcatcatatcatagtagattgtatagctttcttccctgtgcatgcttactggttactagatgaaaaaggtcgtgttacgttatggcgcactcctctcctttgaataggacatgctttcacactctcaattcggcatatccttctagagactagctcacactccaatggtcttctaaatgaatagcacactatagtcaagagtatgacttaccaaattcattattggttccaagcatcttgaaagagaagtccatcgtctctcttactgtcatctcagcatggctaacagaagcacgcagcgacaagattaccccacatgttgtatcatggtttactagctagagaggctactcaagatgaggaatttgaagttatgtatggtgaggacgatgatgaagacaaagatgacgaggatgatgatgattatgatacaaagaccaagggggctactggagggggaagggcagcagcgaacgacctgttgagtgcaagcaggagtgagtgctgcacattgaatattggcatgcattggttgtggagcaattagtctggttctacttgatgcaaggtcattgagttattgaagtgatattttgtcgaatattttatatgccattgcaaagcacgggcatctaactagtctttcttatatatgtacactacaatacataatcatttatgccattgtttactacaaatatatatattaggcaactcttgaactggttgcaaggaatatttccactaaatctgcag

SEQ ID NO: 204346 - DNA, 3650 bp, Zea Mays
gaatattagctataacctatgtttgattgtgtatatttgtatacttttattgtgtttcaggaaggacaaaatcatgttgtacaggatcctcccacatatggtgcaccaaagtttgatagaacccccagttagtcatgtcgtgacatgttcttatctctactactaattatgtgcctatcgtaggcgttcacaattccttggttctgtcgtcgcgctcgcctgccatctccctccgcgctccatccgccaccatccgcgctcgcctcccttcgcgcatcctacaaccgcgtgctccttccttcgatggtgcggatcccccgtgactaccatctccctccgccctcccgcgctccatccgccaccatccgcgcttcctacagccgcgcgctccttcgacggcgcggatcccgcaccctcgaatcacgccagcagatcccacaatcaagcagcggcgacaggaataggggcgggctacgcgggcgctactacgacgagggtgagggcgagcgctccggcgccgcggcgccattcatcataatcggtcgagctcctggagggaacggctgcagagcggacgagatcgaggagcgggcgggcgggtgccgcccgtgacggcgcctaggctcaggctccgcgacggccgccacctcgccgcgcaaaggtctcaccggctcccgagaggacagcgcccgcgcctcccaggtttcaaaaaaccttctgagaaggcatgtataaaactttgggcaaaaggagatcttcctacctagcatatcttgcctcggaggagggttgttatattcaatactatgggtttgatggaggtaatttttaacaggcctgttgatattctaaggaaattgtttgatgggaacaccttgagatcacaaatcaaagaattctttaatcgctttggtgctggagaggctgctgcaatgtgcttaatgatagctgcgaagctactttatgttgaagatagtctgataagcaattctgtttctgagaaagccactgaggcatttgaggaccctgggcttgttgggatgcctcaaattgttggtaccactgctttatctaatacacgaacttaggctggaggctttactatgggccaagttgttcaagaagcataacctttgttttctggtgcatatgaagggctttgtttgtgctcgtcaagactactttatctcatatgggagtttcctattatagtgattcgaagaccggctggtactaataaatgcaaggatggtgtaattgtttgtaggctttcagctggggccatgaaaattcttgagagcaagattcattcactggaaacatttttaagatctagaagaaataagagaaggggccacgcagtaccattgacacttaccctcaaggttgttgtaattgaagcgggtcaagacatagcatttgcaaagatttagttcattctgatcactctgcaatatttcggtagtcgatggatggagaatggtggatcgaggagaccgatgacatactgctgcatcccgtgctgctcaatgggaagcagtaccggccagtctggtcaaacgacggcaccgtgatccacgcagatttctagttaagtttcttctgatggtgatggtactaaagaggactatgttcatatccgggcaaagcgaggccaagccactaacagccaaagccttgcagaaagactagggagaaagaagataagtgagaggatgaagcttcttcaagatcttgttcctgaatgcagtaagatcattggcaaggcaatcatgctcgatgagattatcaactatgtgcagtcattgcaacgacaagtcgagatcatatccaaacaagatcaagcggccttactggcccatttaaccaaggaatcatgcagccataattgatgtgcaccattgccaatcccgttgatgttttgcatggagctattcacgaggcgtcaacaatgaaccattattgatttgtccactgttatgttcgttgctggtgcaatcatgggatacattatgttcactgaatctacactcccagttcacactgaacttacccctaaatcttgtggcttccaagattgcagtctagactacggtgatgaatccaataaccaaatatccttggacttttattgtagctttttgtgtgcatttgttccgatacttaacaattaacattatatgacaccatagtttctctaatcacatgtaactccatctagccatctaggtttgtcctaagtcaaacatatcttttaattttgattagaaatatctataaaaaataattgtcttaaataagcagagttatttggttttagtaatgaatttagcaatgccaatgctatttttatcgttctatataaattttagatattcatggtcaaacttaaaaatgtttgacttggacaaatatagatagacctacacatgcattgtgattttaggaagtcctacaattctcctccccaaagtctgctatcaacttctaacagttagtccagttttcatgaacaaatttagttttaatcattctatgttgtgccaaccgccagcaactaataatcagagctgggtcatatcatcatatcatagtagattgtatagctttcttccctgtgcatgcttactggttactagatgaaaaaggtcgtgttacgttatggcgcactcctctcctttgaataggacatgctttcacactctcaattcggcatatccttctagagactagctgtgagttgggtcctaaatgtttcttccatgttcaattcgaatggcattgttgtgttaattagccgtcctgttttgtatttttttcctacaagttatagtggttacattaatgactaaatcaagatcttgacccactttattgatgacacccttttttcttcttattgcttctcctatcgtctctgagtttgtcattccattcaaacacgaaatttgtgtcagtatagatgccatggaaattttggtttagcttgagtattttgtagatacttcattcttgagtattcttgagtttgccttgttataaattgcagcacactccaatggtcttctaaatgaatagcacactatagtcaagagtatgacttaccaaattcattattggttccaagcatcttgaaagagaagtccatcgtctctcttactgtcatctcagcatggctaacagaagcacgcagcgacaagattaccccacatgttgtatcatggtttactagctagagaggctactcaagatgaggaatttgaagttatgtatggtgaggacgatgatgaagacaaagatgacgaggatgatgatgattatgatacaaagaccaagggggctactggagggggaagggcagcagcgaacgacctgttgagtgcaagcaggagtgagtgctgcacattgaatattggcatgcattggttgtggagcaattagtctggttctacttgatgcaaggtcattgagttattgaagtgatattttgtcgaatattttatatgccattgcaaagcacgggcatctaactagtctttcttatatatgtacactacaatacataatcatttatgccattgtttactacaaatatatatattaggcaactcttgaactggttgcaaggaatatttccactaaatctgcag

SEQ ID NO: 204347 - DNA, 3131 bp, Zea Mays
gaatattagctataacctatgtttgattgtgtatatttgtatacttttattgtgtttcaggaaggacaaaatcatgttgtacaggatcctcccacatatggtgcaccaaagtttgatagaacccccagttagtcatgtcgtgacatgttcttatctctactactaattatgtgcctatcgtaggcgttcacaattccttggttctgtcgtcgcgctcgcctgccatctccctccgcgctccatccgccaccatccgcgctcgcctcccttcgcgcatcctacaaccgcgtgctccttccttcgatggtgcggatcccccgtgactaccatctccctccgccctcccgcgctccatccgccaccatccgcgcttcctacagccgcgcgctccttcgacggcgcggatcccgcaccctcgaatcacgccagcagatcccacaatcaagcagcggcgacaggaataggggcgggctacgcgggcgctactacgacgagggtgagggcgagcgctccggcgccgcggcgccattcatcataatcggtcgagctcctggagggaacggctgcagagcggacgagatcgaggagcgggcgggcgggtgccgcccgtgacggcgcctaggctcaggctccgcgacggccgccacctcgccgcgcaaaggtctcaccggctcccgagaggacagcgcccgcgcctcccaggtttcaaaaaaccttctgagaaggcatgtataaaactttgggcaaaaggagatcttcctacctagcatatcttgcctcggaggagggttgttatattcaatactatgggtttgatggagttgttgtaattgaagcgggtcaagacatagcatttgcaaagatttagttcattctgatcactctgcaatatttcggtagtcgatggatggagaatggtggatcgaggagaccgatgacatactgctgcatcccgtgctgctcaatgggaagcagtaccggccagtctggtcaaacgacggcaccgtgatccacgcagatttctagttaagtttcttctgatggtgatggtactaaagaggactatgttcatatccgggcaaagcgaggccaagccactaacagccaaagccttgcagaaagactagggagaaagaagataagtgagaggatgaagcttcttcaagatcttgttcctgaatgcagtaagatcattggcaaggcaatcatgctcgatgagattatcaactatgtgcagtcattgcaacgacaagtcgagatcatatccaaacaagtaaagccacccactcgatcaccatatctccctctagtcaaaccaggatcaagcggccttactggcccatttaaccaaggaatcatgcagccataattgatgtgcaccattgccaatcccgttgatgttttgcatggagctattcacgaggcgtcaacaatgaaccattattgatttgtccactgttatgttcgttgctggtgcaatcatgggatacattatgttcactgaatctacactcccagttcacactgaacttacccctaaatcttgtggcttccaagattgcagtctagactacggtgatgaatccaataaccaaatatccttggacttttattgtagctttttgtgtgcatttgttccgatacttaacaattaacattatatgacaccatagtttctctaatcacatgtaactccatctagccatctaggtttgtcctaagtcaaacatatcttttaattttgattagaaatatctataaaaaataattgtcttaaataagcagagttatttggttttagtaatgaatttagcaatgccaatgctatttttatcgttctatataaattttagatattcatggtcaaacttaaaaatgtttgacttggacaaatatagatagacctacacatgcattgtgattttaggaagtcctacaattctcctccccaaagtctgctatcaacttctaacagttagtccagttttcatgaacaaatttagttttaatcattctatgttgtgccaaccgccagcaactaataatcagagctgggtcatatcatcatatcatagtagattgtatagctttcttccctgtgcatgcttactggttactagatgaaaaaggtcgtgttacgttatggcgcactcctctcctttgaataggacatgctttcacactctcaattcggcatatccttctagagactagctgtgagttgggtcctaaatgtttcttccatgttcaattcgaatggcattgttgtgttaattagccgtcctgttttgtatttttttcctacaagttatagtggttacattaatgactaaatcaagatcttgacccactttattgatgacacccttttttcttcttattgcttctcctatcgtctctgagtttgtcattccattcaaacacgaaatttgtgtcagtatagatgccatggaaattttggtttagcttgagtattttgtagatacttcattcttgagtattcttgagtttgccttgttataaattgcagcacactccaatggtcttctaaatgaatagcacactatagtcaagagtatgacttaccaaattcattattggttccaagcatcttgaaagagaagtccatcgtctctcttactgtcatctcagcatggctaacagaagcacgcagcgacaagattaccccacatgttgtatcatggtttactagctagagaggctactcaagatgaggaatttgaagttatgtatggtgaggacgatgatgaagacaaagatgacgaggatgatgatgattatgatacaaagaccaagggggctactggagggggaagggcagcagcgaacgacctgttgagtgcaagcaggagtgagtgctgcacattgaatattggcatgcattggttgtggagcaattagtctggttctacttgatgcaaggtcattgagttattgaagtgatattttgtcgaatattttatatgccattgcaaagcacgggcatctaactagtctttcttatatatgtacactacaatacataatcatttatgccattgtttactacaaatatatatattaggcaactcttgaactggttgcaaggaatatttccactaaatctgcag

SEQ ID NO: 204348 - DNA, 3686 bp, Zea Mays
gaatattagctataacctatgtttgattgtgtatatttgtatacttttattgtgtttcaggaaggacaaaatcatgttgtacaggatcctcccacatatggtgcaccaaagtttgatagaacccccagttagtcatgtcgtgacatgttcttatctctactactaattatgtgcctatcgtaggcgttcacaattccttggttctgtcgtcgcgctcgcctgccatctccctccgcgctccatccgccaccatccgcgctcgcctcccttcgcgcatcctacaaccgcgtgctccttccttcgatggtgcggatcccccgtgactaccatctccctccgccctcccgcgctccatccgccaccatccgcgcttcctacagccgcgcgctccttcgacggcgcggatcccgcaccctcgaatcacgccagcagatcccacaatcaagcagcggcgacaggaataggggcgggctacgcgggcgctactacgacgagggtgagggcgagcgctccggcgccgcggcgccattcatcataatcggtcgagctcctggagggaacggctgcagagcggacgagatcgaggagcgggcgggcgggtgccgcccgtgacggcgcctaggctcaggctccgcgacggccgccacctcgccgcgcaaaggtctcaccggctcccgagaggacagcgcccgcgcctcccaggtttcaaaaaaccttctgagaaggcatgtataaaactttgggcaaaaggagatcttcctacctagcatatcttgcctcggaggagggttgttatattcaatactatgggtttgatggagcctacagttgttgtaattgaagcgggtcaagacatagcatttgcaaagatttagttcattctgatcactctgcaatatttcggtagtcgatggatggagaatggtggatcgaggagaccgatgacatactgctgcatcccgtgctgctcaatgggaagcagtaccggccagtctggtcaaacgacggcaccgtgatccacgcagatttctagttaagtttcttctgatggtgatggtactaaagaggactatgttcatatccgggcaaagcgaggccaagccactaacagccaaagccttgcagaaagactagggagaaagaagataagtgagaggatgaagcttcttcaagatcttgttcctgaatgcagtaagatcattggcaaggcaatcatgctcgatgagattatcaactatgtgcagtcattgcaacgacaagtcgagatcatatccaaacaagtaaagccacccactcgatcaccatatctccctctaggatcaagcggccttactggcccatttaaccaaggaatcatgcagccataattgatgtgcaccattgccaatcccgttgatgttttgcatggagctattcacgaggcgtcaacaatgaaccattattgatttgtccactgttatgttcgttgctggtgcaatcatgggatacattatgttcactgaatctacactcccagttcacactgaacttacccctaaatcttgtggcttccaagattgcagtctagactacggtgatgaatccaataaccaaatatccttggacttttattgtagctttttgtgtgcatttgttccgatacttaacaattaacattatatgacaccatagtttctctaatcacatgtaactccatctagccatctaggtttgtcctaagtcaaacatatcttttaattttgattagaaatatctataaaaaataattgtcttaaataagcagagttatttggttttagtaatgaatttagcaatgccaatgctatttttatcgttctatataaattttagatattcatggtcaaacttaaaaatgtttgacttggacaaatatagatagacctacacatgcattgtgattttaggaagtcctacaattctcctccccaaagtctgctatcaacttctaacagttagtccagttttcatgaacaaatttagttttaatcattctatgttgtgccaaccgccagcaactaataatcagagctgggtcatatcatcatatcatagtagattgtatagctttcttccctgtgcatgcttactggttactagatgaaaaaggtcgtgttacgttatggcgcactcctctcctttgaataggacatgctttcacactctcaattcggcatatccttctagagactagctgtgagttgggtcctaaatgtttcttccatgttcaattcgaatggcattgttgtgttaattagccgtcctgttttgtatttttttcctacaagttatagtggttacattaatgactaaatcaagatcttgacccactttattgatgacacccttttttcttcttattgcttctcctatcgtctctgagtttgtcattccattcaaacacgaaatttgtgtcagtatagatgccatggaaattttggtttagcttgagtattttgtagatacttcattcttgagtattcttgagtttgccttgttataaattgcagcacactccaatggtcttctaaatgaatagcacactatagtcaagagtatgacttaccaaattcattattggttccaagcatcttgaaagagaagtccatcgtctctcttactgtcatctcagcatggctaacagaagcacgcagtaggagtttctccaccttcctttcatcatgctacttcttgctgagggtggcgtgaaaaagtcagcaacaagttcctctatggtggcgacagagaagacaagggaggctctggcgacattgtggcgacgacgagaagcgagcaaggatataaatcgatctgtttctttggaaattagctgtagtagaatatttacgtgatacaaatctctattctctatatctctatatctattacgtttctcatgtctctatttttattataatggtttggaaaaatgtcgctcatcttctgctctaatctttcgaaattaggtgtagtggaatattattgccagatattgctacactacaatagtgaaattattgtccaaaattgaagattgccgtatgccttaggtcactataaaatcgagttattttataataatagttttttgttttacataagccccactcttttatctaaaagcccataaattattgtccaaaatggaagattaagagtttgtttattacttctaaattatcctttctatatctaccatatgtaccatcagcgacaagattaccccacatgttgtatcatggtttactagctagagaggctactcaagatgaggaatttgaagttatgtatggtgaggacgatgatgaagacaaagatgacgaggatgatgatgattatgatacaaagaccaagggggctactggagggggaagggcagcagcgaacgacctgttgagtgcaagcaggagtgagtgctgcacattgaatattggcatgcattggttgtggagcaattagtctggttctacttgatgcaaggtcattgagttattgaagtgatattttgtcgaatattttatatgccattgcaaagcacgggcatctaactagtctttcttatatatgtacactacaatacataatcatttatgccattgtttactacaaatatatatattaggcaactcttgaactggttgcaaggaatatttccactaaatctgcag

SEQ ID NO: 204349 - DNA, 3231 bp, Zea Mays
gaatattagctataacctatgtttgattgtgtatatttgtatacttttattgtgtttcaggaaggacaaaatcatgttgtacaggatcctcccacatatggtgcaccaaagtttgatagaacccccagttagtcatgtcgtgacatgttcttatctctactactaattatgtgcctatcgtaggcgttcacaattccttggttctgtcgtcgcgctcgcctgccatctccctccgcgctccatccgccaccatccgcgctcgcctcccttcgcgcatcctacaaccgcgtgctccttccttcgatggtgcggatcccccgtgactaccatctccctccgccctcccgcgctccatccgccaccatccgcgcttcctacagccgcgcgctccttcgacggcgcggatcccgcaccctcgaatcacgccagcagatcccacaatcaagcagcggcgacaggaataggggcgggctacgcgggcgctactacgacgagggtgagggcgagcgctccggcgccgcggcgccattcatcataatcggtcgagctcctggagggaacggctgcagagcggacgagatcgaggagcgggcgggcgggtgccgcccgtgacggcgcctaggctcaggctccgcgacggccgccacctcgccgcgcaaaggtctcaccggctcccgagaggacagcgcccgcgcctcccaggtttcaaaaaaccttctgagaaggcctgttgatattctaaggaaattgtttgatgggaacaccttgagatcacaaatcaaagaattctttaatcgctttggtgctggagaggctgctgcaatgtgcttaatgatagctgcgaagctactttatgttgaagatagtctgataagcaattctgtttctgagaaagccactgaggcatttgaggaccctgggcttgttgggatgcctcaaattgttggtaccactgctttatctaatacacgaacttaggctggaggctttactatgggccaagttgttcaagaagcataacctttgttttctggtgcatatgaagggctttgtttgtgctcgtcaagactactttatctcatatgggagtttcctattatagtgattcgaagaccggctggtactaataaatgcaaggatggtgtaattgtttgtaggctttcagctggggccatgaaaattcttgagagcaagattcattcactggaaacatttttaagatctagaagaaataagagaaggggccacgcagtaccattgacacttaccctcaaggcctacagttgttgtaattgaagcgggtcaagacatagcatttgcaaagatttagttcattctgatcactctgcaatatttcggtagtcgatggatggagaatggtggatcgaggagaccgatgacatactgctgcatcccgtgctgctcaatgggaagcagtaccggccagtctggtcaaacgacggcaccgtgatccacgcagatttctagttaagtttcttctgatggtgatggtactaaagaggactatgttcatatccgggcaaagcgaggccaagccactaacagccaaagccttgcagaaagactagggagaaagaagataagtgagaggatgaagcttcttcaagatcttgttcctgaatgcagtaagatcattggcaaggcaatcatgctcgatgagattatcaactatgtgcagtcattgcaacgacaagtcgagatcatatccaaacaagtaaagccacccactcgatcaccatatctccctctaggatcaagcggccttactggcccatttaaccaaggaatcatgcagccataattgatgtgcaccattgccaatcccgttgatgttttgcatggagctattcacgaggcgtcaacaatgaaccattattgatttgtccactgttatgttcgttgctggtgcaatcatgggatacattatgttcactgaatctacactcccagttcacactgaacttacccctaaatcttgtggcttccaagattgcagtctagactacggtgatgaatccaataaccaaatatccttggacttttattgtagctttttgtgtgcatttgttccgatacttaacaattaacattatatgacaccatagtttctctaatcacatgtaactccatctagccatctaggtttgtcctaagtcaaacatatcttttaattttgattagaaatatctataaaaaataattgtcttaaataagcagagttatttggttttagtaatgaatttagcaatgccaatgctatttttatcgttctatataaattttagatattcatggtcaaacttaaaaatgtttgacttggacaaatatagatagacctacacatgcattgtgattttaggaagtcctacaattctcctccccaaagtctgctatcaacttctaacagttagtccagttttcatgaacaaatttagttttaatcattctatgttgtgccaaccgccagcaactaataatcagagctgggtcatatcatcatatcatagtagattgtatagctttcttccctgtgcatgcttactggttactagatgaaaaaggtcgtgttacgttatggcgcactcctctcctttgaataggacatgctttcacactctcaattcggcatatccttctagagactagctcacactccaatggtcttctaaatgaatagcacactatagtcaagagtatgacttaccaaattcattattggttccaagcatcttgaaagagaagtccatcgtctctcttactgtcatctcagcatggctaacagaagcacgcagctagagaggctactcaagatgaggaatttgaagttatgtatggtgaggacgatgatgaagacaaagatgacgaggatgatgatgattatgatacaaagaccaagggggctactggagggggaagggcagcagcgaacgacctgttgagtgcaagcaggagtgagtgctgcacattgaatattggcatgcattggttgtggagcaattagtctggttctacttgatgcaaggtcattgagttattgaagtgatattttgtcgaatattttatatgccattgcaaagcacgggcatctaactagtctttcttatatatgtacactacaatacataatcatttatgccattgtttactacaaatatatatattaggcaactcttgaactggttgcaaggaatatttccactaaatctgcag

SEQ ID NO: 204350 - DNA, 2744 bp, Zea Mays
gaatattagctataacctatgtttgattgtgtatatttgtatacttttattgtgtttcaggaaggacaaaatcatgttgtacaggatcctcccacatatggtgcaccaaagtttgatagaacccccagttagtcatgtcgtgacatgttcttatctctactactaattatgtgcctatcgtaggcgttcacaattccttggttctgtcgtcgcgctcgcctgccatctccctccgcgctccatccgccaccatccgcgctcgcctcccttcgcgcatcctacaaccgcgtgctccttccttcgatggtgcggatcccccgtgactaccatctccctccgccctcccgcgctccatccgccaccatccgcgcttcctacagccgcgcgctccttcgacggcgcggatcccgcaccctcgaatcacgccagcagatcccacaatcaagcagcggcgacaggaataggggcgggctacgcgggcgctactacgacgagggtgagggcgagcgctccggcgccgcggcgccattcatcataatcggtcgagctcctggagggaacggctgcagagcggacgagatcgaggagcgggcgggcgggtgccgcccgtgacggcgcctaggctcaggctccgcgacggccgccacctcgccgcgcaaaggtctcaccggctcccgagaggacagcgcccgcgcctcccaggtttcaaaaaaccttctgagaaggcatgtataaaactttgggcaaaaggagatcttcctacctagcatatcttgcctcggaggagggttgttatattcaatactatgggtttgatggaggtaatttttaacaggcctgttgatattctaaggaaattgtttgatgggaacaccttgagatcacaaatcaaagaattctttaatcgctttggtgctggagaggctgctgcaatgtgcttaatgatagctgcgaagctactttatgttgaagatagtctgataagcaattctgtttctgagaaagccactgaggcatttgaggaccctgggcttgttgggatgcctcaaattgttggtaccactgctttatctaatacacgaacttaggctggaggctttactatgggccaagttgttcaagaagcataacctttgttttctggtgcatatgaagggctttgtttgtgctcgtcaagactactttatctcatatgggagtttcctattatagtgattcgaagaccggctggtactaataaatgcaaggatggtgtaattgtttgtaggctttcagctggggccatgaaaattcttgagagcaagattcattcactggaaacatttttaagatctagaagaaataagagaaggggccacgcagtaccattgacacttaccctcaaggttgttgtaattgaagcgggtcaagacatagcatttgcaaagatttagttcattctgatcactctgcaatatttcggtagtcgatggatggagaatggtggatcgaggagaccgatgacatactgctgcatcccgtgctgctcaatgggaagcagtaccggccagtctggtcaaacgacggcaccgtgatccacgcagatttctagttaagtttcttctgatggtgatggtactaaagaggactatgttcatatccgggcaaagcgaggccaagccactaacagccaaagccttgcagaaagactagggagaaagaagataagtgagaggatgaagcttcttcaagatcttgttcctgaatgcagtaagatcattggcaaggcaatcatgctcgatgagattatcaactatgtgcagtcattgcaacgacaagtcgagatcatatccaaacaaatgctgctttcacaagactgacatcttgctttctatggagtcaaaccaggatcaagcggccttactggcccatttaaccaaggaatcatgcagccataattgatgtgcaccattgccaatcccgttgatgttttgcatggagctattcacgaggcgtcaacaatgaaccattattgatttgtccactgttatgttcgttgctggtgcaatcatgggatacattatgttcactgaatctacactcccagttcacactgaacttacccctaaatcttgtggcttccaagattgcagtctagactacgcacactccaatggtcttctaaatgaatagcacactatagtcaagagtatgacttaccaaattcattattggttccaagcatcttgaaagagaagtccatcgtctctcttactgtcatctcagcatggctaacagaagcacgcagcgacaagattaccccacatgttgtatcatggtttactagctagagaggctactcaagatgaggaatttgaagttatgtatggtgaggacgatgatgaagacaaagatgacgaggatgatgatgattatgatacaaagaccaagggggctactggagggggaagggcagcagcgaacgacctgttgagtgcaagcaggagtgagtgctgcacattgaatattggcatgcattggttgtggagcaattagtctggttctacttgatgcaaggtcattgagttattgaagtgatattttgtcgaatattttatatgccattgcaaagcacgggcatctaactagtctttcttatatatgtacactacaatacataatcatttatgccattgtttactacaaatatatatattaggcaactcttgaactggttgcaaggaatatttccactaaatctgcag

SEQ ID NO: 204351 - DNA, 3007 bp, Zea Mays
gaatattagctataacctatgtttgattgtgtatatttgtatacttttattgtgtttcaggaaggacaaaatcatgttgtacaggatcctcccacatatggtgcaccaaagtttgatagaacccccagttagtcatgtcgtgacatgttcttatctctactactaattatgtgcctatcgtaggcgttcacaattccttggttctgtcgtcgcgctcgcctgccatctccctccgcgctccatccgccaccatccgcgctcgcctcccttcgcgcatcctacaaccgcgtgctccttccttcgatggtgcggatcccccgtgactaccatctccctccgccctcccgcgctccatccgccaccatccgcgcttcctacagccgcgcgctccttcgacggcgcggatcccgcaccctcgaatcacgccagcagatcccacaatcaagcagcggcgacaggaataggggcgggctacgcgggcgctactacgacgagggtgagggcgagcgctccggcgccgcggcgccattcatcataatcggtcgagctcctggagggaacggctgcagagcggacgagatcgaggagcgggcgggcgggtgccgcccgtgacggcgcctaggctcaggctccgcgacggccgccacctcgccgcgcaaaggtctcaccggctcccgagaggacagcgcccgcgcctcccaggtttcaaaaaaccttctgagaaggcatgtataaaactttgggcaaaaggagatcttcctacctagcatatcttgcctcggaggagggttgttatattcaatactatgggtttgatggagtagtcgatggatggagaatggtggatcgaggagaccgatgacatactgctgcatcccgtgctgctcaatgggaagcagtaccggccagtctggtcaaacgacggcaccgtgatccacgcagatttctagttaagtttcttctgatggtgatggtactaaagaggactatgttcatatccgggcaaagcgaggccaagccactaacagccaaagccttgcagaaagactagggagaaagaagataagtgagaggatgaagcttcttcaagatcttgttcctgaatgcagtaagatcattggcaaggcaatcatgctcgatgagattatcaactatgtgcagtcattgcaacgacaagtcgagatcatatccaaacaagtaaagccacccactcgatcaccatatctccctctaggatcaagcggccttactggcccatttaaccaaggaatcatgcagccataattgatgtgcaccattgccaatcccgttgatgttttgcatggagctattcacgaggcgtcaacaatgaaccattattgatttgtccactgttatgttcgttgctggtgcaatcatgggatacattatgttcactgaatctacactcccagttcacactgaacttacccctaaatcttgtggcttccaagattgcagtctagactacggtgatgaatccaataaccaaatatccttggacttttattgtagctttttgtgtgcatttgttccgatacttaacaattaacattatatgacaccatagtttctctaatcacatgtaactccatctagccatctaggtttgtcctaagtcaaacatatcttttaattttgattagaaatatctataaaaaataattgtcttaaataagcagagttatttggttttagtaatgaatttagcaatgccaatgctatttttatcgttctatataaattttagatattcatggtcaaacttaaaaatgtttgacttggacaaatatagatagacctacacatgcattgtgattttaggaagtcctacaattctcctccccaaagtctgctatcaacttctaacagttagtccagttttcatgaacaaatttagttttaatcattctatgttgtgccaaccgccagcaactaataatcagagctgggtcatatcatcatatcatagtagattgtatagctttcttccctgtgcatgcttactggttactagatgaaaaaggtcgtgttacgttatggcgcactcctctcctttgaataggacatgctttcacactctcaattcggcatatccttctagagactagctgtgagttgggtcctaaatgtttcttccatgttcaattcgaatggcattgttgtgttaattagccgtcctgttttgtatttttttcctacaagttatagtggttacattaatgactaaatcaagatcttgacccactttattgatgacacccttttttcttcttattgcttctcctatcgtctctgagtttgtcattccattcaaacacgaaatttgtgtcagtatagatgccatggaaattttggtttagcttgagtattttgtagatacttcattcttgagtattcttgagtttgccttgttataaattgcagcacactccaatggtcttctaaatgaatagcacactatagtcaagagtatgacttaccaaattcattattggttccaagcatcttgaaagagaagtccatcgtctctcttactgtcatctcagcatggctaacagaagcacgcagctagagaggctactcaagatgaggaatttgaagttatgtatggtgaggacgatgatgaagacaaagatgacgaggatgatgatgattatgatacaaagaccaagggggctactggagggggaagggcagcagcgaacgacctgttgagtgcaagcaggagtgagtgctgcacattgaatattggcatgcattggttgtggagcaattagtctggttctacttgatgcaaggtcattgagttattgaagtgatattttgtcgaatattttatatgccattgcaaagcacgggcatctaactagtctttcttatatatgtacactacaatacataatcatttatgccattgtttactacaaatatatatattaggcaactcttgaactggttgcaaggaatatttccactaaatctgcag

SEQ ID NO: 204352 - DNA, 3688 bp, Zea Mays
gaatattagctataacctatgtttgattgtgtatatttgtatacttttattgtgtttcaggaaggacaaaatcatgttgtacaggatcctcccacatatggtgcaccaaagtttgatagaacccccagttagtcatgtcgtgacatgttcttatctctactactaattatgtgcctatcgtaggcgttcacaattccttggttctgtcgtcgcgctcgcctgccatctccctccgcgctccatccgccaccatccgcgctcgcctcccttcgcgcatcctacaaccgcgtgctccttccttcgatggtgcggatcccccgtgactaccatctccctccgccctcccgcgctccatccgccaccatccgcgcttcctacagccgcgcgctccttcgacggcgcggatcccgcaccctcgaatcacgccagcagatcccacaatcaagcagcggcgacaggaataggggcgggctacgcgggcgctactacgacgagggtgagggcgagcgctccggcgccgcggcgccattcatcataatcggtcgagctcctggagggaacggctgcagagcggacgagatcgaggagcgggcgggcgggtgccgcccgtgacggcgcctaggctcaggctccgcgacggccgccacctcgccgcgcaaaggtctcaccggctcccgagaggacagcgcccgcgcctcccaggtttcaaaaaaccttctgagaaggcatgtataaaactttgggcaaaaggagatcttcctacctagcatatcttgcctcggaggagggttgttatattcaatactatgggtttgatggaggtaatttttaacaggcctgttgatattctaaggaaattgtttgatgggaacaccttgagatcacaaatcaaagaattctttaatcgctttggtgctggagaggctgctgcaatgtgcttaatgatagctgcgaagctactttatgttgaagatagtctgataagcaattctgtttctgagaaagccactgaggcatttgaggaccctgggcttgttgggatgcctcaaattgttggtaccactgctttatctaatacacgaacttaggctggaggctttactatgggccaagttgttcaagaagcataacctttgttttctggtgcatatgaagggctttgtttgtgctcgtcaagactactttatctcatatgggagtttcctattatagtgattcgaagaccggctggtactaataaatgcaaggatggtgtaattgtttgtaggctttcagctggggccatgaaaattcttgagagcaagattcattcactggaaacatttttaagatctagaagaaataagagaaggggccacgcagtaccattgacacttaccctcaaggttgttgtaattgaagcgggtcaagacatagcatttgcaaagatttagttcattctgatcactctgcaatatttcggtagtcgatggatggagaatggtggatcgaggagaccgatgacatactgctgcatcccgtgctgctcaatgggaagcagtaccggccagtctggtcaaacgacggcaccgtgatccacgcagatttctagttaagtttcttctgatggtgatggtactaaagaggactatgttcatatccgggcaaagcgaggccaagccactaacagccaaagccttgcagaaagactagggagaaagaagataagtgagaggatgaagcttcttcaagatcttgttcctgaatgcagtaagatcattggcaaggcaatcatgctcgatgagattatcaactatgtgcagtcattgcaacgacaagtcgagatcatatccaaacaagtaaagccacccactcgatcaccatatctccctctaggatcaagcggccttactggcccatttaaccaaggaatcatgcagccataattgatgtgcaccattgccaatcccgttgatgttttgcatggagctattcacgaggcgtcaacaatgaaccattattgatttgtccactgttatgttcgttgctggtgcaatcatgggatacattatgttcactgaatctacactcccagttcacactgaacttacccctaaatcttgtggcttccaagattgcagtctagactacggtgatgaatccaataaccaaatatccttggacttttattgtagctttttgtgtgcatttgttccgatacttaacaattaacattatatgacaccatagtttctctaatcacatgtaactccatctagccatctaggtttgtcctaagtcaaacatatcttttaattttgattagaaatatctataaaaaataattgtcttaaataagcagagttatttggttttagtaatgaatttagcaatgccaatgctatttttatcgttctatataaattttagatattcatggtcaaacttaaaaatgtttgacttggacaaatatagatagacctacacatgcattgtgattttaggaagtcctacaattctcctccccaaagtctgctatcaacttctaacacacactccaatggtcttctaaatgaatagcacactatagtcaagagtatgacttaccaaattcattattggttccaagcatcttgaaagagaagtccatcgtctctcttactgtcatctcagcatggctaacagaagcacgcagtaggagtttctccaccttcctttcatcatgctacttcttgctgagggtggcgtgaaaaagtcagcaacaagttcctctatggtggcgacagagaagacaagggaggctctggcgacattgtggcgacgacgagaagcgagcaaggatataaatcgatctgtttctttggaaattagctgtagtagaatatttacgtgatacaaatctctattctctatatctctatatctattacgtttctcatgtctctatttttattataatggtttggaaaaatgtcgctcatcttctgctctaatctttcgaaattaggtgtagtggaatattattgccagatattgctacactacaatagtgaaattattgtccaaaattgaagattgccgtatgccttaggtcactataaaatcgagttattttataataatagttttttgttttacataagccccactcttttatctaaaagcccataaattattgtccaaaatggaagattaagagtttgtttattacttctaaattatcctttctatatctaccatatgtaccatcagcgacaagattaccccacatgttgtatcatggtttactagctagagaggctactcaagatgaggaatttgaagttatgtatggtgaggacgatgatgaagacaaagatgacgaggatgatgatgattatgatacaaagaccaagggggctactggagggggaagggcagcagcgaacgacctgttgagtgcaagcaggagtgagtgctgcacattgaatattggcatgcattggttgtggagcaattagtctggttctacttgatgcaaggtcattgagttattgaagtgatattttgtcgaatattttatatgccattgcaaagcacgggcatctaactagtctttcttatatatgtacactacaatacataatcatttatgccattgtttactacaaatatatatattaggcaactcttgaactggttgcaaggaatatttccactaaatctgcag

SEQ ID NO: 204353 - DNA, 2598 bp, Zea Mays
agccttgcagaaagattaatgaaactgcagctagggagaaagaagataagtgagaggatgaagcttcttcaagatcttgttcctgaatgcagtaagatcattggcaaggcaatcatgctcgatgagattatcaactatgtgcagtcattgcaacgacaagtcgagatcatatccaaacaaatgctgctttcacaagactgacatcttgctttctatggagtcaaaccaggatcaagcggccttactggcccatttaaccaaggaatcatgcagccataattgatgtgcaccattgccaatcccgttgatgttttgcatggagctattcacgaggcgtcaacaatgaaccattattgatttgtccactgttatgttcgttgctggtgcaatcatgggatacattatgttcactgaatctacactcccagttcacactgaacttacccctaaatcttgtggcttccaagattgcagtctagactacggtgatgaatccaataaccaaatatccttggacttttattgtagctttttgtgtgcatttgttccgatacttaacaattaacattatatgacaccatagtttctctaatcacatgtaactccatctagccatctaggtttgtcctaagtcaaacatatcttttaattttgattagaaatatctataaaaaataattgtcttaaataagcagagttatttggttttagtaatgaatttagcaatgccaatgctatttttatcgttctatataaattttagatattcatggtcaaacttaaaaatgtttgacttggacaaatatagatagacctacacatgcattgtgattttaggaagtcctacaattctcctccccaaagtctgctatcaacttctaacagttagtccagttttcatgaacaaatttagttttaatcattctatgttgtgccaaccgccagcaactaataatcagagctgggtcatatcatcatatcatagtagattgtatagctttcttccctgtgcatgcttactggttactagatgaaaaaggtcgtgttacgttatggcgcactcctctcctttgaataggacatgctttcacactctcaattcggcatatccttctagagactagctgtgagttgggtcctaaatgtttcttccatgttcaattcgaatggcattgttgtgttaattagccgtcctgttttgtatttttttcctacaagttatagtggttacattaatgactaaatcaagatcttgacccactttattgatgacacccttttttcttcttattgcttctcctatcgtctctgagtttgtcattccattcaaacacgaaatttgtgtcagtatagatgccatggaaattttggtttagcttgagtattttgtagatacttcattcttgagtattcttgagtttgccttgttataaattgcagcacactccaatggtcttctaaatgaatagcacactatagtcaagagtatgacttaccaaattcattattggttccaagcatcttgaaagagaagtccatcgtctctcttactgtcatctcagcatggctaacagaagcacgcagtaggagtttctccaccttcctttcatcatgctacttcttgctgagggtggcgtgaaaaagtcagcaacaagttcctctatggtggcgacagagaagacaagggaggctctggcgacattgtggcgacgacgagaagcgagcaaggatataaatcgatctgtttctttggaaattagctgtagtagaatatttacgtgatacaaatctctattctctatatctctatatctattacgtttctcatgtctctatttttattataatggtttggaaaaatgtcgctcatcttctgctctaatctttcgaaattaggtgtagtggaatattattgccagatattgctacactacaatagtgaaattattgtccaaaattgaagattgccgtatgccttaggtcactataaaatcgagttattttataataatagttttttgttttacataagccccactcttttatctaaaagcccataaattattgtccaaaatggaagattaagagtttgtttattacttctaaattatcctttctatatctaccatatgtaccatcagcgacaagattaccccacatgttgtatcatggtttactagctagagaggctactcaagatgaggaatttgaagttatgtatggtgaggacgatgatgaagacaaagatgacgaggatgatgatgattatgatacaaagaccaagggggctactggagggggaagggcagcagcgaacgacctgttgagtgcaagcaggagtgagtgctgcacattgaatattggcatgcattggttgtggagcaattagtctggttctacttgatgcaaggtcattgagttattgaagtgatattttgtcgaatattttatatgccattgcaaagcacgggcatctaactagtctttcttatatatgtacactacaatacataatcatttatgccattgtttactacaaatatatatattaggcaactcttgaactggttgcaaggaatatttccactaaatctgcag

SEQ ID NO: 204354 - DNA, 1920 bp, Zea Mays
gctttattatctttcacacacttgaagttaatgaaactgcagctagggagaaagaagataagtgagaggatgaagcttcttcaagatcttgttcctgaatgcagtaaggatcaagcggccttactggcccatttaaccaaggaatcatgcagccataattgatgtgcaccattgccaatcccgttgatgttttgcatggagctattcacgaggcgtcaacaatgaaccattattgatttgtccactgttatgttcgttgctggtgcaatcatgggatacattatgttcactgaatctacactcccagttcacactgaacttacccctaaatcttgtggcttccaagattgcagtctagactacggtgatgaatccaataaccaaatatccttggacttttattgtagctttttgtgtgcatttgttccgatacttaacaattaacattatatgacaccatagtttctctaatcacatgtaactccatctagccatctaggtttgtcctaagtcaaacatatcttttaattttgattagaaatatctataaaaaataattgtcttaaataagcagagttatttggttttagtaatgaatttagcaatgccaatgctatttttatcgttctatataaattttagatattcatggtcaaacttaaaaatgtttgacttggacaaatatagatagacctacacatgcattgtgattttaggaagtcctacaattctcctccccaaagtctgctatcaacttctaacagttagtccagttttcatgaacaaatttagttttaatcattctatgttgtgccaaccgccagcaactaataatcagagctgggtcatatcatcatatcatagtagattgtatagctttcttccctgtgcatgcttactggttactagatgaaaaaggtcgtgttacgttatggcgcactcctctcctttgaataggacatgctttcacactctcaattcggcatatccttctagagactagctgtgagttgggtcctaaatgtttcttccatgttcaattcgaatggcattgttgtgttaattagccgtcctgttttgtatttttttcctacaagttatagtggttacattaatgactaaatcaagatcttgacccactttattgatgacacccttttttcttcttattgcttctcctatcgtctctgagtttgtcattccattcaaacacgaaatttgtgtcagtatagatgccatggaaattttggtttagcttgagtattttgtagatacttcattcttgagtattcttgagtttgccttgttataaattgcagcacactccaatggtcttctaaatgaatagcacactatagtcaagagtatgacttaccaaattcattattggttccaagcatcttgaaagagaagtccatcgtctctcttactgtcatctcagcatggctaacagaagcacgcagcgacaagattaccccacatgttgtatcatggtttactagctagagaggctactcaagatgaggaatttgaagttatgtatggtgaggacgatgatgaagacaaagatgacgaggatgatgatgattatgatacaaagaccaagggggctactggagggggaagggcagcagcgaacgacctgttgagtgcaagcaggagtgagtgctgcacattgaatattggcatgcattggttgtggagcaattagtctggttctacttgatgcaaggtcattgagttattgaagtgatattttgtcgaatattttatatgccattgcaaagcacgggcatctaactagtctttcttatatatgtacactacaatacataatcatttatgccattgtttactacaaatatatatattaggcaactcttgaactggttgcaaggaatatttccactaaatctgcag

SEQ ID NO: 204355 - DNA, 1886 bp, Zea Mays
gcagcgtgcccactccgcgtgctgacatctgcgccgccgtatgattcgatcggacggcgggccgcgtgggatgacaacattctcgtcgtgtggcgggtcccgctagcctcgccgacgtcccgaggagatgatggaatcgtcgtacatccgcacgtacctgcagcagatggcagcgtcggtctccacggcgagctgcgacccgtctagcggcgccgatgaggtggagtgccgcgacgaggcggcggcgctgaggcttaagatggtgttcgtcgtggccatactcgtcgcaggcgcgaccggcgtcgcgatcccgctcgtcggccgccgctgccacgggcatggagcctcctcctcctcctccaccggtggggcgttcgtgctcgtaaaggcgttcgcggccggggtgatcctggccacgggcttcgtccacatgctgcacgacgcggacgaggcgctcacggacccttgtctccccgccgcgccgtggcgccgcttcccgttcccagggttcgtcgccatgctcgcggcgctcgggacgctcgtcttcgacttcgtcggcacgcatatgtacgagcgcaagaagcaccacgccgatgcggaggaagccgccgtcgtcgttggcaatgccagtgccagtgccaatgcgagcggccacgacgtgatcgttgcgctgctacaggacggcgcgctcgtggcgagcactggcagcagcattgggagagacgggggaggccacaaggaccccatgcacatcgtggggatgcacgcgcatgccgcagcacataggcatagccacgcccacgggcacggcccatgtgatgactgtcacgatgggcatgatgaggagccgtcccaagctcgtcatgtggtcgtctcccagattcttgagcttgggattgtatcgcactcagtgatcatcgggctatctttgggcgtctcacagaatccttgcaccatcaaacctctaggtgctgctctctccttccaccagttttttgagggctttgcattgggcggctgcatttccgaggctcagttcaagagtttctctgcactccttatggctttcttcttcgctatcacaacacctgctgggattaccgtggggtctggtatcgcgtcgttctacaatcccaacagccctagggcacttgtggtagagggaattctggattccatttcggctggtattctgatctacatggccttggtggacctcatcgcagctgattttctcagcaagaggatgagctgtaacttgaggcttcaagtcggctcatacattgccttgttccttggtgccatggccatggcatctctagccatctgggcttagcaagtagaatggaagtaaggcaaagatttgagagtgctgcctaattgcctttgatagcaggaggttctctccagcagctagttggttgcaattcttgatgagaatgggaggcattttttattttcttatattcttctgtttgtctattggttctcttcatgttggtggtggacagtaagatttagttcttgtgccctgtttggtagagctgttgttgttggaaaagtaacttatctaagaagctagtgaaaaaaacttttgtttatcgcatgcttttagtttattctgagaagaagctgaattgataaattgctgcagaagcctactatttgatatagcttctgcttaaatatgtgaaattgtgccaaacggggccattgtactagattagaagagagatgaacataggttcttgactcccttcagtattcatagatgtatattgaatagaaaatgcttattagtgctttgtcttacaagaatttttcgcaagcctataagactatgaatgttggaaaattggaaaaataaagtgtttataacaattgcc

SEQ ID NO: 204356 - DNA, 1149 bp, Zea Mays
acagactcagcatgcccccgcagcgtgcccactccgcgtgctgacatctgcgccgccgtatgattcgatcggacggcgggccgcgtgggatgacaacattctcgtcgtgtggcgggtcccgctagcctcgccgacgtcccgagattcttgagcttgggattgtatcgcactcagtgatcatcgggctatctttgggcgtctcacagaatccttgcaccatcaaacctctaggtgctgctctctccttccaccagttttttgagggctttgcattgggcggctgcatttccgaggctcagttcaagagtttctctgcactccttatggctttcttcttcgctatcacaacacctgctgggattaccgtggggtctggtatcgcgtcgttctacaatcccaacagccctagggcacttgtggtagagggaattctggattccatttcggctggtattctgatctacatggccttggtggacctcatcgcagctgattttctcagcaagaggatgagctgtaacttgaggcttcaagtcggctcatacattgccttgttccttggtgccatggccatggcatctctagccatctgggcttagcaagtagaatggaagtaaggcaaagatttgagagtgctgcctaattgcctttgatagcaggaggttctctccagcagctagttggttgcaattcttgatgagaatgggaggcattttttattttcttatattcttctgtttgtctattggttctcttcatgttggtggtggacagtaagatttagttcttgtgccctgtttggtagagctgttgttgttggaaaagtaacttatctaagaagctagtgaaaaaaacttttgtttatcgcatgcttttagtttattctgagaagaagctgaattgataaattgctgcagaagcctactatttgatatagcttctgcttaaatatgtgaaattgtgccaaacggggccattgtactagattagaagagagatgaacataggttcttgactcccttcagtattcatagatgtatattgaatagaaaatgcttattagtgctttgtcttacaagaatttttcgcaagcctataagactatgaatgttggaaaattggaaaaataaagtgtttataacaattgcc

SEQ ID NO: 204357 - DNA, 1696 bp, Zea Mays
tctttcttagtcgccgccaggaatccagcccacccggctctgcgctccgctcccacagacggacagcttgggctcgacggatgaacatgtgtgagaaagatcagaatttgccatggggatacgacctgttccgcgacccttttgctcctcccaacgggtactacgggcctcctcccggttactgtgatggccactgttgtgacctccatcattacggtagagcatcacatccagatgagactcagttgcattcttctcaactcgcatatgatatgtacaacccatcagaagcacccatgagcacgagcacgagcacgagacagtatatgtagaaccgtctagttcctctccagacacaggtggtgacggttgttttgagatggaggaggaagtagggaagaggttttaccccatggtcccagttccccatgtccccaaaattaatggagaaatcccatcaattgatgaagccactatggaccatgaaaggctgacagaaaggttgaggctgtatgagctggttgaaaacaaggtgaaaggagatggcaactgtcagttccgagcactatcagatcagctttaccaaagtccggatcaccatgaatttgtgaggtcgcagataattaaccagcttaaaactaaccgtgacgcctatgatggatacgttcccatggcatatgatgattacttggagaaagttgcacggaacggtgaatggggtgaccatgtgacgctgcaggctgctgctgacaagtatggagtaaaaatcttcgtgatgacatcgttcaaggatacttgctacatcgagatcctgcctaaggttcagaagtccaacaaagtgatactgttgagcttctgggcggaggtgcactacaactccatacatccgcagaacggtgagtaggcgtgccgttggcatgccgggccttcaccgccaacatgctccgaggtcgcagacgaccaagaggagaagatggtggccgttctcgcagcaccaccaccattgatggcgggttcagctctcttggggctggatggatgttcaggatcaggtggtggtcccggtcccggccatcgtccagatgatactacaagggacgtacgacattatgattaatatatatatacccagagcggagcagaaagacctgataagggaattagttgggatgaatgaaatggaataaacatgggatgggatgggaatcgtcgtcccgtatatagtttagagtggaggccggtgagcgccaactcaaactctttgtattgttgtttatatctacaaattttgccggaacgaggctagaattattggggaacaattatggtaataataaatcggttaagaattgagatgacccagctgttggcagagctcggatcatcatatgaccagaatcagaatggattccccagtgcatctagttttcctctggaagaacagaacaacataaaagaaaaacgttgaacactgaagtgggaagctgtaaccagaaatcttagatttgagcccaactgctctttttggaaggcaatatctagtttttggcccatgagtccaggacattttcagagggcccatgagtcatttcacaggtgaacaaccattgtagccattatacatacagagtaggctggtgtcttattttcgggttcaattgtaaatgattagtcaatgccatacagtcatttttgg

SEQ ID NO: 204358 - DNA, 1353 bp, Zea Mays
ctaaaacacatgccaaaaagggctttctctccctgctgaacaccaactaccctgcgccgggtccagggtgcgccgggttctccctctcgctcccacgcggcaaaccccacgacgtgctataaatattccacgaacggcccggatacctccagccccgcatcgcaccctccctggccgccttctcttctccagcgtccgatctctcccactcgccttcctcaccgcagctctcccggctcggtcgcttcgccacctccgtcctccccccgcgctcggtcgctcgccacctgctctcccctccctccacgttgctcgcgcccgcgcttatataaggaggagctcatggcggacgctccggcgagccctgggggcggaggcgggagccacgagagcgggagccccaggggcggcggaggtggaggcggtggcagcgtcagggagcaggacaggttcctgcccatcgccaacatcagtcgcatcatgaagaaggccatcccggctaacgggaagatcgccaaggacgctaaggagaccgtgcaggagtgcgtctcggagttcatctccttcatcactagcgaggcgagtgacaagtgccagagggagaagcggaagaccatcaatggcgacgacctgctgtgggccatggccacgctggggtttgaggactatattgaacccctcaaggtgtacctgcagaagtacagagaggtgcagggtgatagtaagttaacttcaaaatccagcgatggctccattaaaaaggatgcccttggtcatgtgggagcaagtagctcagctgtacaagggatgggtcagcaaggaacatacaaccaaggaatgggttatatgcaacctcagtaccataacggagatatctcgaactaatgaagacatggaccttttctgcaacagctgctcttccccgaggcgggtttttggtcgcagttatttactaagtaagacaccttgcggtgaccattaaagagtaaccaatcaccctgggtaggtcaatttttatctgcaagaactgatgaggccgcttggtaggagtaaatcgcttttcctgggaacgattgttggttagcgccgctactgtatgtatattgagataccttaacgattggtcttttggctgccatttggttacatgtatttgtatttggaggcataagtatcgtgtaatttgtgttatgactagtgtattgactattgaattatgagaagagctgctttagttgtaagatcacatgacacatccaagaattcccaaaaaaatgttcgtaaaactaatgagttctctaagatgtcaacaaatattggaagtaccacttcagttataagaatcgaaaggaa

SEQ ID NO: 204359 - DNA, 1165 bp, Zea Mays
atacctccagccccgcatcgcaccctccctggccgccttctcttctccagcgtccgatctctcccactcgccttcctcaccgcagctctcccggctcggtcgcttcgccacctccgtcctccccccgcgctcggtcgctcgccacctgctctcccctccctccacgttgctcgcgcccgcgcttatataagtgcaggaggagctcatggcggacgctccggcgagccctgggggcggtggcagcgtcagggagcaggacaggttcctgcccatcgccaacatcagtcgcatcatgaagaaggccatcccggctaacgggaagatcgccaaggacgctaaggagaccgtgcaggagtgcgtctcggagttcatctccttcatcactagcgaggcgagtgacaagtgccagagggagaagcggaagaccatcaatggcgacgacctgctgtgggccatggccacgctggggtttgaggactatattgaacccctcaaggtgtacctgcagaagtacagagaggtgcagggtgatagtaagttaacttcaaaatccagcgatggctccattaaaaaggatgcccttggtcatgtgggagcaagtagctcagctgtacaagggatgggtcagcaaggaacatacaaccaaggaatgggttatatgcaacctcagtaccataacggagatatctcgaactaatgaagacatggaccttttctgcaacagctgctcttccccgaggcgggtttttggtcgcagttatttactaagtaagacaccttgcggtgaccattaaagagtaaccaatcaccctgggtaggtcaatttttatctgcaagaactgatgaggccgcttggtaggagtaaatcgcttttcctgggaacgattgttggttagcgccgctactgtatgtatattgagataccttaacgattggtcttttggctgccatttggttacatgtatttgtatttggaggcataagtatcgtgtaatttgtgttatgactagtgtattgactattgaattatgagaagagctgctttagttgtaagatcacatgacacatccaagaattcccaaaaaaatgttcgtaaaactaatgagttctctaagatgtcaacaaatattggaagtaccacttcagttataagaatcgaaaggaa

SEQ ID NO: 204360 - DNA, 1952 bp, Zea Mays
cagccccgcatcgcaccctccctggccgccttctcttctccagcgtccgatctctcccactcgccttcctcaccgcagctctcccggctcggtcgcttcgccacctccgtcctccccccgcgctcggtcgctcgccacctgctctcccctccctccacgttgctcgcgcccgcgcttatataaggaggagctcatggcggacgctccggcgagccctgggggcggaggcgggagccacgagagcgggagccccaggggcggcggaggtggaggcggtggcagcgtcagggagcaggacaggttcctgcccatcgccaacatcagtcgcatcatgaagaaggccatcccggctaacgggaagatcgccaaggacgctaaggagaccgtgcaggagtgcgtctcggagttcatctccttcatcactagcgaggcgagtgacaagtgccagagggagaagcggaagaccatcaatggcgacgacctgctgtgggccatggccacgctggggtttgaggactatattgaacccctcaaggtgtacctgcagaagtacagagaggtgcgtactgatgaaggtattggggacttcaggttaattggattgatttggtggtcaggttgtgcaatcaccaatctgtcaccttgtcgattgtacctctgattgaacttaaaaatcctgttggcaatttacttccctctcgatgcttctggtacatatttgtacttatactgcttttaagttgagaatataaagagaccccctgttcctatgtactattgtcagtttgtcggaaagagtttctccccctagtagtttgtcttataagacgaatcaattcgaaagaacttatatccattgaacactgatcaaaacctgcatttgctgttcttaggcgggtttgagcatccattgaacactgatcggaacctccatttgctgttcttagatggggatgggttaacacgcgtgctggggaacattatacatctattcacaaacctatgctttctatgacgaaaagtagatgtaatgcaattggaatttataacagcagaaagagctcctgtaggagtgtaatgtaattagagcatgttgtagtgcaagctcttagttacttgaataacggacctttacacaaataatacccgaaactatttcactgtaggtcatatacaatcttgtttagggtccggagtttatttagttgtatttttttgtacgcccatctggtctatgagctgaataatctgtctaatgatgtctctcttttggtctcatgtctggtggatggcgtcacgaattgcagatggagggtgatagtaagttaacttcaaaatccagcgatggctccattaaaaaggatgcccttggtcatgtgggagcaagtagctcagctgtacaagggatgggtcagcaaggaacatacaaccaaggaatgggttatatgcaacctcagtaccataacggagatatctcgaactaatgaagacatggaccttttctgcaacagctgctcttccccgaggcgggtttttggtcgcagttatttactaagtaagacaccttgcggtgaccattaaagagtaaccaatcaccctgggtaggtcaatttttatctgcaagaactgatgaggccgcttggtaggagtaaatcgcttttcctgggaacgattgttggttagcgccgctactgtatgtatattgagataccttaacgattggtcttttggctgccatttggttacatgtatttgtatttggaggcataagtatcgtgtaatttgtgttatgactagtgtattgactattgaattatgagaagagctgctttagttgtaagatcacatgacacatccaagaattcccaaaaaaatgttcgtaaaactaatgagttctctaagatgtcaacaaatattggaagtaccacttcagttataagaatcgaaaggaa

SEQ ID NO: 204361 - DNA, 3379 bp, Zea Mays
cagccccgcatcgcaccctccctggccgccttctcttctccagcgtccgatctctcccactcgccttcctcaccgcagctctcccggctcggtcgcttcgccacctccgtcctccccccgcgctcggtcgctcgccacctgctctcccctccctccacgttgctcgcgcccgcgcttatataagtgcaggaggagctcatggcggacgctccggcgagccctgggggcggaggcgggagccacgagagcgggagccccaggggcggcggaggtggaggcggtggcagcgtcagggagcaggacaggttcctgcccatcgccaacatcagtcgcatcatgaagaaggccatcccggctaacgggaagatcgccaaggacgctaaggagaccgtgcaggagtgcgtctcggagttcatctccttcatcactagcgaggcgagtgacaagtgccagagggagaagcggaagaccatcaatggcgacgacctgctgtgggccatggccacgctggggtttgaggactatattgaacccctcaaggtgtacctgcagaagtacagagaggtgcgtactgatgaaggtattggggacttcaggttaattggattgatttggtggtcaggttgtgcaatcaccaatctgtcaccttgtcgattgtacctctgattgaacttaaaaatcctgttggcaatttacttccctctcgatgcttctggtacatatttgtacttatactgcttttaagttgagaatataaagagaccccctgttcctatgtactattgtcagtttgtcggaaagagtttctccccctagtagtttgtcttataagacgaatcaattcgaaagaacttatatccattgaacactgatcaaaacctgcatttgctgttcttaggcgggtttgagcatccattgaacactgatcggaacctccatttgctgttcttagatggggatgggttaacacgcgtgctggggaacattatacatctattcacaaacctatgctttctatgacgaaaagtagatgtaatgcaattggaatttataacagcagaaagagctcctgtaggagtgtaatgtaattagagcatgttgtagtgcaagctcttagttacttgaataacggacctttacacaaataatacccgaaactatttcactgtaggtcatatacaatcttgtttagggtccggagtttatttagttgtatttttttgtacgcccatctggtctatgagctgaataatctgtctaatgatgtctctcttttggtctcatgtctggtggatggcgtcacgaattgcagatggaggtatgttgtattaagcattgtctgatggtgaaatattctattgtttttcatgttttaatacattggcctgtaaatgttctataacatggacttttgttgttataaacttagaattggcctggggtaatttgagctagctgatcctgttttcagttttcaccctgacttgaagcacatgtgcacagttaaaatttgttttgttcacattccagaggcataaccttagtaaccgggaactgggaacttggccacgttcctcgttccgggaacgttcgttccgttccgggaaccagtggcgtagctagaattttttcgtgaggtatgccattagaatttttataaataatttgatatatagttcaaaatataaagataaaaataacatataacactatagatttaacatttaagtctataaatgtatatattacaatgcaaatataatatatatcagtattttttatatggatcttgtggactagtgatccggtgggccggcttaggatatgccgtggcccacctggaccacccgctgtctacgccactgccgggaacgtgggaacaatctcgttccgatagtgttaaatcctagtttttgtagcgtaccgcgtaccacgttcccgttcctcgatcccatcgatccgggaacctggttactaagggcataacacattaactgaatgtcatggagtactgcagatgtcttttcaggaaggggagggttcttgtgaattgcacctttttgtgaacaaatctagttcgtgtagttcatatatcgattccctactggcatgccaataaaaattaaatgaaacagtgaaccccatgcatgtttttattggaaaatcatactagggggtataaatgtgatcaaaatcccaggtcttcaccataaaaactactgtatgtttgcctaatggacttgacctccacctgattctgatacatatatttatttggtttcactgactgtttagcaagttctaattcctgtaaaatggttcgtacagggttctgataatttctttctttgtagttagtatgggagtagctcttctcattctccatgctttagctaccaatcttgtagattctgagatataatgaacattgttcttgtttctttgattaacaacagggtgatagtaagttaacttcaaaatccagcgatggctccattaaaaaggatgcccttggtcatgtgggagcaagtagctcagctgtacaagggatgggtcagcaaggaacatacaaccaaggaatgggttatatgcaacctcaggtgattgacaaaaaaattcttggtagttgttatttgttgtttatttgtgtttataagcacaatgtatagcttgggtccctgctgtatttgtttatttactaggctgaaaacttgaacatcttggattggcagattagcacccttatttattgcaaatttgcaaatcagttcacagcatttgcctagctgtaatgagtattgattaggtgcccccacaacaacttgctccttgtgcttaccggtcgtgactattgaggtgcccccactaacaattttcagtattgtaccataacggagatatctcgaactaatgaagacatggaccttttctgcaacagctgctcttccccgaggcgggtttttggtcgcagttatttactaagtaagacaccttgcggtgaccattaaagagtaaccaatcaccctgggtaggtcaatttttatctgcaagaactgatgaggccgcttggtaggagtaaatcgcttttcctgggaacgattgttggttagcgccgctactgtatgtatattgagataccttaacgattggtcttttggctgccatttggttacatgtatttgtatttggaggcataagtatcgtgtaatttgtgttatgactagtgtattgactattgaattatgagaagagctgctttagttgtaagatcacatgacacatccaagaattcccaaaaaaatgttcgtaaaactaatgagttctctaagatgtcaacaaatattggaagtaccacttcagttataagaatcgaaaggaa

SEQ ID NO: 204362 - DNA, 1628 bp, Zea Mays
cagccccgcatcgcaccctccctggccgccttctcttctccagcgtccgatctctcccactcgccttcctcaccgcagctctcccggctcggtcgcttcgccacctccgtcctccccccgcgctcggtcgctcgccacctgctctcccctccctccacgttgctcgcgcccgcgcttatataagtgcaggaggagctcatggcggacgctccggcgagccctgggggcggaggcgggagccacgagagcgggagccccaggggcggcggaggtggaggcggtggcagcgtcagggagcaggacaggttcctgcccatcgccaacatcagtcgcatcatgaagaaggccatcccggctaacgggaagatcgccaaggacgctaaggagaccgtgcaggagtgcgtctcggagttcatctccttcatcactagcgaggcgagtgacaagtgccagagggagaagcggaagaccatcaatggcgacgacctgctgtgggccatggccacgctggggtttgaggactatattgaacccctcaaggtgtacctgcagaagtacagagaggtgcagggtgatagtaagttaacttcaaaatccagcgatggctccattaaaaaggatgcccttggtcatgtgggagcaagtagctcagctgtacaagggatgggtcagcaaggaacatacaaccaaggaatgggttatatgcaacctcaggtgattgacaaaaaaattcttggtagttgttatttgttgtttatttgtgtttataagcacaatgtatagcttgggtccctgctgtatttgtttatttactaggctgaaaacttgaacatcttggattggcagattagcacccttatttattgcaaatttgcaaatcagttcacagcatttgcctagctgtaatgagtattgattaggtgcccccacaacaacttgctccttgtgcttaccggtcgtgactattgaggtgcccccactaacaattttcagtattggttggttccacttccataatgctacctccatatgttaagtttttttgttcatctatgactataaatggtttttttaatcacactgtggttggcatccatatgtttgctgatagaccatctctttcccttctccagtaccataacggagatatctcgaactaatgaagacatggaccttttctgcaacagctgctcttccccgaggcgggtttttggtcgcagttatttactaagtaagacaccttgcggtgaccattaaagagtaaccaatcaccctgggtaggtcaatttttatctgcaagaactgatgaggccgcttggtaggagtaaatcgcttttcctgggaacgattgttggttagcgccgctactgtatgtatattgagataccttaacgattggtcttttggctgccatttggttacatgtatttgtatttggaggcataagtatcgtgtaatttgtgttatgactagtgtattgactattgaattatgagaagagctgctttagttgtaagatcacatgacacatccaagaattcccaaaaaaatgttcgtaaaactaatgagttctctaagatgtcaacaaatattggaagtaccacttcagttataagaatcgaaaggaa

SEQ ID NO: 204363 - DNA, 1198 bp, Zea Mays
cagccccgcatcgcaccctccctggccgccttctcttctccagcgtccgatctctcccactcgccttcctcaccgcagctctcccggctcggtcgcttcgccacctccgtcctccccccgcgctcggtcgctcgccacctgctctcccctccctccacgttgctcgcgcccgcgcttatataaggaggagctcatggcggacgctccggcgagccctgggggcggaggcgggagccacgagagcgggagccccaggggcggcggaggtggaggcggtggcagcgtcagggagcaggacaggttcctgcccatcgccaacatcagtcgcatcatgaagaaggccatcccggctaacgggaagatcgccaaggacgctaaggagaccgtgcaggagtgcgtctcggagttcatctccttcatcactagcgaggcgagtgacaagtgccagagggagaagcggaagaccatcaatggcgacgacctgctgtgggccatggccacgctggggtttgaggactatattgaacccctcaaggtgtacctgcagaagtacagagagggtgatagtaagttaacttcaaaatccagcgatggctccattaaaaaggatgcccttggtcatgtgggagcaagtagctcagctgtacaagggatgggtcagcaaggaacatacaaccaaggaatgggttatatgcaacctcagtaccataacggagatatctcgaactaatgaagacatggaccttttctgcaacagctgctcttccccgaggcgggtttttggtcgcagttatttactaagtaagacaccttgcggtgaccattaaagagtaaccaatcaccctgggtaggtcaatttttatctgcaagaactgatgaggccgcttggtaggagtaaatcgcttttcctgggaacgattgttggttagcgccgctactgtatgtatattgagataccttaacgattggtcttttggctgccatttggttacatgtatttgtatttggaggcataagtatcgtgtaatttgtgttatgactagtgtattgactattgaattatgagaagagctgctttagttgtaagatcacatgacacatccaagaattcccaaaaaaatgttcgtaaaactaatgagttctctaagatgtcaacaaatattggaagtaccacttcagttataagaatcgaaaggaa

SEQ ID NO: 204364 - DNA, 959 bp, Zea Mays
acccctccgcccccaggggcggcggaggtggaggcggtggcagcgtcagggagcaggacaggttcctgcccatcgccaacatcagtcgcatcatgaagaaggccatcccggctaacgggaagatcgccaaggacgctaaggagaccgtgcaggagtgcgtctcggagttcatctccttcatcactagcgaggcgagtgacaagtgccagagggagaagcggaagaccatcaatggcgacgacctgctgtgggccatggccacgctggggtttgaggactatattgaacccctcaaggtgtacctgcagaagtacagagagggtgatagtaagttaacttcaaaatccagcgatggctccattaaaaaggatgcccttggtcatgtgggagcaagtagctcagctgtacaagggatgggtcagcaaggaacatacaaccaaggaatgggttatatgcaacctcagtaccataacggagatatctcgaactaatgaagacatggaccttttctgcaacagctgctcttccccgaggcgggtttttggtcgcagttatttactaagtaagacaccttgcggtgaccattaaagagtaaccaatcaccctgggtaggtcaatttttatctgcaagaactgatgaggccgcttggtaggagtaaatcgcttttcctgggaacgattgttggttagcgccgctactgtatgtatattgagataccttaacgattggtcttttggctgccatttggttacatgtatttgtatttggaggcataagtatcgtgtaatttgtgttatgactagtgtattgactattgaattatgagaagagctgctttagttgtaagatcacatgacacatccaagaattcccaaaaaaatgttcgtaaaactaatgagttctctaagatgtcaacaaatattggaagtaccacttcagttataagaatcgaaaggaa

SEQ ID NO: 204365 - DNA, 2862 bp, Zea Mays
ccgagatggagctgatggatctagggtttcggttgcggcgggaggcggtggcagcgtcagggagcaggacaggttcctgcccatcgccaacatcagtcgcatcatgaagaaggccatcccggctaacgggaagatcgccaaggacgctaaggagaccgtgcaggagtgcgtctcggagttcatctccttcatcactagcgaggcgagtgacaagtgccagagggagaagcggaagaccatcaatggcgacgacctgctgtgggccatggccacgctggggtttgaggactatattgaacccctcaaggtgtacctgcagaagtacagagaggtgcgtactgatgaaggtattggggacttcaggttaattggattgatttggtggtcaggttgtgcaatcaccaatctgtcaccttgtcgattgtacctctgattgaacttaaaaatcctgttggcaatttacttccctctcgatgcttctggtacatatttgtacttatactgcttttaagttgagaatataaagagaccccctgttcctatgtactattgtcagtttgtcggaaagagtttctccccctagtagtttgtcttataagacgaatcaattcgaaagaacttatatccattgaacactgatcaaaacctgcatttgctgttcttaggcgggtttgagcatccattgaacactgatcggaacctccatttgctgttcttagatggggatgggttaacacgcgtgctggggaacattatacatctattcacaaacctatgctttctatgacgaaaagtagatgtaatgcaattggaatttataacagcagaaagagctcctgtaggagtgtaatgtaattagagcatgttgtagtgcaagctcttagttacttgaataacggacctttacacaaataatacccgaaactatttcactgtaggtcatatacaatcttgtttagggtccggagtttatttagttgtatttttttgtacgcccatctggtctatgagctgaataatctgtctaatgatgtctctcttttggtctcatgtctggtggatggcgtcacgaattgcagatggaggtatgttgtattaagcattgtctgatggtgaaatattctattgtttttcatgttttaatacattggcctgtaaatgttctataacatggacttttgttgttataaacttagaattggcctggggtaatttgagctagctgatcctgttttcagttttcaccctgacttgaagcacatgtgcacagttaaaatttgttttgttcacattccagaggcataaccttagtaaccgggaactgggaacttggccacgttcctcgttccgggaacgttcgttccgttccgggaaccagtggcgtagctagaattttttcgtgaggtatgccattagaatttttataaataatttgatatatagttcaaaatataaagataaaaataacatataacactatagatttaacatttaagtctataaatgtatatattacaatgcaaatataatatatatcagtattttttatatggatcttgtggactagtgatccggtgggccggcttaggatatgccgtggcccacctggaccacccgctgtctacgccactgccgggaacgtgggaacaatctcgttccgatagtgttaaatcctagtttttgtagcgtaccgcgtaccacgttcccgttcctcgatcccatcgatccgggaacctggttactaagggcataacacattaactgaatgtcatggagtactgcagatgtcttttcaggaaggggagggttcttgtgaattgcacctttttgtgaacaaatctagttcgtgtagttcatatatcgattccctactggcatgccaataaaaattaaatgaaacagtgaaccccatgcatgtttttattggaaaatcatactagggggtataaatgtgatcaaaatcccaggtcttcaccataaaaactactgtatgtttgcctaatggacttgacctccacctgattctgatacatatatttatttggtttcactgactgtttagcaagttctaattcctgtaaaatggttcgtacagggttctgataatttctttctttgtagttagtatgggagtagctcttctcattctccatgctttagctaccaatcttgtagattctgagatataatgaacattgttcttgtttctttgattaacaacagggtgatagtaagttaacttcaaaatccagcgatggctccattaaaaaggatgcccttggtcatgtgggagcaagtagctcagctgtacaagggatgggtcagcaaggaacatacaaccaaggaatgggttatatgcaacctcagtaccataacggagatatctcgaactaatgaagacatggaccttttctgcaacagctgctcttccccgaggcgggtttttggtcgcagttatttactaagtaagacaccttgcggtgaccattaaagagtaaccaatcaccctgggtaggtcaatttttatctgcaagaactgatgaggccgcttggtaggagtaaatcgcttttcctgggaacgattgttggttagcgccgctactgtatgtatattgagataccttaacgattggtcttttggctgccatttggttacatgtatttgtatttggaggcataagtatcgtgtaatttgtgttatgactagtgtattgactattgaattatgagaagagctgctttagttgtaagatcacatgacacatccaagaattcccaaaaaaatgttcgtaaaactaatgagttctctaagatgtcaacaaatattggaagtaccacttcagttataagaatcgaaaggaa

SEQ ID NO: 204366 - DNA, 1416 bp, Zea Mays
gtactgatgaaggtattggggacttcaggttaattggattgatttggtggtcaggttgtgcaatcaccaatctgtcaccttgtcgattgtacctctgattgaacttaaaaatcctgttggcaatttacttccctctcgatgcttctggtacatatttgtacttatactgcttttaagttgagaatataaagagaccccctgttcctatgtactattgtcagtttgtcggaaagagtttctccccctagtagtttgtcttataagacgaatcaattcgaaagaacttatatccattgaacactgatcaaaacctgcatttgctgttcttaggcgggtttgagcatccattgaacactgatcggaacctccatttgctgttcttagatggggatgggttaacacgcgtgctggggaacattatacatctattcacaaacctatgctttctatgacgaaaagtagatgtaatgcaattggaatttataacagcagaaagagctcctgtaggagtgtaatgtaattagagcatgttgtagtgcaagctcttagttacttgaataacggacctttacacaaataatacccgaaactatttcactgtaggtcatatacaatcttgtttagggtccggagtttatttagttgtatttttttgtacgcccatctggtctatgagctgaataatctgtctaatgatgtctctcttttggtctcatgtctggtggatggcgtcacgaattgcagatggaggtatgttgtattaagcattgtctgatgggtgatagtaagttaacttcaaaatccagcgatggctccattaaaaaggatgcccttggtcatgtgggagcaagtagctcagctgtacaagggatgggtcagcaaggaacatacaaccaaggaatgggttatatgcaacctcagtaccataacggagatatctcgaactaatgaagacatggaccttttctgcaacagctgctcttccccgaggcgggtttttggtcgcagttatttactaagtaagacaccttgcggtgaccattaaagagtaaccaatcaccctgggtaggtcaatttttatctgcaagaactgatgaggccgcttggtaggagtaaatcgcttttcctgggaacgattgttggttagcgccgctactgtatgtatattgagataccttaacgattggtcttttggctgccatttggttacatgtatttgtatttggaggcataagtatcgtgtaatttgtgttatgactagtgtattgactattgaattatgagaagagctgctttagttgtaagatcacatgacacatccaagaattcccaaaaaaatgttcgtaaaactaatgagttctctaagatgtcaacaaatattggaagtaccacttcagttataagaatcgaaaggaa

SEQ ID NO: 204367 - DNA, 2462 bp, Zea Mays
gggcggcggccaggcgctgtctcgttccgcccaccaaccccgttcccacatcaaccgccgagatcgtttccgtcctgtaaaccaacgaccgatcgtgcgcgaacgtttattaataacgctcctccgccgcgacgcaacctactcctccctcccctcctctgctttccccccatttcgcgtctcggggtttggaccagccacccggcggaggcggccgggcagactgggccgagcgaccggagcgccgccgccatcggcaaagccacgggacggcccatggagtcgcgagcgctcctgcacgcccggcccgccgccctccctcaccgcgccggcctgcgcctccatctcccgctcctgcgcccgcgtgcagtctcccgctcccccgccgccaagcccgcgctccagtccccgctcctcgcgtcgaggggccccttccttcaacggcacgatgcggttctgggcaacgggttcgtgaaacggagagcggccagcgctggcggtgatgtgtccttccgcgcccaggcggcggcctcggcggcggtgccggcgccgcagccggaggagtccacaaaaaagctccttggcatcgacgtgaagacgctcaagaagatcgtgccgttggggctcatgttcttctgcatcctcttcaactacaccatcctgcgggacaccaaggacgtgctggtggtcactgccaaggggagcagcgccgagatcatccctttcctcaagacctgggttaacctgcccatggccatcggtttcatgctcctgtacaccaagctttccaacgttctctcacgggatgcgctcttctacaccgtcatcttcccgttcatcgccttcttcggcgccttcgcctttgtgctctacccgctcagggacgtcatccatcccaccgcgctcgcggacaagcttctcgccgcgctcggtccgagcttccttggtccggtggcgatactgaggatttggagcttctgcttgttctatgttatggctgagctctggggcagcgtcgtcatctctgtgctcttctgggggttcgctaatcagattaccacagttgatgaagcaaaggaattctacccgttatttggccttggggctaatattgctcttatcttttctgggcgtactgtgaagtatttctcaaatttgcgcaggacattgggtcctggaattgatggctgggaagtatctttgaaaggaatgatgagcatagtggtactccttggacttgtcataacttccatctattggggagtgaacaagtttgttttgaatgatccttcacttccaaaggctgatcgtaagaagaaaaaggaaaagcctaaacttggcatgaaagagagtctgaaggttctgctctcctcgaggtatgtgagggatctagctaccctagtggttgcttatggcattagtatcaatcttgtcgaagtcacgtggaaatcaaaactcaaggcacagttccctagtccaaatgaatattcatctttcatgggtgatttctcgactgcaactggaattgcaactttcacaatgatgctgttaggccgtattatactacggaaatttggctggggtgtggctgcaaagatcacccccaccgttctgttgctgactggtgttggattcttctctctgattttgtttggacagccactgactcctatgcttgccactatgggtatgacccccctactggcagccgtttatgtgggtgccatgcagaacatatttagcaagagtgcaaagtacagtttatttgacccatgcaaggaaatggcatatatccctttggatgaagatatgaaggtaaaaggaaaggcagccattgatgttgtctgcaacccactgggcaagtcgggcggcgcacttatccaacagttcatgatcctgacgttcggatccctggcaaattcgactccataccttgggggcatactcctggtcatcgttctcgcgtggctaggcgcggcgagctcattggacaagcagttctcgagcctggctaagcaagacatggagagggagaaggctgcccaagaccaagggaaactagaacgctcgctactcagtaagcctgcagaaggcggcactggtgatgtactggtggagcagcagacaaatgggtcggcgacgagcaaagctactggaacagagagctcgccatcgaactcatccctccctccccccccccccccccccccccccccccccaattcaatagatcgtagttaggagagtgattacagcgagcagaaatagtcggcatttaaaataattcgtggctttcgagtttgtaacagcgtgcggcttcaagcctgcccgtaatcttcctttgtaataataacatgagcaaaatcttgacagccggcagcgaatgtcgctctggagatggcaaatgtgtgttttgaactgaatggtaaatgtgcggttatctcttgaatagtatcttggct

SEQ ID NO: 204368 - DNA, 1436 bp, Zea Mays
tttgttcgtgccttcacgggataatggattaccacagttgatgaagcaaaggaattctacccgttatttggccttggggctaatattgctcttatcttttctgggcgtactgtgaagtatttctcaaatttgcgcaggacattgggtcctggaattgatggctgggaagtatctttgaaaggaatgatgagcatagtggtactccttggacttgtcataacttccatctattggggagtgaacaagtttgttttgaatgatccttcacttccaaaggctgatcgtaagaagaaaaaggaaaagcctaaacttggcatgaaagagagtctgaaggttctgctctcctcgaggtatgtgagggatctagctaccctagtggttgcttatggcattagtatcaatcttgtcgaagtcacgtggaaatcaaaactcaaggcacagttccctagtccaaatgaatattcatctttcatgggtgatttctcgactgcaactggaattgcaactttcacaatgatgctgttaggccgtattatactacggaaatttggctggggtgtggctgcaaagatcacccccaccgttctgttgctgactggtgttggattcttctctctgattttgtttggacagccactgactcctatgcttgccactatgggtatgacccccctactggcagccgtttatgtgggtgccatgcagaacatatttagcaagagtgcaaagtacagtttatttgacccatgcaaggaaatggcatatatccctttggatgaagatatgaaggtaaaaggaaaggcagccattgatgttgtctgcaacccactgggcaagtcgggcggcgcacttatccaacagttcatgatcctgacgttcggatccctggcaaattcgactccataccttgggggcatactcctggtcatcgttctcgcgtggctaggcgcggcgagctcattggacaagcagttctcgagcctggctaagcaagacatggagagggagaaggctgcccaagaccaagggaaactagaacgctcgctactcagtaagcctgcagaaggcggcactggtgatgtactggtggagcagcagacaaatgggtcggcgacgagcaaagctactggaacagagagctcgccatcgaactcatccctccctccccccccccccccccccccccccccccccaattcaatagatcgtagttaggagagtgattacagcgagcagaaatagtcggcatttaaaataattcgtggctttcgagtttgtaacagcgtgcggcttcaagcctgcccgtaatcttcctttgtaataataacatgagcaaaatcttgacagccggcagcgaatgtcgctctggagatggcaaatgtgtgttttgaactgaatggtaaatgtgcggttatctcttgaatagtatcttggct

SEQ ID NO: 204369 - DNA, 1118 bp, Zea Mays
ttaggatgcatctttgtcatcagcaagagtagctaaggagttctgctttgctgctagggatgttttgctcctttatagggctattgtgccggttcagctagagaagcaatttgatagcttaagtcaagtggctgctattgttcacaatgacttttaccatttgtcccaagaaattctgggccttgcatttcagtaccgtgcagattttcctagtgatctacagaaacaggttgtttttgtggatttagccccaatcttctccctgatggcgaatgctatattgagaagacaaatacaactcactgttgatactataagctatagatggtgctgaaggttttcagaacacacaccaacctcagcattatgaatccgcaaaatttagtattgagcaggtcgtgtttattttggaaaagatacgcatcatgtgggaatcgatactgccaagatcaatttacaggaaaagtatgtgcaatgtccttgggtctgtcttctctagaattacgagggatatgcttctgatagatgacatggcagcagaagagacattgcagctgcaaggccttatacatttggctctggaaaacctctcttcactatttctttccctggttgagaacaacgatgggagcacaaagtccttagaccatgacgcttggattcaattggatggaattctaccatctttgaaaaagttctgcaagctagcagagttgcttgatatgtcattgaagtccatcgcaacatgttgggaaagtggagacctagttagatgtggtttcacatcatctgaggtgcagaatttcatcaaagcaatattcgctgactcgcctcttaggaaggagtgcctaggatggatcgttaggactccagcttagaatacagaaacagcatatttctgtctgtgggtcaatgattttttttcatattcttttgtccaccataccatatagtgaagtattatttggtatgagcccagtttgcactggagacagacttgcaatctgactccccagttcaatactcaccccactgcctggaccgtgactgttcagataaggctagcaattgtgcatgttaatgtgttattattgtctttttggtattgtgacattccc

SEQ ID NO: 204370 - DNA, 1094 bp, Zea Mays
caccgttccatttttagtgttcattagctgtaaatttctattggatgaggatttgatgcacatctatttaggatgcatctttgtcatcagcaagagtagctaaggagttctgctttgctgctagggatgttttgctcctttatagggctattgtgccggttcagtaccgtgcagattttcctagtgatctacagaaacaggttgtttttgtggatttagccccaatcttctccctgatggcgaatgctatattgagaagacaaatacaactcactgttgatactataagtgaggctatagatggtgctgaaggttttcagaacacacaccaacctcagcattatgaatccgcaaaatttagtattgagcaggtcgtgtttattttggaaaagatacgcatcatgtgggaatcgatactgccaagatcaatttacaggaaaagtatgtgcaatgtccttgggtctgtcttctctagaattacgagggatatgcttctgatagatgacatggcagcagaagagacattgcagctgcaaggccttatacatttggctctggaaaacctctcttcactatttctttccctggttgagaacaacgatgggagcacaaagtccttagaccatgacgcttggattcaattggatggaattctaccatctttgaaaaagttctgcaagctagcagagttgcttgatatgtcattgaagtccatcgcaacatgttgggaaagtggagacctagttagatgtggtttcacatcatctgaggtgcagaatttcatcaaagcaatattcgctgactcgcctcttaggaaggagtgcctaggatggatcgttaggactccagcttagaatacagaaacagcatatttctgtctgtgggtcaatgattttttttcatattcttttgtccaccataccatatagtgaagtattatttggtatgagcccagtttgcactggagacagacttgcaatctgactccccagttcaatactcaccccactgcctggaccgtgactgttcagataaggctagcaattgtgcatgttaatgtgttattattgtctttttggtattgtgacattccc

SEQ ID NO: 204371 - DNA, 980 bp, Zea Mays
cttatgagcactcggatgatgaggaatagaggagcatttggctcgtcagcgcatttcaaagcgagaagttgataataatacattgatatccccattagaagatgacaactcaagggaggtatttagtctaataaagaagctcaatattgctcctaaacctaagatgagaggaaagcaatcaacatcaaatcatgaaatgcttatggctggaaggaacaccattgcttcaaagtcatcgtttcttggacgaacagccagtggttcactggcatcttctcacagatcagtctatagatcctatgtatttggtcgtgatgacagcaatagcagcagtaggagctgcatttctacttcagagagtaatttagatctggatcagaccaattcctctcaacccaagaaggccaagttcagttcacagccgaaaccagaggggacaagggcaactccagagtgtaacacgagttcaggtgtttccctcttcgacgtcctgcgcaggacttcagagcagagcagtcaggaaagctgtagcacaatcacagaaagtcaagctgtgcaccagttctcggcattcaagttatcaaggaggttttccaaggtgggttcaaaaaattgacaaactctagatggctgttagtatcgagagggttactgttggagcttatggggcaacgcgttgagttagtttcgagcttcaaaccgccaaaatgttccggattgcaccatgagcgccaggtgttttatgcacgaactgagaatgctgagacctggccctgttgtagattatgaaacccagaatcttgttgtgtgtactcgtatgctcttgagaacgcacgctgagtttcctgagatgtttaaagtggagtgtaatgtttgcttattctctctgcattgtctcatgagataggtagatgttgtaaggcttttaccaaaaccaaatgttcgaaatattagatgtaaccatacattctgttcatgga

SEQ ID NO: 204372 - DNA, 2544 bp, Zea Mays
cacccatcctcattcccgttcgcctcgccgctccccgacctcgactcgccgaaatcccgggaggagaggacgcgggcggcgctatggacacggagccgttcgacgaggcggagctcctggcgctcccaccgtcccccgtcgcgtccccgcctcgtcgcctcaagcgtctcaagaaatcctcctcccaagccaccgccaccaccgccactaccaccagccctcatgtcggctccccgcctccgcctttgtcgcctccgcctccgccgctgctggcggaggcgacgccgggcgaggaaaccctggcgttcccttcccgcgacacctccccacacccgccgacgccgccagatgcggatgccccgactccgctaccgcatccctctcccgcccccgtgtcgccgccgctgcagccgaccgtcacccccgacaacgacagcgacgaggaggacgacgggctcgacccgctgttctccggggccgccggcgtcgcgcagtgggacccgctgggcgcgccggccgaaggggacggtgagggcgacgacgacgacgacggactggggggcggcggcctcatcgaggagctacggagggaacagaggtctgcgaagaagcgtctcgacatggacgaagcggacggggaggtggcttcgggtgcgggggcgagggcggaggcaaaggggaagaggagcaagaggaagaggaaagaggaggcaccgaccatggagtcggcccgggagaagaagcgatctgagaaggaaaggagggcgcagcttgattcgatccatgccgagtcacagaggctgctgcgggagacgaggaaggcgtcgttcaaaccaactgtgcagccagttcacaagcccatctcatctgtcctggagaagatccgccttcgtaagatggaggttctgaagaaatcaaatacttctattgaagacagtgatgacaatgatgctgttccggagccagtggttgatttggctgagcaattggatgtgcctcagtctaaagaagtggcacttgataaagacttgaggattgatggcgctgaaaaggagcttggagcaaatggccacagccttgatcggtgtgatagtgttcaagaggatgaggatggtttgagttgcaaggagaaatatctctataactgtggtaccaaagcttcagatgaggaattttctgatagattgcaagagaatcacgagaacacccagccaagtaataatcataacgattcagtagatcagagtcaactgcccccttcttcaagccctactgagagtacagatgaaatttcatcagaagacgaagaaaataatgataaagagaacatggatccaagcgctcagaataatgatgtacatactcttgaacacctccaacaagccatcggaggaaactcacgtccagatgatgctatcttaaaggattttctagatgatgaagctgaggaagaggatgatagtgacaatgacatgactagatttaaggacaatgaagaagatgatggaagcgatgaaaacgaggtgttcaatgacctaatagcagctggttatgaagaaaaagaagtagatcacgagaagcgtaatgaactccaccaaaagtggcttcaacaacaggatgctgctgaaacaaataatgttgataataatacattgatatccccattagaagatgacaactcaagggaggtatttagtctaataaagaagctcaatattgctcctaaacctaagatgagaggaaagcaatcaacatcaaatcatgaaatgcttatggctggaaggaacaccattgcttcaaagtcatcgtttcttggacgaacagccagtggttcactggcatcttctcacagatcagtctatagatcctatgtatttggtcgtgatgacagcaatagcagcagtaggagctgcatttctacttcagagagtaatttagatctgaccaattcctctcaacccaagaaggccaagttcagttcacagccgaaaccagaggggacaagggcaactccagagtgtaacacgagttcaggtgtttccctcttcgacgtcctgcgcaggacttcagagcagagcagtcaggaaagctgtagcacaatcacagaaagtcaagctgtgcaccagttctcggcattcaagttatcaaggaggttttccaaggtgggttcaaaaaattgacaaactctagatggctgttagtatcgagagggttactgttggagcttatggggcaacgcgttgagttagtttcgagcttcaaaccgccaaaatgttccggattgcaccatgagcgccaggtgttttatgcacgaactgagaatgctgagacctggccctgttgtagattatgaaacccagaatcttgttgtgtgtactcgtatgctcttgagaacgcacgctgagtttcctgagatgtttaaagtggagtgtaatgtttgcttattctctctgcattgtctcatgagataggtagatgttgtaaggcttttaccaaaaccaaatgttcgaaatattagatgtaaccatacattctgttcatgga

SEQ ID NO: 204373 - DNA, 2575 bp, Zea Mays
caatccacccatcctcattcccgttcgcctcgccgctccccgacctcgactcgccgaaatcccgggaggagaggacgcgggcggcgctatggacacggagccgttcgacgaggcggagctcctggcgctcccaccgtcccccgtcgcgtccccgcctcgtcgcctcaagcgtctcaagaaatcctcctcccaagccaccgccaccaccgccactaccaccagccctcatgtcggctccccgcctccgcctttgtcgcctccgcctccgccgctgctggcggaggcgacgccgggcgaggaaaccctggcgttcccttcccgcgacacctccccacacccgccgacgccgccagatgcggatgccccgactccgctaccgcatccctctcccgcccccgtgtcgccgccgctgcagccgaccgtcacccccgacaacgacagcgacgaggaggacgacgggctcgacccgctgttctccggggccgccggcgtcgcgcagtgggacccgctgggcgcgccggccgaaggggacggtgagggcgacgacgacgacgacggactggggggcggcggcctcatcgaggagctacggagggaacagaggtctgcgaagaagcgtctcgacatggacgaagcggacggggaggtggcttcgggtgcgggggcgagggcggaggcaaaggggaagaggagcaagaggaagaggaaagaggaggcaccgaccatggagtcggcccgggagaagaagcgatctgagaaggaaaggagggcgcagcttgattcgatccatgccgagtcacagaggctgctgcgggagacgaggaaggcgtcgttcaaaccaactgtgcagccagttcacaagcccatctcatctgtcctggagaagatccgccttcgtaagatggaggttctgaagaagtacagatttttctctctgagatcaaatacttctattgaagacagtgatgacaatgatgctgttccggagccagtggttgatttggctgagcaattggatgtgcctcagtctaaagaagtggcacttgataaagacttgaggattgatggcgctgaaaaggagcttggagcaaatggccacagccttgatcggtgtgatagtgttcaagaggatgaggatggtttgagttgcaaggagaaatatctctataactgtggtaccaaagcttcagatgaggaattttctgatagattgcaagagaatcacgagaacacccagccaagtaataatcataacgattcagtagatcagagtcaactgcccccttcttcaagccctactgagagtacagatgaaatttcatcagaagacgaagaaaataatgataaagagaacatggatccaagcgctcagaataatgatgtacatactcttgaacacctccaacaagccatcggaggaaactcacgtccagatgatgctatcttaaaggattttctagatgatgaagctgaggaagaggatgatagtgacaatgacatgactagatttaaggacaatgaagaagatgatggaagcgatgaaaacgaggtgttcaatgacctaatagcagctggttatgaagaaaaagaagtagatcacgagaagcgtaatgaactccaccaaaagtggcttcaacaacaggatgctgctgaaacaaataagttgataataatacattgatatccccattagaagatgacaactcaagggaggtatttagtctaataaagaagctcaatattgctcctaaacctaagatgagaggaaagcaatcaacatcaaatcatgaaatgcttatggctggaaggaacaccattgcttcaaagtcatcgtttcttggacgaacagccagtggttcactggcatcttctcacagatcagtctatagatcctatgtatttggtcgtgatgacagcaatagcagcagtaggagctgcatttctacttcagagagtaatttagatctggatcagaccaattcctctcaacccaagaaggccaagttcagttcacagccgaaaccagaggggacaagggcaactccagagtgtaacacgagttcaggtgtttccctcttcgacgtcctgcgcaggacttcagagcagagcagtcaggaaagctgtagcacaatcacagaaagtcaagctgtgcaccagttctcggcattcaagttatcaaggaggttttccaaggtgggttcaaaaaattgacaaactctagatggctgttagtatcgagagggttactgttggagcttatggggcaacgcgttgagttagtttcgagcttcaaaccgccaaaatgttccggattgcaccatgagcgccaggtgttttatgcacgaactgagaatgctgagacctggccctgttgtagattatgaaacccagaatcttgttgtgtgtactcgtatgctcttgagaacgcacgctgagtttcctgagatgtttaaagtggagtgtaatgtttgcttattctctctgcattgtctcatgagataggtagatgttgtaaggcttttaccaaaaccaaatgttcgaaatattagatgtaaccatacattctgttcatgga

SEQ ID NO: 204374 - DNA, 2555 bp, Zea Mays
caatccacccatcctcattcccgttcgcctcgccgctccccgacctcgactcgccgaaatcccgggaggagaggacgcgggcggcgctatggacacggagccgttcgacgaggcggagctcctggcgctcccaccgtcccccgtcgcgtccccgcctcgtcgcctcaagcgtctcaagaaatcctcctcccaagccaccgccaccaccgccactaccaccagccctcatgtcggctccccgcctccgcctttgtcgcctccgcctccgccgctgctggcggaggcgacgccgggcgaggaaaccctggcgttcccttcccgcgacacctccccacacccgccgacgccgccagatgcggatgccccgactccgctaccgcatccctctcccgcccccgtgtcgccgccgctgcagccgaccgtcacccccgacaacgacagcgacgaggaggacgacgggctcgacccgctgttctccggggccgccggcgtcgcgcagtgggacccgctgggcgcgccggccgaaggggacggtgagggcgacgacgacgacgacggactggggggcggcggcctcatcgaggagctacggagggaacagaggtctgcgaagaagcgtctcgacatggacgaagcggacggggaggtggcttcgggtgcgggggcgagggcggaggcaaaggggaagaggagcaagaggaagaggaaagaggaggcaccgaccatggagtcggcccgggagaagaagcgatctgagaaggaaaggagggcgcagcttgattcgatccatgccgagtcacagaggctgctgcgggagacgaggaaggcgtcgttcaaaccaactgtgcagccagttcacaagcccatctcatctgtcctggagaagatccgccttcgtaagatggaggttctgaagaaatcaaatacttctattgaagacagtgatgacaatgatgctgttccggagccagtggttgatttggctgagcaattggatgtgcctcagtctaaagaagtggcacttgataaagacttgaggattgatggcgctgaaaaggagcttggagcaaatggccacagccttgatcggtgtgatagtgttcaagaggatgaggatggtttgagttgcaaggagaaatatctctataactgtggtaccaaagcttcagatgaggaattttctgatagattgcaagagaatcacgagaacacccagccaagtaataatcataacgattcagtagatcagagtcaactgcccccttcttcaagccctactgagagtacagatgaaatttcatcagaagacgaagaaaataatgataaagagaacatggatccaagcgctcagaataatgatgtacatactcttgaacacctccaacaagccatcggaggaaactcacgtccagatgatgctatcttaaaggattttctagatgatgaagctgaggaagaggatgatagtgacaatgacatgactagatttaaggacaatgaagaagatgatggaagcgatgaaaacgaggtgttcaatgacctaatagcagctggttatgaagaaaaagaagtagatcacgagaagcgtaatgaactccaccaaaagtggcttcaacaacaggatgctgctgaaacaaataatgttgataataatacattgatatccccattagaagatgacaactcaagggaggtatttagtctaataaagaagctcaatattgctcctaaacctaagatgagaggaaagcaatcaacatcaaatcatgaaatgcttatggctggaaggaacaccattgcttcaaagtcatcgtttcttggacgaacagccagtggttcactggcatcttctcacagatcagtctatagatcctatgtatttggtcgtgatgacagcaatagcagcagtaggagctgcatttctacttcagagagtaatttagatctggatcagaccaattcctctcaacccaagaaggccaagttcagttcacagccgaaaccagaggggacaagggcaactccagagtgtaacacgagttcaggtgtttccctcttcgacgtcctgcgcaggacttcagagcagagcagtcaggaaagctgtagcacaatcacagaaagtcaagctgtgcaccagttctcggcattcaagttatcaaggaggttttccaaggtgggttcaaaaaattgacaaactctagatggctgttagtatcgagagggttactgttggagcttatggggcaacgcgttgagttagtttcgagcttcaaaccgccaaaatgttccggattgcaccatgagcgccaggtgttttatgcacgaactgagaatgctgagacctggccctgttgtagattatgaaacccagaatcttgttgtgtgtactcgtatgctcttgagaacgcacgctgagtttcctgagatgtttaaagtggagtgtaatgtttgcttattctctctgcattgtctcatgagataggtagatgttgtaaggcttttaccaaaaccaaatgttcgaaatattagatgtaaccatacattctgttcatgga

SEQ ID NO: 204375 - DNA, 1663 bp, Zea Mays
agatattattaattaacgggcaagtgggcatggccgagtttctggaggcttcctgcgtcgcgtggaggcagacagagctcagggagggagggaggggaagaacgaagcagcagcaacagcgccatccgctcgcttccttccccttctctccctcctcccccaccgccggcgtcgcctctacgcgcgcgcgccccgccgggggctgccgtcgctgcacccgtggcccgtgggcggcggccgcgtacctgtacctacgtgctgccgggggggggggggggggggggagctacgcgtctcctctcgccatggacgccggtgtagagaagtgcggcgacgcggcggcggagggcggcggcgacctctacgctgtcctcgggctcaagaaggagtgctccgacgccgacctcaaggtcgcttaccggaagctcgccaagaaatggcacccggacaaatgctcctcctcctccatcagcgtgaagcacatggaggaagccaaggagaagttccaagagatccagggcgcctattcggtactctccgacgccaataaacggctcctctacgatgtgggagtatatgatgacgaggacgacgaggatagcatgcaggggatgggggacttcattggtgagatgacccagatgatgagccaggtgcggccgatgggcaggaaagctttgaggagctgcagcagctttttgtcgacatgttccagtctgatattgattcaggattctgcaatgggactgctaagggccatcaggttcaggggcaagccaaaagtagaacatgctcaccacggtcccctcctactactatagtaaaggaggcagaggtgtcatcatgtaatggcttcaataagcggggttcatcagcaatggactcaggaaagcctccaaggcctgttgaatgtggtgcaggtcagagccaggctggattttgttttggggtgagcgacacgccaaagccgcgaggtccgaacgccaaccggaagaggaacggccggaaacagaagctgttccccaagcactacgttacatccgaagatgatacggccggttcctagcatcagcagcacggtagcagtttgaccgttggctttggtgatgtcagcagtagggagggcacatcatgtcgcctctgccagctgctgtgatctgaagaggcgtttagctcatcatatgcctttagtcttttgagaggtctttagggttgaaaggtacttcgaaaaccgaaccagcgtctacaggcctaagagggatttccattgaaactcgtcgatgatactacagttttctttccccatctgtgccggttgtgttgtactaccactaccagtgacagtgagtgacttctaagctattcatttttttaactggagaagttgataccatgataattaaaaaaaattgggtgtgtattgaactattaccaagaaaatagtacttggattgtgatgttctgaacattatgttttgtaggcaatcgtgacttgaaagcggtcgaggtatatcttgttattttgtttccctccgatttttcaatatccgattgattttgttttgaagcaaatagagagcatgtccgtgagaatagtcatgaagcaaatagagaacatgtccgtgagaattgtcggttaatataatttttagtttttaatttg

SEQ ID NO: 204376 - DNA, 1242 bp, Zea Mays
ctggaggcttcctgcgtcgcgtggaggcagacagagctcagggagggagggaggggaagaacgaagcagcagcaacagcgccatccgctcgcttccttccccttctctccctcctcccccaccgccggcgtcgcctctacgcgcgcgcgccccgccgggggctgccgtcgctgcacccgtggcccgtgggcggcggccgcgtacctgtacctacgtgctgccgggggggggggggggggggggagctacgcgtctcctctcgccatggacgccggtgtagagaagtgcggcgacgcggcggcggagggcggcggcgacctctacgctgtcctcgggctcaagaaggagtgctccgacgccgacctcaaggtcgcttaccggaagctcgccaagtactctccgacgccaataaacggctcctctacgatgtgggagtatatgatgacgaggacgacgaggatagcatgcaggggatgggggacttcattggtgagatgacccagatgatgagccaggtgcggccgatgaggcaggaaagctttgaggagctgcagcagctttttgtcgacatgttccagtctgatattgattcaggattctgcaatgggactgctaagggccatcaggttcaggggcaagccaaaagtagaacatgctcaccacggtcccctcctactactatagtaaaggaggcagaggtgtcatcatgtaatggcttcaataagcggggttcatcagcaatggactcaggaaagcctccaaggcctgttgaatgtggtgcaggtcagagccaggctggattttgttttgggcttgcttctgacgaacggtcatgcaattgaccaaacatgtaccataagcaaatgtgatgtaggagattgttatgtaaagagacttttgtggccactttgatgttttgttttatgcgtaccttttttgaaaaaaaaaatgattgtggtgctatgtgagtgcctttttctcatcataattttaggcgtctgtagattcacttgagaagtatgaagtccctaggtggttattaaaagaagttagcagctatgtaaaagttagctacagtggcgagtctttaagtgctgatattccttgatagtatgctcatgtgttcacgtcatttttctgttactctctattactgcttcctgtgttgtgaaatatattattttgccctggtgtatttggtatttataaggtttatgaagaaacagaaattcagcatggctg

SEQ ID NO: 204377 - DNA, 1327 bp, Zea Mays
ctggaggcttcctgcgtcgcgtggaggcagacagagctcagggagggagggaggggaagaacgaagcagcagcaacagcgccatccgctcgcttccttccccttctctccctcctcccccaccgccggcgtcgcctctacgcgcgcgcgccccgccgggggctgccgtcgctgcacccgtggcccgtgggcggcggccgcgtacctgtacctacgtgctgccgggggggggggggggggggggagctacgcgtctcctctcgccatggacgccggtgtagagaagtgcggcgacgcggcggcggagggcggcggcgacctctacgctgtcctcgggctcaagaaggagtgctccgacgccgacctcaaggtcgcttaccggaagctcgccaagaaatggcacccggacaaatgctcctcctcctccatcagcgtgaagcacatggaggaagccaaggagaagttccaagagatccagggcgcctattcggtactctccgacgccaataaacggctcctctacgatgtgggagtatatgatgacgaggacgacgaggatagcatgcaggggatgggggacttcattggtgagatgacccagatgatgagccagaggcaggaaagctttgaggagctgcagcagctttttgtcgacatgttccagtctgatattgattcaggattctgcaatgggactgctaagggccatcaggttcaggggcaagccaaaagtagaacatgctcaccacggtcccctcctactactatagtaaaggaggcagaggtgtcatcatgtaatggcttcaataagcggggttcatcagcaatggactcaggaaagcctccaaggcctgttgaatgtggtgcaggtcagagccaggctggattttgttttgggcttgcttctgacgaacggtcatgcaattgaccaaacatgtaccataagcaaatgtgatgtaggagattgttatgtaaagagacttttgtggccactttgatgttttgttttatgcgtaccttttttgaaaaaaaaaatgattgtggtgctatgtgagtgcctttttctcatcataattttaggcgtctgtagattcacttgagaagtatgaagtccctaggtggttattaaaagaagttagcagctatgtaaaagttagctacagtggcgagtctttaagtgctgatattccttgatagtatgctcatgtgttcacgtcatttttctgttactctctattactgcttcctgtgttgtgaaatatattattttgccctggtgtatttggtatttataaggtttatgaagaaacagaaattcagcatggctg

SEQ ID NO: 204378 - DNA, 1417 bp, Zea Mays
ctggaggcttcctgcgtcgcgtggaggcagacagagctcagggagggagggaggggaagaacgaagcagcagcaacagcgccatccgctcgcttccttccccttctctccctcctcccccaccgccggcgtcgcctctacgcgcgcgcgccccgccgggggctgccgtcgctgcacccgtggcccgtgggcggcggccgcgtacctgtacctacgtgctgccgggggggggggggggggggggagctacgcgtctcctctcgccatggacgccggtgtagagaagtgcggcgacgcggcggcggagggcggcggcgacctctacgctgtcctcgggctcaagaaggagtgctccgacgccgacctcaaggtcgcttaccggaagctcgccaagaaatggcacccggacaaatgctcctcctcctccatcagcgtgaagcacatggaggaagccaaggagaagttccaagagatccagggcgcctattcggtactctccgacgccaataaacggctcctctacgatgtgggagtatatgatgacgaggacgacgaggatagcatgcaggggatgggggacttcattggtgagatgacccagatgatgagccaggtgcggccgatggcttaaaaaagacggaattgttatgaaagctccttatcctccatggttttttgtggatactaaaagctgaacttttagaggcaggaaagctttgaggagctgcagcagctttttgtcgacatgttccagtctgatattgattcaggattctgcaatgggactgctaagggccatcaggttcaggggcaagccaaaagtagaacatgctcaccacggtcccctcctactactatagtaaaggaggcagaggtgtcatcatgtaatggcttcaataagcggggttcatcagcaatggactcaggaaagcctccaaggcctgttgaatgtggtgcaggtcagagccaggctggattttgttttgggcttgcttctgacgaacggtcatgcaattgaccaaacatgtaccataagcaaatgtgatgtaggagattgttatgtaaagagacttttgtggccactttgatgttttgttttatgcgtaccttttttgaaaaaaaaaatgattgtggtgctatgtgagtgcctttttctcatcataattttaggcgtctgtagattcacttgagaagtatgaagtccctaggtggttattaaaagaagttagcagctatgtaaaagttagctacagtggcgagtctttaagtgctgatattccttgatagtatgctcatgtgttcacgtcatttttctgttactctctattactgcttcctgtgttgtgaaatatattattttgccctggtgtatttggtatttataaggtttatgaagaaacagaaattcagcatggctg

SEQ ID NO: 204379 - DNA, 1557 bp, Zea Mays
ctggaggcttcctgcgtcgcgtggaggcagacagagctcagggagggagggaggggaagaacgaagcagcagcaacagcgccatccgctcgcttccttccccttctctccctcctcccccaccgccggcgtcgcctctacgcgcgcgcgccccgccgggggctgccgtcgctgcacccgtggcccgtgggcggcggccgcgtacctgtacctacgtgctgccgggggggggggggggggggggagctacgcgtctcctctcgccatggacgccggtgtagagaagtgcggcgacgcggcggcggagggcggcggcgacctctacgctgtcctcgggctcaagaaggagtgctccgacgccgacctcaaggtcgcttaccggaagctcgccaagaaatggcacccggacaaatgctcctcctcctccatcagcgtgaagcacatggaggaagccaaggagaagttccaagagatccagggcgcctattcggtactctccgacgccaataaacggctcctctacgatgtgggagtatatgatgacgaggacgacgaggatagcgggatgggggacttcattggtgagatgacccagatgatgagccaggtgcggccgatggcttaaaaaagacggaattgttatgaaagctccttatcctccatggttttttgtggatactaaaagctgaacttttagaggcaggaaagctttgaggagctgcagcagctttttgtcgacatgttccagtctgatattgattcaggattctgcaatgggactgctaagggccatcaggttcaggggcaagccaaaagtagaacatgctcaccacggtcccctcctactactatagtaaaggaggcagaggtgtcatcatgtaatggcttcaataagcggggttcatcagcaatggactcaggaaagcctccaaggcctgttgaatgtggtgcaggtcagagccaggctggattttgttttggggtgagcgacacgccaaagccgcgaggtccgaacgccaaccggaagaggaacggccggaaacagaagctgttccccaagcactacgttacatccgaagatgatacggccggttcctagcatcagcagcacggtagcagtttgaccgttggctttggtgatgtcagcagtagggagggcacatcatgtcgcctctgccagctgctgtgatctgaagaggcgtttagctcatcatatgcctttagtcttttgagaggtctttagggttgaaaggtacttcgaaaaccgaaccagcgtctacaggcctaagagggatttccattgaaactcgtcgatgatactacagttttctttccccatctgtgccggttgtgttgtactaccactaccagtgacagcaatcgtgacttgaaagcggtcgaggtatatcttgttattttgtttccctccgatttttcaatatccgattgattttgttttgaagcaaatagagagcatgtccgtgagaatagtcatgaagcaaatagagaacatgtccgtgagaattgtcggttaatataatttttagtttttaatttg

SEQ ID NO: 204380 - DNA, 1603 bp, Zea Mays
atttcatagtgaccattagtggaggcagcacaagctggatgcctttgtcctctgccgtgttactaaaagaaatgactggtcattagataatgataatgaggtgggcaacaggagctctcatctggaacaaccagatgctgctacatcagttgtcagcactgtaaagccagaagatgttgctgcctcagtcatctgtccagaagaatcgaaccatgcaactacaccaattggcagtgctgaactatctaatgatgttgctcaggcagctatcactcctgcagctatcactcctgattcaacaactccaaatggtggtaatgaactggaaacatggctgcaagaactgttggatccttcacctccatttaaccttgtagctgatactggttctgctgacgtgtgtccgactgaacaatatgctgaatcatcaaatttgcagaatcctggttccatggctccgaatatcagaccaggccatgctagccctatccaggatggaacagatgccacagactacctattcacagatgatcttcccgaggatctttacagtatgttgtatcctggtactgaccagttcaatgatagcatatttttggaacaaactggccaggaaggtaataacaatcagacaaactacatgatggggattggttcatatgttcttccaaacaactttgagaatgaaactccgaatgccgaattgcagttagatcatgaaaataacaagatggatatgtcaaatgaaaataatgacaccggaattacaatacgaaggcgcagagcaactgcgcctcccgctaacatttcactagcagctggcaagattaaaatgcaggttggaattaagaggatggttacgagtaattcagaatctatcaaccagactatgaagtttacagataacagtggtcgtcgtcttgatctcaggactgatgttgagcaccagaagaaaaatgcaaacaatgtcatttctgccaagcagtctgatgcagccaatcatgaagcccacagcaaccaaggttatctcgagggcttcaaaagatgttcatcagctggattcagggcatacatatttgttgccctttttgtggttggagttgctgctctagtgctgcattatcaccgctccaatgccaacctatgaatttgaatcatggaacatcagcatgcttgattgtagctctagtggtcagtggcagcattggcttcgtccttggagtagttcgctagctttgcttgcattggaaatggaatagaaatcgagttcctcagcttatctcactgggattactggaaatacatttttgcgaccactgattcccagttatctccactttttttttgtggtgctgtacatattaattttttttctctcttcttttgatcgtctagttgctaccaacgggtgcctatcgaaaatcgaaaaagaaaaaaagtgggaaaagggttggtcgtatgaacaaaaaagatgtagcttcagactgttactactatccttagctttgtaaatctgaaccatgtttgtacagtacactacatagtggagcggccactgcattgtctgcattctcttttattatagcatctttttgaacaagtg

SEQ ID NO: 204381 - DNA, 3604 bp, Zea Mays
aattccaattttctcctacctaccactgccggactgcggaatccggaggtatatccgcaaaacccaaggagaacccccacccgcttggctcgccatggacctgcagctcgcgccaccaccccacgctaacctccgcctcctcccccgccgccccaaggccgcctccgcctccgcctccacctccgctgtcaccgccgcgccctccacctcctgctcctcttccgcggagcccctcaagccccgcccacgcctcccgcgccagagccccgcgcccaggcccaggcccaaccccgctcgcctccccgccctctgcgctgccatcgagcggcacgcggcggctggccgccacgctgaggccctcgacctgttccgcctcgcccgcgcggcggctcccttcacgcccctcccggcccgcacctaccacgccctgctccgcgccgctgccgcgctgcgggagcccggcgcggccgcggcggtggcctggcacgtcgagagctccggcttcgagctcgacctgtacacgcacaaccacgtcctgaggatgtacctcgagtgcgggatgctcgccgaggcgcgccaggcgttcgacgggatgcccgaccggaacggcgtcacgtgggggatcatgatgggcggcctcgtcgaccggggccgcccccgggccgcactggcgctgttccgggagatgtgggcggaggccggtggggacgctccgccgaggtccctcgtggtggctgtccgtgcggctgcgtcctcggggtcggcgcgagccgggcggcagctgcactgctgtgttgtcaaggcgggggcgtgtggtgacgtcgctgaccggtacctgacgtgcgcgctgctcgacatgtacagcaagtgtggccggattgacgaggcgaggcgggtgtttgacgggctgccacgtcctcatcggacgactgtcgtggcatggaactccatgttggcggcgtatgttctccatggccacagcgaggaggcgctggagctgtaccaaaagatgtgcagcactcatgtcgccatggaccagttcacgttctcgaccatgctaggggtgttctctaggctggggctgctggagcacgcgaagcaggcgcacgctggcttgatccagagaggattgccactggacattgttgggaacacggcgcttgtggacctgtactgcaaatggggaagaatggaggacgcgagaaatgtcttcgagaggatgcctaggaggaacttgatctcatggaacgctctgatagctggatacggctaccatggcatgggagataaggcgatcgagatgttcgagaggctgatagctgagggtgctgtgccaaaccatgtaacttttctggcagtgctgaatgcatgtaggttttcaggtcttgttgacgaagggaagaggattttccagttgatgactgaaaatctgaggataaaaccacgggccatgcattatgcatgtgttattgagctttttggtagagaaggtctacttgatgaatcctattcaatgataagaagagcaccgttcactccaactgcaaacatgtggggagccttgcttactgctagcaggatccacaagagcatgcatcttgcaaaattttctgccgagcagctattggcaatggaacctgagaaaataaacagctatgttgtgctcctcaacttgtatgttagctctggtagacaggacagcgcctgcaaggtagttgaaacactgaagaggaaaggtttatatattggtaatgcctgtagctggatcacagtcaagaaaacggatcacaggtttttctttaaagatactttgcatccacaaagtgctgaaatatacaggaggctggacacattaatgaaggaggtacgagaagctggctttgttgctgaggagaatgaattgctccctgatattcatcctgacgagcaaaagatatcaagagcttaccacagtgagagactggcaattgcttttggccttatcagcacagccccacagactcccttgaggatcagtcaaagccatcgtttgtgcagtgactgccacaatttaattaagtttgtgtcaagagttaccaagagggaaatcattgttagggatggtagcaggttccaccactttaaactcggggtctgctcttgtggtgactactggtaattggctaatgactccaatgtttcaagccaattatctggaaattactttgattaatgaggataaagcagattggtcgaccatgatgctccaatgtttcagtgctacatgcaggcttggggcagaacgaatgttggaggctctcacatgagtagggtctagagaagggataaaccgaggcaaatctttccctgccaaatgcagagagactgcttcgaatccgtgacctggccatttagcgagacagctctccccacacaactaagcttgcccttctccttttcctgttaactgtcggcaaaaagttttagtgtctttattttgataagcaacatcttgcgtgcctttatctcggtagaaaagatggcttctgtgatgtgttcagtagaaatgtttttttatatgacaatcagatagattgcttttccctgcgcttccactctctttacaaaccttgtgtaaaagcagatctttaaaagtaggctgaatatgtgtcatgtcatgtggctttcacattggagataccaatccttaattgtgtcctataaggaaggaataaagctctgatgtaaacgaaggatcaaagggaagtataaaactttgagcatcttgggacagctagtttcttcttgcttcatgactgcatcctggtgatcttccattcagcaaccttctcagctggtacaagtccgagagcacgctacaatggcgaggatgggagttgctattctggtctgcgtagtggttttagccctggacgtcacagctggcatactaggaattgaggcgcaggctgctcagaacaagactaagaaggtgacgatcctcttcatccagtgcgagaaaccagtgtacagagcgtaccagcttggcctcgcagctgcagtgctcctggtagttgcccacgcggtagccaacttcctcggcggctgtgcctgcatctgctcccagctggagttcatcaaggcgtccatcaacaggaagctggcagccaccaccataattctctcatggatcgccctgattgccggattctcgctgctgctcgccggcgccatgtccaactccaagtccaagacgtcgtgcgggttcactcacggacacaccttggccctcggagggatcatgtgcttcgtccacggcgggatcaccgtcgcctactatgtcaccgccactgccgcagcgcacgaggttccttagtcgagcattttgcccgagagatcaccgctgttctttccttggtccagctgctccttgcttttctccttgtgatttgacatctacaagcatccgaagatatatgccttttttccgttcaaaaaaaaagaatacatgcctgttgtttgatttgttgctattgctgaggaaaaaacatgtcaaagttagcgtcagtgtgccacagtaatttaatttacgttgttgagaaagacaataacgccgctccatctt

SEQ ID NO: 204382 - DNA, 3073 bp, Zea Mays
aattccaattttctcctacctaccactgccggactgcggaatccggaggtatatccgcaaaacccaaggagaacccccacccgcttggctcgccatggacctgcagctcgcgccaccaccccacgctaacctccgcctcctcccccgccgccccaaggccgcctccgcctccgcctccacctccgctgtcaccgccgcgccctccacctcctgctcctcttccgcggagcccctcaagccccgcccacgcctcccgcgccagagccccgcgcccaggcccaggcccaaccccgctcgcctccccgccctctgcgctgccatcgagcggcacgcggcggctggccgccacgctgaggccctcgacctgttccgcctcgcccgcgcggcggctcccttcacgcccctcccggcccgcacctaccacgccctgctccgcgccgctgccgcgctgcgggagcccggcgcggccgcggcggtggcctggcacgtcgagagctccggcttcgagctcgacctgtacacgcacaaccacgtcctgaggatgtacctcgagtgcgggatgctcgccgaggcgcgccaggcgttcgacgggatgcccgaccggaacggcgtcacgtgggggatcatgatgggcggcctcgtcgaccggggccgcccccgggccgcactggcgctgttccgggagatgtgggcggaggccggtggggacgctccgccgaggtccctcgtggtggctgtccgtgcggctgcgtcctcggggtcggcgcgagccgggcggcagctgcactgctgtgttgtcaaggcgggggcgtgtggtgacgtcgctgaccggtacctgacgtgcgcgctgctcgacatgtacagcaagtgtggccggattgacgaggcgaggcgggtgtttgacgggctgccacgtcctcatcggacgactgtcgtggcatggaactccatgttggcggcgtatgttctccatggccacagcgaggaggcgctggagctgtaccaaaagatgtgcagcactcatgtcgccatggaccagttcacgttctcgaccatgctaggggtgttctctaggctggggctgctggagcacgcgaagcaggcgcacgctggcttgatccagagaggattgccactggacattgttgggaacacggcgcttgtggacctgtactgcaaatggggaagaatggaggacgcgagaaatgtcttcgagaggatgcctaggaggaacttgatctcatggaacgctctgatagctggatacggctaccatggcatgggagataaggcgatcgagatgttcgagaggctgatagctgagggtgctgtgccaaaccatgtaacttttctggcagtgctgaatgcatgtaggttttcaggtcttgttgacgaagggaagaggattttccagttgatgactgaaaatctgaggataaaaccacgggccatgcattatgcatgtgttattgagctttttggtagagaaggtctacttgatgaatcctattcaatgataagaagagcaccgttcactccaactgcaaacatgtggggagccttgcttactgctagcaggatccacaagagcatgcatcttgcaaaattttctgccgagcagctattggcaatggaacctgagaaaataaacagctatgttgtgctcctcaacttgtatgttagctctggtagacaggacagcgcctgcaaggtagttgaaacactgaagaggaaaggtttatatattggtaatgcctgtagctggatcacagtcaagaaaacggatcacaggtttttctttaaagatactttgcatccacaaagtgctgaaatatacaggaggctggacacattaatgaaggaggtacgagaagctggctttgttgctgaggagaatgaattgctccctgatattcatcctgacgagcaaaagatatcaagagcttaccacagtgagagactggcaattgcttttggccttatcagcacagccccacagactcccttgaggatcagtcaaagccatcgtttgtgcagtgactgccacaatttaattaagtttgtgtcaagagttaccaagagggaaatcattgttagggatggtagcaggttccaccactttaaactcggggtctgctcttgtggtgactactggtaattggctaatgactccaatgtttcaagccaattatctggaaattactttgattaatgaggataaagcagattggtcgaccatgatgctccaatgtttcagtgctacatgcaggcttggtgatcttccattcagcaaccttctcagctggtacaagtccgagagcacgctacaatggcgaggatgggagttgctattctggtctgcgtagtggttttagccctggacgtcacagctggcatactaggaattgaggcgcaggctgctcagaacaagactaagaaggtgacgatcctcttcatccagtgcgagaaaccagtgtacagagcgtaccagcttggcctcgcagctgcagtgctcctggtagttgcccacgcggtagccaacttcctcggcggctgtgcctgcatctgctcccagctggagttcatcaaggcgtccatcaacaggaagctggcagccaccaccataattctctcatggatcgccctgattgccggattctcgctgctgctcgccggcgccatgtccaactccaagtccaagacgtcgtgcgggttcactcacggacacaccttggccctcggagggatcatgtgcttcgtccacggcgggatcaccgtcgcctactatgtcaccgccactgccgcagcgcacgaggttccttagtcgagcattttgcccgagagatcaccgctgttctttccttggtccagctgctccttgcttttctccttgtgatttgacatctacaagcatccgaagatatatgccttttttccgttcaaaaaaaaagaatacatgcctgttgtttgatttgttgctattgctgaggaaaaaacatgtcaaagttagcgtcagtgtgccacagtaatttaatttacgttgttgagaaagacaataacgccgctccatctt

SEQ ID NO: 204383 - DNA, 1485 bp, Zea Mays
aaattgtcaatataatccaaaggatctactgtgatacaaagtgccatgctcttccacttgcggcaaaagctttatcaatactgcatgatcttacatttgtgaattctggggatggatggacacattgcatcttgttgagaggctttgacccgcagtggctgtccataacattctctaaagccatcttccttgggaacggcttaattgccattgtatctgggctatttgcgaaccttcttgctgagaacttgggctttggtcctgtggctccattcgatgcggctgcgtgctttctggcgattggcatggctatcataatgtcctcatggagtgaaaactacggagatccatctgaaagcaaggacctgatggcccagttcaaggttgcggctaaggcaattgcgtcagatgaaaagattgcattactgggagccatacagtcattgtttgagggctccatgtacacatttgtcttcctatggactccagcattgagtccaaatgaagaagacattcctcatggttttatttttgctacattcatgctgtcatccatgctgggtagctccatcgcgtcacgtctattagcccgaaagctcaaggttgaaggctatatgcagatcgtgttctcgatatcggctgtcacccttgtcctccctgtcgccaccaacatcttagtgccaacgtcttctgtgaaaggaggcagcgtatcaattggaggttctcttcagcttcttggtttctgcacctttgaggcatgtgttggtatattctggccgtcaatcatgaagatgagatctcagtacattcctgaggaagcgagaagcacaatcatgaacttcttccgcataccactcaacttatttgtttgtgtggtgctttacaacgtgaatgcattccctatcactgtcatgtttgggatgtgttctatcttcctcttcatggcagcaatcttgcagagacggctgatggttgtctctgatcaagtacacaaatcatcaactacacaagaaatgatcggggaagatgagccactaaatccttagatgtcgacagaaccatacatgcgaaatcagatattgacgacgacgtccatactccatactgcatttcgtttcgtcacctgtgcaataagatggacgtcaaaaccatgtagtctagtggttttcgtttctgtagtgtagatttgaccaggctgctaagtttgcacctgtcccgagaagattagatgagcaagtcaatcgatattggctattcgcattgttgtttcttttttttaaaaaaagatgttcgctttaaagtttaaacgatacggtatatatccttgtaagtgttgcattgctgcatctgatgacaattctagtggtgctgttactgactgttgagggctctctctacttggtcgttgtaagaactgttgcttcttaatgaaaaacgggctcaataaattcagtagaagcctgcagttgcagtaatcatacaaca

SEQ ID NO: 204384 - DNA, 778 bp, Zea Mays
cacactgccagatcggtctaagctagtggcgagagaggtcgtgcgcagtgcctggtgggtctagtctagtggcatcatggaggaggcggtggaggccgtggtcgcggccggagtggagccgttcccgacggtggacaagtgcgacgcgtcgggccgcggcgcgcacgccgtggtggcggacctggacggcgcgctgctgcgctcccgcagcgcgttcccgtactacgcgctggtggccttcgaggccggcggcgtgccgcgcctgctgctgctgctgctgctggccccgctggccgcggcgctgcgggcgctggcctcggagtcggcgtgcgcgcgcgtgctggtgttcgcggccacggcgggcgcccgggtgcgcgacatcgagtcggcggcgcgcgccgtgctcccgcgcttctacgccgccgacgtgcacccggccgcgtggcgggtgttctcggcctgcgcacggaggcgcgtcgtgctcacggccgcgcccaggatcatggccgagccgttcctcagggactgcctcggcgccgacgccgtcgcgggcaccgagctcgccacgtggcgcggccgcgccacgggcatggtggacagccgcaggggcgtcctcgtcggctggagcagggccgacgcgctgcgggagatattggccggcgacgacgacgacgacgccgcgcccgacgtcggcctcgggaacagccgctccgactaccccttcatgagcatgtgcaaggtcgtggatgaggtatgccttgacgccatcaacatagtc

SEQ ID NO: 204385 - DNA, 1247 bp, Zea Mays
gagctggcggatgcagcagcaccaacgttggcagcttttctgggattggagttggcaagaccttgctgaatacgacgttttggcaatgttaagctatgtatatacagttgcacagtccaaaattttgtatgtgggacattcacagggaactatcatgggtttggctgcgtttacaatgcctgaaacagtaaagatgataagctctgctgcgcttctttgtcccatttcttaccttgatcacgtcagtgctagttttgttcttagagcagttgccatgcatcttgatgaggtaatatagcattcctaaacaaatccaccaaataaatgtccataacttgtgaatcaagtatggtgcccttttaccacagatgcttgttattatgggcatccatcagttgaacttccggagcgatatgggtgtacagatattagattcgctgtgcgatgatgaacatttggactgcaacgatctgttatcttcaataacaggtcaaaactgttgtttcaattcatctcggattgactattatttggagtatgaaccccatccgtcatcaacaaaaaatttgcggcatcttttccagatgatcaggaaaggcagcttcgcaaagtacgactatggatggtggggaaacctaaggcgctacggccagctgcgtcctccctcattcgatctaagcagcataccggaatcactgccgatatggatggggtatggaggccttgatgccctggctgacgtaacagacgttgagcgcaccatcaaagagctgagatccacgccagagctcttgtacattggtggttatggccacattgatttcatcatgagcgtcaaggcaaaggaagatgtttatgttgacttaatgaggtttctcagggcccagcagggaatgcacagtagctattaggacgcacgtcacgtacgccttcaaataaatgcttatgctatgatgacagtacgaccatgtaaatacggacacagcatagcatgtaaatacaaacagtctattgcattgcatgtaaagtggtgtgtggattgttctccatttgatgtactgctttctgagtacagtacacatgtacatcagtacatgtaacatgtgtatatgacaaaaatgtagcacatgcaacttggcttatttcgtgccgattgtgtgcttgcatttggggaggaaatcgagttgcaaatacataagactatctctagcaccttaggcatctctagcagcttaaccatcaccatt

SEQ ID NO: 204386 - DNA, 3782 bp, Zea Mays
ctccgtccaagtcgcagacccagctaccgtcttggacggaccgtaccgaccgatgcaacgatggcctgctgggtggcggccgccatgcacctgctgctgctctgcaacgccgcggccgccgcgcgcgccgccgtcgccctgttcgccgcgactccgatgcccccgcgcctgtccctcgcggaggccgccgccgccgccggcgcaggcgactacgacgacggcggcaccggggacaaggggtcccaggccctcgtggggagccccatcgtggccggcgccatgaacaaccgcctgagggcgctcacctcctccttcgccgccgccatcggcaagaagctggactactgcatcaaggacacggagacggagtggaatcaggccttcgatttctccaaggacaccaccttcctcaccaattgcatgaaggagaccaagggggacctccagcagcggatctgcacggccgccgagatgaggttctacttcgacagcctgatgggcggcgacgacacggcggaggccaactacgtgaggcccaacgtcaactgcaaccggtcgtcgtggatcgacgggtgcgagcccggctgggcgtgcagcgccggggccgaccagaagatcaacctgcaggacaccaagaacatgccctacaggccgctcaagtgccagtcctgctgcccaggattcttctgcccgcatggcctcacctgcatgatcccttgccctctgggtgcctactgtccacggtccagcctgaatacctccacaggcatctgtgacccctacaactaccagccgccgcccgggaaccctaaccacacctgcggagccgccgacatctgggccgatgtggtcacgacagatgacatcttctgccccgctggattctactgccccagcactatacagaagctcccttgtagtagtattattgcaggaagggatcaacctcacagactagatgctacaagaagagctcttgcccaccaaactctgctactcaggacatcacaatcttcggcgcgctgcttgtggtcgcgtcctgcttagtcctcctcatcatctacaacttctccggccaaatcctgaccaaccgcgagaagcggcaggccaagtcccgggaggccgccgcgaggcacgcgcgggagacagcgcaggcccgggagaggtggaagtcggccaagggcgtggccaagaaggccggcgtgggcctgcagtcgcagctgtcccgcaccttctcgcgcaagaagggcggtggcggtggcggtgggcagtcgtcgcagctgcaggccggagcgtccacaaaggtaggtgatgacgcgggcgggaagaagcacagcaacctcgccgacatggtgcggtccatcgacgacaacccggagagcgacgaagggttcaacctggaggtaggggacaaggcgctgaagaagccgacgggcaaggagatgcacacccggagccagatcttcaagtacgcgtacggccagatcgagagggagaaggcgatgcagcaggagaaccacaacatgaccttctcgggcgtcatctccatggcgcaggaccacgacgtgagcacgcgcctgtccgtcgagatcgccttcaaggacctgaccctcacgctcaagggcagcaagaagaagctcctgcggtccgtcacggggaagctctcgcccgggaaggtggcggccgtcatgggcccgtccggcgccgggaagaccaccttcctcagcgccatcgccggcaaggccacagggtgcgacacgtcgggcctggtgctgataaacggcaggatcgagccgatccgagggtacaagaagatcatcggcttcgtaccccaggacgacatcgtccacggcaacctgaccgtggaggagaacctgtggttcaacgcgaggtgcaggctgtcggcggagatgtcgaaagccgacaaggtgctcgtcgtggagagggtcatcgagtcccttgggctgcagccggtccgggactccctggtggggacggtggagcagcgcggcatctccggcgggcagcggaagagggtcaacgtcggcctggagatggtgatggagccgtcggtgctgatcctggacgagccgacgtctggactggacagcgcatcctcgctgctcctgctccgcgccctccgccgcgaggctctcgagggcgtcaacatctccatggtggtccaccagcccagctacacactgtacaggatgttcgacgacctgatcctactggccaaggggggcatgacggtgtaccacgggccggtgaagaaggtggaggagtacttcacagggctgggcatcgtggtgccggagcgcgtgaacccgccggactactacatcgacatcctggagggcatcgtgaagccgagcctgagctcgggaggcagcgtcaaggacctgcccatcaggtggatggtgcacaacggctacgacgtgccgcgggacatgctgcagagctcgtcggaatcggagtccacgtccaggggcgacgcgggacacgctccggacgagccgtcgtccgtggtctcgctgctctggggcaacctcagggacatcctcgggcagaagaaggacgagtacgactacaacaagacgtcggaggacctgtccaagcgcaagactccaggcatactcaggcagtacagatacttcctaggaaggtgcggcaagcagaggctccgtgacgccaggatacagggagtggactacctgatcctctgtctcgccggcatatgcctgggaacgctggccaaagtgagcgacgagacgttcggggcgctggggtacacctacaccgtcatcgctgtctctctgctgtgcaagatcggagccctgcgttccttcacgctggacaagataaactactggagggagcgagcctccgggatgagctcgctggcctacttcctgtccaaggacagcatcgaccacttcaacacggtggtgaagcccatcgtctacctctccatgttctacttcttcaacaacccgcggtcctccatctgggagaactacatcgtcctcctcgcgctcgtctactgcgtcaccggcatcggatacaccttcgcagtcttcttccagccaggttccgcgcagctgtggtcggccttgcttccggtggttttgactctgatagccactcagcagaaggacactatccttgccgacctgtgctacaccaagtgggctctggaagccttcgtcattgccaacgctcagaactattccggcgtgtggctcataacccggtgtggctcgctggtcaggagcggctacgatatcgagcacgaggctctctgtatagcggtcctcatcgccaacggggtactcttccgctgtgtagccttcttctgcatggtcaccttccagaagaactgagagaggtcggtcaaggaaaacacacccgtgattccgtgaactttctatgcccacgtagcagctctgtttttgttaatttcagtgcaataggattgtagattagagcccctcttggtaaggtatgtcagtatgtgtagatgaggacagattcttgaatagcaggcaactatcagggatgccctaaattacagaggcggtttcttgcctaacaccaatgtaaatttgatatgcaaattcagtgtatatatgggtacgacgactaatcatgaaatctgtagctcttcaccagcttccagcacaagtttaaagtcataacaaccatctgtaagaggcgccacaagcaatccgtgaatgaatgcaggcacacaactgactacatgatcagaaatgcgggcagtc

SEQ ID NO: 204387 - DNA, 635 bp, Zea Mays
accaaggcccctctatctttcttccccagcaatgcaattccgcagacagacgcaggcggcaggcagcggcgcagcgcaccgcttcttcctcttctatctctcatctacagccttcgctgcgccgccatggccaccacccgcttgctgccgctgctccgacgccgcctcgccgccgcaatcgccggatcgcctgctccctactccctccgaggaccctcatttcctgcaccagcagctgcagggctaaggtccctcctaaaagctgctggagcgagcgatactgcaacagaaccccaggaccaacagcattccgaaacaactcccccgccggcttctgtcccgacaccggagtccggtctcaaagtcagggacacctccaacctgaagatctcaccaaggcatgacctcgccatgatctttacgtgcaaggtgtgcgagaccaggtccatgaagatggccagcagggactcgtacgagaacggagtcgtggtcgtgcggtgcggtggctgcaacaacctccacctcatggcggacaggcttggctggtttggggagccagggagcattgaggacttcctagcgacgcaaggggaggaggtgaagaaaggtgaggccatgcgggcagaagaatcctg

SEQ ID NO: 204388 - DNA, 685 bp, Zea Mays
accaaggcccctctatctttcttccccagcaatgcaattccgcagacagacgcaggcggcaggcagcggcgcagcgcaccgcttcttcctcttctatctctcatctacagccttcgctgcgccgccatggccaccacccgcttgctgccgctgctccgacgccgcctcgccgccgcaatcgccggatcgcctgctccctactccctccgaggaccctcatttcctgcaccagcagctgcagggctaaggtccctcctaaaagctgctggagcgagcgatactgcaacagaaccccaggaccaacagcattccgaaacaactcccccgccggcttctgtcccgacaccggagtccggtctcaaagtcagggacacctccaacctgaagatctcaccaaggcatgacctcgccatgatctttacgtgcaaggtgtgcgagaccaggtccatgaagatggccagcagggactcgtacgagaacggagtcgtggtcgtgcggtgcggtggctgcaacaacctccacctcatggcggacaggcttggctggtttggggagccagggagcattgaggacttcctagcgacgcaaggggaggaggtgaagaaaggttcgacagatactatcagctttactttggacgacttggctgggtctcaggtgaggccatgcgggcagaagaatcctg

SEQ ID NO: 204389 - DNA, 2464 bp, Zea Mays
ctcacccaccccggcccggcagccaatctgtcatccatcacgtcgcgtgccgtgcgtcaccccctcccttcgcctcgcttcaaaaatccctccgttggcgcccaagtaccaaaccctagcctcgtccgggcccgccccctctggccggccgggcggaacatgcgaatgcggccatggcgaccggggccgatctgacctccccaaccggcgccgctgcggcagcggccgccgccaggaaggaccgccacatcgtcagttggagctccgaggaggatggcgtgcttcgtgctcaaatcgctcttcatggcactgataactggacaattatagcggcacaattcaaggacaagacggccagacagtgcaggagaaggtgtgcacactgttctaatagaggaaacattgatggtacaattatttgaactcagagtgcaagaaaggtgggtggtccagggaagaggatatgcttttgtgtgaggctcaaaaagttcttggaaacaagtggactgaaattgcaaaagttgtttcaggaagaacagacaatgcagtgaagaaccggttttctactctatgcaaaaggagggctaaggatgacgagctataccaagaaaatggtgtgccatgttccaacacaaatgcaaagaaggttctcactgaaacaggacgcctcacaccaggcggagctggctctttggtacatattaagcagacgaggtgtgaagcgggagggtaattttctgaagaaggatgacccaaaagttgctactttattacagcaatctgactttctttgctcccttgcaacaaaaatcaaaagtgacaatacaagtaaaagcatggatgaagcatggcagcaactgcaagatcatttagtgaaaaaagagcacaacaaagtgccagaaaacagtgggtctgaaatagcttcacttttagaggagcttgatgatttaattgtagacccctatgagaggaaagatgaagatgaacagaagctaagcgagcacaatggacggaccgatgtggacaatgatcactgtaacggttcttcacaaactagcatagtagtaacgacaaatatggtcccagaggaaatgatgggagattgtccagtcgataactgcaatgaggatagtagtctttgtagaaaagtgctttctggaagtacagaaccttgcccaggtgcaaaaatgacaggatgtgggaatttgagcgaagaccaggttgctgaaggtagtgtgcttcaacgtgtagaatctatatctcctgttataacagatattgatgatttactcgtagacccgtatgagagtgaagcggaagatgaagaaaagtcaggggagcagaatggacagattgatgtgcatgctgagcagtgttttggttcttctcaaactatcatagaagtgatatcagacatggcccctgatgaagtcatggaaacttgttcagcagataaccgcgaagaacatagtagcatttgccgaaatgtgctttctggaagtatggcaccttgcccaggtgcagaaataccaacatctgaaaaaatgagtgaacttgctgaagatagcagacttcaatgtatggagtttgcatctcccgttctggcaaattttgcgagcaaggaatgtggagaaacaccagaaccacaagttcttaatgagattgttgaagatagcaggcttcaatgtattgaattcaactccccggctcacacaattctcccagataaaacaggcgccgaaaactttgcatccccaagttttgatgtggttgcaaaagatagtaagcctccgtctttggaattcacatcccctgctcatacagttgcaacattccaaccgtatgcagacggcatccctaccccaaaattcactgctagtgagaggagttttctgctgtcagttttagagctgacctcaccagggtcaaggcctgaaacttctcagcagccatcttgcaaaagggctcttcttaatagcctttgaaatgggtttgcataaaatcccaacaccaagcctgctatgcccctcagcataatttggctactcctatatgcatgaagtgtgcctaccctcaaagggtttcatagtatgttttgtttgttgtatagaatgatgcattggtgtagttgtattagcatacaggaacgaaagggtgatggtgtaagtgtttacagcttgtgttcaaaatatagaaaaagtaatattctttgtgtaattaactcttgtaattcttcccatgggtgcgagttattagattgttgcgtagtgtgatgtaatggctttcctttgttgagcttttggtatggaagaaccgactgcaggctatggctgtatgctttattgatttgtatggttggaacttggaaacatgatattcggttgatagactgcgttctctgcagctgatccggcactaagtttggtgtccattttcagaataaaattcatgtatttcccaggcc

SEQ ID NO: 204390 - DNA, 2611 bp, Zea Mays
ctcacccaccccggcccggcagccaatctgtcatccatcacgtcgcgtgccgtgcgtcaccccctcccttcgcctcgcttcaaaaatccctccgttggcgcccaagtaccaaaccctagcctcgtccgggcccgccccctctggccggccgggcggaacatgcgaatgcggccatggcgaccggggccgatctgacctccccaaccggcgccgctgcggcagcggccgccgccaggaaggaccgccacatcgtcagttggagctccgaggaggatggcgtgcttcgtgctcaaatcgctcttcatggcactgataactggacaattatagcggcacaattcaaggacaagacggccagacagtgcaggagaagatggtacaattatttgaactcagagtgcaagaaaggtgggtggtccagggaagaggatatgcttttgtgtgaggctcaaaaagttcttggaaacaagtggactgaaattgcaaaagttgtttcaggaagaacagacaatgcagtgaagaaccggttttctactctatgcaaaaggagggctaaggatgacgagctataccaagaaaatggtgtgccatgttccaacacaaatgcaaagaaggttctcactgaaacaggacgcctcacaccaggcggagctggctctttggtacatattaagcagacgagttataatttgaaggagaaccttgtaccaaatatgaaattatttgaactagagaagagcacacaagatgccaggcaacctcttgctaccatttcttcgaacaaccaagataacgtgaatacagttaaatctcaaaatcttgtcccaaccacaaaacaattgttaggtccagaacaacattgtgtgaagcgggagggtaattttctgaagaaggatgacccaaaagttgctactttattacagcaatctgactttctttgctcccttgcaacaaaaatcaaaagtgacaatacaagtaaaagcatggatgaagcatggcagcaactgcaagatcatttagtgaaaaaagagcacaacaaagtgccagaaaacagtgggtctgaaatagcttcacttttagaggagcttgatgatttaattgtagacccctatgagaggaaagatgaagatgaacagaagctaagcgagcacaatggacggaccgatgtggacaatgatcactgtaacggttcttcacaaactagcatagtagtaacgacaaatatggtcccagaggaaatgatgggagattgtccagtcgataactgcaatgaggatagtagtctttgtagaaaagtgctttctggaagtacagaaccttgcccaggtgcaaaaatgacaggatgtgggaatttgagcgaagaccaggttgctgaaggtagtgtgcttcaacgtgtagaatctatatctcctgttataacagatattgatgatttactcgtagacccgtatgagagtgaagcggaagatgaagaaaagtcaggggagcagaatggacagattgatgtgcatgctgagcagtgttttggttcttctcaaactatcatagaagtgatatcagacatggcccctgatgaagtcatggaaacttgttcagcagataaccgcgaagaacatagtagcatttgccgaaatgtgctttctggaagtatggcaccttgcccaggtgcagaaataccaacatctgaaaaaatgagtgaacttgctgaagatagcagacttcaatgtatggagtttgcatctcccgttctggcaaattttgcgagcaaggaatgtggagaaacaccagaaccacaagttcttaatgagattgttgaagatagcaggcttcaatgtattgaattcaactccccggctcacacaattctcccagataaaacaggcgccgaaaactttgcatccccaagttttgatgtggttgcaaaagatagtaagcctccgtctttggaattcacatcccctgctcatacagttgcaacattccaaccgtatgcagacggcatccctaccccaaaattcactgctagtgagaggagttttctgctgtcagttttagagctgacctcaccagggtcaaggcctgaaacttctcagcagccatcttgcaaaagggctcttcttaatagcctttgaaatgggtttgcataaaatcccaacaccaagcctgctatgcccctcagcataatttggctactcctatatgcatgaagtgtgcctaccctcaaagggtttcatagtatgttttgtttgttgtatagaatgatgcattggtgtagttgtattagcatacaggaacgaaagggtgatggtgtaagtgtttacagcttgtgttcaaaatatagaaaaagtaatattctttgtgtaattaactcttgtaattcttcccatgggtgcgagttattagattgttgcgtagtgtgatgtaatggctttcctttgttgagcttttggtatggaagaaccgactgcaggctatggctgtatgctttattgatttgtatggttggaacttggaaacatgatattcggttgatagactgcgttctctgcagctgatccggcactaagtttggtgtccattttcagaataaaattcatgtatttcccaggcc

SEQ ID NO: 204391 - DNA, 2751 bp, Zea Mays
accttttaaaacccaccaccccactgcaaaaaattcctctcctcagttcctcagcttctcacccaccccggcccggcagccaatctgtcatccatcacgtcgcgtgccgtgcgtcaccccctcccttcgcctcgcttcaaaaatccctccgttggcgcccaagtaccaaaccctagcctcgtccgggcccgccccctctggccggccgggcggaacatgcgaatgcggccatggcgaccggggccgatctgacctccccaaccggcgccgctgcggcagcggccgccgccaggaaggaccgccacatcgtcagttggagctccgaggaggatggcgtgcttcgtgctcaaatcgctcttcatggcactgataactggacaattatagcggcacaattcaaggacaagacggccagacagtgcaggagaagatggtacaattatttgaactcagagtgcaagaaaggtgggtggtccagggaagaggatatgcttttgtgtgaggctcaaaaagttcttggaaacaagtggactgaaattgcaaaagttgtttcaggaagacaatgcagtgaagaaccggttttctactctatgcaaaaggagggctaaggatgacgagctataccaagaaaatggtgtgccatgttccaacacaaatgcaaagaaggttctcactgaaacaggacgcctcacaccaggcggagctggctctttggtacatattaagcagacgaggtcttccagttataatttgaaggagaaccttgtaccaaatatgaaattatttgaactagagaagagcacacaagatgccaggcaacctcttgctaccatttcttcgaacaaccaagataacgtgaatacagttaaatctcaaaatcttgtcccaaccacaaaacaattgttaggtccagaacaacattgtgtgaagcgggagggtaattttctgaagaaggatgacccaaaagttgctactttattacagcaatctgactttctttgctcccttgcaacaaaaatcaaaagtgacaatacaagtaaaagcatggatgaagcatggcagcaactgcaagatcatttagtgaaaaaagagcacaacaaagtgccagaaaacagtgggtctgaaatagcttcacttttagaggagcttgatgatttaattgtagacccctatgagaggaaagatgaagatgaacagaagctaaggttatttatgaataaacactcaattttttgtcaaatatgtcgcttcagttgttgacccatcattatttccaatgcaaagcgagcacaatggacggaccgatgtggacaatgatcactgtaacggttcttcacaaactagcatagtagtaacgacaaatatggtcccagaggaaatgatgggagattgtccagtcgataactgcaatgaggatagtagtctttgtagaaaagtgctttctggaagtacagaaccttgcccaggtgcaaaaatgacaggatgtgggaatttgagcgaagaccaggttgctgaaggtagtgtgcttcaacgtgtagaatctatatctcctgttataacagatattgatgatttactcgtagacccgtatgagagtgaagcggaagatgaagaaaagtcaggggagcagaatggacagattgatgtgcatgctgagcagtgttttggttcttctcaaactatcatagaagtgatatcagacatggcccctgatgaagtcatggaaacttgttcagcagataaccgcgaagaacatagtagcatttgccgaaatgtgctttctggaagtatggcaccttgcccaggtgcagaaataccaacatctgaaaaaatgagtgaacttgctgaagatagcagacttcaatgtatggagtttgcatctcccgttctggcaaattttgcgagcaaggaatgtggagaaacaccagaaccacaagttcttaatgagattgttgaagatagcaggcttcaatgtattgaattcaactccccggctcacacaattctcccagataaaacaggcgccgaaaactttgcatccccaagttttgatgtggttgcaaaagatagtaagcctccgtctttggaattcacatcccctgctcatacagttgcaacattccaaccgtatgcagacggcatccctaccccaaaattcactgctagtgagaggagttttctgctgtcagttttagagctgacctcaccagggtcaaggcctgaaacttctcagcagccatcttgcaaaagggctcttcttaatagcctttgaaatgggtttgcataaaatcccaacaccaagcctgctatgcccctcagcataatttggctactcctatatgcatgaagtgtgcctaccctcaaagggtttcatagtatgttttgtttgttgtatagaatgatgcattggtgtagttgtattagcatacaggaacgaaagggtgatggtgtaagtgtttacagcttgtgttcaaaatatagaaaaagtaatattctttgtgtaattaactcttgtaattcttcccatgggtgcgagttattagattgttgcgtagtgtgatgtaatggctttcctttgttgagcttttggtatggaagaaccgactgcaggctatggctgtatgctttattgatttgtatggttggaacttggaaacatgatattcggttgatagactgcgttctctgcagctgatccggcactaagtttggtgtccattttcagaataaaattcatgtatttcccaggcc

SEQ ID NO: 204392 - DNA, 2694 bp, Zea Mays
caccccggcccagagcactgcactgcttctccctctctgttttacggaggacgaggaggaacaggaagcagcagggtgcaacaatggtgaagttctccaagcggttcgagggccagctggtgcccgaatggaaggacgccttcgtggactactggcagctcaagaaggacgtcaagaagctgcaggccgcggcaggagaggctgccgtggcggcgccggcgagggctccggctcactgggcgatgaggctgcccttcttccacccccttgggcagccgcctgccgccattcaggtgcacaggaagctggccacagacaggagcgtcgacggcgcggtggccggggaggtgtacgatacggcggtggcggatggcgccgggttcgcggacgccgaggcggccaaggccttcttccagaggctggaccagcagctcaacaaggtgaaccggttctacgagagggaggagcgggagttcctggagcgcggcgagtcgctccggcggcagctgcagatcctcctcgagctcaaggctgccgtcacccagcagcagcaggcacggcgcggggggagcgctgccgacacggatgacccctccgtttcttggtccattcagctcggaggccaatctctcagggtaattgcagagaaagaagaagagtgtgaagaaaagctcaacggcggcgatgctaccgccaagataagcagtggtgaaggacccgtgtctcaaggtctcagtgaatctgggagactttgcaagccgaatgaagaaatgacgaggacactctccggccagggcaggagtgtgaggatcaacatcccggtcaccacgccttccaggactgtcaccgccatacgcgaactgctgttcggggacatgccgagccagtccaagaagactggcgcgcatggtaccgacggcagtgagaagctgagcatcaacaagaggaaggtgcaccaggcggagaagatgatcagaggtgctctggttgagctgtacaaaggactgggctacctcaagacgtaccgatcctcaagaaatttgacaaggttacaggaaaggaagtgcagcaaatttacctcaaagcagtggagagctcctactacaacagctctgacaaggtattttgaaacaatattggagcaattctgatttcattcaacctcagctccaaaactcctgactgcgcgcggttttcatcttaacaggcagtcaggctaatggacgatgtggaggagctgttcttgagacatttcacagaaggtgacagacggaaagcaatggtgtatctgaagccaaatcagcgggaagagtcacactgtactacgtttttcattggagtatccactggcggcttcatagcattgttcataggttactgtatcatggcacgcgttgctggaatgtacactcagcagtcaaacaaggtgtacatgtcaacttcttatcctgttcttagcatgttcagcctcttcttcctgcatctcttcatctatgggtgtaacatcttcatgtggagaaagacacgcataaaccacacattcatatttgaattcacgcctactaaagagctcaagtaccgagacgtgttcttgatatgcactgcttccatgacaattgttgttggtgcaatgtttgcgcacctggcaataattgttaaaggaaattcatcaggcgttgtccaagcgataccagggtccttacttctggtgttcttgttcatattagtctgccctttcaacatcgtctaccaatcaagccgttaccaattccttagagttatcagaaacatcattctgacacccttttataaggttgtcatggttgatttctttatggctgatcagctctgcagccaggtaccactgctcaggagcctggagtatttggcatgttactacataacaggcagctacatgacacaagactatggatactgcacaagagttaaaaactttagagaccttgcttatgcagtatccttcctgccttattactggagagccatgcagtgcgcacggagatggtttgatgaaggggatataaaccatattgtcaaccttgggaagtatgtgtcagccatgcttgctgcaggaacaaaggtggcatatgagaataacaatagtactgggtggatgtcacttgttatcattgtatcaagtattgcaactatctatcaactgtactgggactttgtcaaggactggggtcttctacagttcaactccaagaatgcctggcttcgtaatgatttgatacttaaacaaaaatacatttatttcgtatccatgggcctgaaccttgtcttgaggcttgcttggcttcagactgtcatccaccctaatattggaagcctggattctagagtaactctgttctttttagcagcacttgaagtgatacgacgaggtcactggaacttctacaggctggagaatgaacacctaaacaatgcaggcaagttcagagcggtgaaggttgttccacttccttttcaagaagtggaagaggaataacaaaacagggccaccactggagcatgttgtaggttttaagaatacaaacagttcgtatgtaacacaccaactaatgctagaaagcatgcactacattaccataataagattcatttttgtatgagcaataaaaaccattccacgctgttagtatggacaagttgtatggagcaattggc

SEQ ID NO: 204393 - DNA, 1238 bp, Zea Mays
atctgaagcctgtaacatctccgccatccgcctgaaggctcgaagcacgacgccaatggcctcccccaacgccgacccggctcagcaccacgcctcgacgccgccgctcctcctcgccgtacgccacctgccgttccccggcgtccaccggacgcgcgcgctccccggccccgacgtcctgacccctctcgcccgccgcctcgaggagctcgcgtccgcggcgacctcccacccgctcctgaagccgctcttcgccgcccactcacacctctcttccttctcccaggaggcggctggtggcggcgcggcgtgcgacggtgctgtccggggggcactgcttcgcggcggtgctagggaactcggtggccgggttggtggtgtccaacggcatcaacaacttcctcaacctctacaacacggtgctcgtcgtcaggctcgtgctcacgtggttccccaacacgccgcccgccatcgtcgcgcctctcaggtaggcgccatcgcagctctgcacgatatgtgacccgtacctgaacatcttccggggcatcatcccgccgctcgggggaacgctggacctgtcgccgatcctcgctttcctcgtcctcaacgccttcaccagcacggcggccgcgcttccggcggagctcccgagctcggcagcggcgcagcaccaccagaggactgctgcttcatccagctcggcgactcccagtcccaaccagaggaaatggatgcggagaatgcgatcaaagacatcacagggagaagatggtggtcactaggcatgtgagcttgtggctgggttcgtcaaatgccttattgttaccagctggggatcatgcttcgcatcagacgctcgagatctgcacagcaatgtgttggacatgcatgctcctcgctctctagccatcgaatgcaaactctgtcaatgccgcatgcagagttcgcccctttggttcaccacgttgcttcagagcttcaaatggtttttgtgcgttgtaatgcgttggcgttgcggagctttcttcaaatggtttttgtgctttgtaatgctttggcggtgagggctgtgctttctgctgcatgtatgtgtagcactttcggtcagctttcttgaattccgatagtgtgatcgcgatgcgtagccaaattcagtcttgagagagtaccaatcgaactttcatctgttgttggttaacaaattcagacaattcgtgaataggcatgctgcatagaca

SEQ ID NO: 204394 - DNA, 783 bp, Zea Mays
actgatttggcccagtaaaatttgttcttaacacttgcaagcgcttgaaggagaagaagtcgtaccttgtctggaatgctgttggctgccttggtgtcactgctgtcaatgatcttgttagagaggtggaggctattcagaagtgtggtgggcagactattgctgatggaagccgctttcgcactggtggtggaattctctggaacatcttaaagtcgcgggaacccaaggcttacaaggaaataatggcaaagggaaaggaacttgagaagcagtttaggtgtacgaaacgaccacagattagcagaaacgaagatgcaagttcacagggcagtgctttaattgatgatgaaattgaagcgcgagaccaaaaggaaacattggatgaccctaagcaattggatgatgtggagatacacgtatcagacaataaagctcaacgcaaaccactggcggacagaattcgcgctcctgttgcatatgatgatctgtttgaagagggggagatacacgacggagaaccacgtagttagcatttcaaagattatgcctcgtcatgagtgcccaaaggatgtcacataattgcaagagcatgagtatgatttaagaactaccactgcaatgtagcagtttttcctctaaacatcatccccgtgaacttgcagcgatggagattttgttgcgttcggtgaaaccattgttgggcctgaattcagtggtcaatggaaatcatggttaaacgagttttgggtgtatagtgtgttcatcgttttttaccacact

SEQ ID NO: 204395 - DNA, 693 bp, Zea Mays
tctacatgtttgatttggtgaaaaatcaatttgcagtggaggctattcagaagtgtggtgggcagactattgctgatggaagccgctttcgcactggtggtggaattctctggaacatcttaaagtcgcgggaacccaaggcttacaaggaaataatggcaaagggaaaggaacttgagaagcagtttaggtgtacgaaacgaccacagattagcagaaacgaagatgcaagttcacagggcagtgctttaattgatgatgaaattgaagcgcgagaccaaaaggaaacattggatgaccctaagcaattggatgatgtggagatacacgtatcagacaataaagctcaacgcaaaccactggcggacagaattcgcgctcctgttgcatatgatgatctgtttgaagagggggagatacacgacggagaaccacgtagttagcatttcaaagattatgcctcgtcatgagtgcccaaaggatgtcacataattgcaagagcatgagtatgatttaagaactaccactgcaatgtagcagtttttcctctaaacatcatccccgtgaacttgcagcgatggagattttgttgcgttcggtgaaaccattgttgggcctgaattcagtggtcaatggaaatcatggttaaacgagttttgggtgtatagtgtgttcatcgttttttaccacact

SEQ ID NO: 204396 - DNA, 1633 bp, Zea Mays
agctcgtcgtccccgtcggaggagaacctgtttatattcttgtgaggaagaaacgttcccatccccgtcattgaggaattcggaatcggggatcgagtacatctccacttcttcccaggcggccaggccctggcccgcggccgcaccgcaccgtagtttgttccttccgcaaggaagcgagagaaaatcgagtgaaaaggaaggggaaataaggctgaatcacagtttctggatcggaggagcatccccgcctaggtctctgcagccatggttcgcggatcgctcggcaagcttgcatcgcgcgccctctccgtcgcccgggagatggcagcaccagcagctccgccgcctcaacatccacgagtaccagggcgcggagttgatgggtaaatacgggatcaacgtgcccaggggcgcggcggctgggtccgtacacgaggtcaaggacgccttgaagaacatgttccccagcgagaaagagatagttgttaaaagtcaaatccttgctggtggccgagggctgggaactttcaaaagcggactgcaaggtggtgtccatattgttaaggctgaggaagctgaattgattgcaagtaaaatgttaggccagattctgataacgaaacaaactggtccagagggaaagattgtgagcaaggtctacttgtgtgagaaactatctcttactaatgagatgtacttcgccatcacccttgataggaaaactgctggtccgctcattattgcttgcagcaagggaggaaccagtattgaagatcttgcggagaagtatcctgatatgattattaaggttcctattgatgtatttaaaggaatcacagatgaggatgcagctaaagttgttgatggtcttgatggagagattggttgcatggtgaatggagcaggattggccatggcgaccatggatattataaagttgcatggtggtacgcccgccaattttcttgatgtcggtggaagtgcatcagaggggcaggttgtggaagcttttaagatactgacttcagatgatagagtgaaggcaattctagtgaacatttttggtggcattatgaaatgtgatgtgatagcaagtggaattgttaatgctgccaaacaggttgacctgaaagttcctgttgttgttcggttggaaggcaccaatgtagaccaaggaaagaggattcttaaggaaagtggaatgactttgatcactgcagaagatcttgatgatgcggcagagaaagctgtaaaagcatccgtcaaataactagtgtatcaatctgaagtttctttttttttcactggtacaagatgagcagtgctcttttacggatttcgatttggagcagaagtcgtgaactgcaacgtttttgaaatggtttgactctgatgtcactcaagcgcgatggacaggtggagcatgctgaatagttcgcattttttgcaaggatgatgctatctagctaaaatttatcatacgcacgcacaaaggaaataacatgtgtgcctgcagcacatcgggacatgcaatcccctgttaatatttttaattagatggagccaacattgcgtccaaccaatctcatacaggagggatggaacacgcgtctaagcacatatatctact

SEQ ID NO: 204397 - DNA, 759 bp, Zea Mays
gaataaggttgcagccgactccatgggatcgccggatgtggacgaacgaacgtcatatcacatggacgcccatttcttgccactacttgctcggttgttcttttatctcggaacgcggtaggggttgcggattgggagcaaaggaggagagggagtactgggccgccgccggctgcgaacgcggaggaggcagcttccaccaatcagtgcaccctcatcctcaaaggctggtgagaagcttaccatcgatcaagaattcgagcagtatttttcgaacctgatgctgtaggatcgaatggatagttttgtgaccaaaaaaatggcgctagctgggacctccaaacatggtttgcttgctgagcgaggtgccgaaccgtggctattagtattattggagccatcggtttatatgtacaccgaatcctatcactgaatgtatgtatctgtggtatgtgtatctttttcagcttgaccatcagatgttagcatcatggtgtatggtaatgtgtgcagataagaacatgtctaagcaatatagtaaatagtgtattccttgtatacttatgttccagtgtttctgaatagatgggtgagtagacggaagcgactactagacaccgtgaacgaccatcagtgttcacacacacaccgttcacacgcgcgcacggatccaaacggcggtgctacacgtgcgtatcgcaggcgcgtgcagccagccccggcacctggatctccttggcacccaccggcagattttcc

SEQ ID NO: 204398 - DNA, 3125 bp, Zea Mays
atgcatgtggaggatggaagggagcagcgagatttggagcgtggatggcgggcgcggttcccgtggattttgggcgaggttgggcacgtcggagtggtggcgagaaaaggaaggaaggagcgtgcagtcggcgggattggaggcgaggttgggcgcgtcgaagcagttgcgaggaaggcgtgcacggcgtggttggagacaggggctcgggtgggggcaggcatggcgcggctttggttctcgccaaggtcgatgctcgcctccgccgtcgacgcggaagcgggaataggagaggagctggaggacgcaacctccacagtgggctcaccgcagcttttcgccattccgacgccgaggagagaggaggggcttaaggcgaacttccactccagtgctgcaaacgtaaagatgcgggttgggggactgccggactggggagtgggacgagacgaccagacaaatccagaatcgcagtcgcgttctgctcctggaggcccccgcctggccgcctgcgccttcgccatggaatcgcgcggcaagcggatcctcccctttctgttggtcattatcgccgctgcggcggctccgtccgccatgccccgtgacgagagagaggtggtggtagtttccggtgcgccggacggggttgtgtgggtggcccagctctcggatctccacttcagcgtgcaccacccggagcgcgcctacgacttccggcggtatgtcggcccggcgctggccatggtcaaccccgacctcgtgctgatcactggagaccttactgatggtaaaagcaaagatctgttaacaatgaagcaaaacgaggtcgaatgggtagaatatgaaagtacaatgaaggaaataattgaaaatagcaagcttccaagaagaattttctatgatatgagaggaaaccatgatagctttggtgtaccagcatctggtgaggactatgacttttatagtaagtatagcatcaacgccaaactaagacgacaggggcgtgtccaaagcattactttggagaatagtggtcggaagcatctgtttgttggctttgatagcacaatggagattggtcttagaggtccaaccaatctatttggacatccaactgacaagcagatgattgaattggatcaagcattatcacagtggaatactgactttgacaaggttccagtgacaaaaatcgcatttgggcacttcccgttgtctttctcagcattaacagagtcaggaaaaagtatcaaggatgtttttctaaagcaatcattggcagcatatttgtgtggtcatcttcatacaaggttcgggaagaacttgaaacgatactaccatcgggcagtccaggaaccatcattatcagagcattactaccaacataacatgcaccaaggagatgcattccagggtaataaggaaaactgttctgaagaagcttctcatgttgaagagttctgggaatgggagatgggtgattggagaaagagcagaagcatgaggatactagcaattgatgatggttatgtttcctataccgatatagatttcagattaggttcaaagagcataatcatactacctacctttccccttgattcaagattcatgcagagagcctctgcttttcgtgattttaaatgtcatgtcatgggggcatcatcttttgataccgtgagagctcttgtattctctaaacatgagatagtatctgtttctgtaaaaatatacgactcaaggccaggaactcttgaaatagtcttcgactctgaaatgaaaagagtggattccaatgaaactcgaggaaatatgtatttgataccatggaactggagggcatttgaagattcctctcccagccgatattggctccaaattgaagtgatggatataacaggtgacacaagtgtcagccagttgaggccattctctgttaacggcttgctggcaagagtgaactggacatggaaagagttttttgtgattggtattcagtgggcttcaatatatcatcctgcactgtggtgtgccttttctctaatcttttcgttgcttcttgtaccacaagttttagcagtggtattcaaagatcggttcacatataaatctctatgcgcatatggtgggcagaggacactgttgaagtctctagttggtggtttcatctgttgttttgttgaactcgccaggctggttcttgtatggttattgctactgttatatgctatctatttagtttttataccttggttattcggtcaccctattactgaagatggtagcctgacttacatgacacataaaggctggattctaaaaggacccagtagtagcaacgaagtagtccatgctgggattccagatgtcatggtcattgttctacctcacctttgctttgtgttagtacccaccattgtgattttagctgccatggctgctgagagaacagcatatcgagagcattatctttctcgatcaggaaagaagaaagatgactaccgtaagagcaggagacagatagaacatgaaaacttttggaacggtcgctggattagcaaatttctgtgtcttctctgcgtggtggttctatgcaaacattggaagctttgcagagcgctcgtgaaggcttatgctatgaaccccttgctccatgcgccagtacttttcttcttcgttcctttactcatggtgtttgccatctacaagacacggtccatttagctgttcgggagttctgaagatgtgctgcactggactgtccaataaatggtgcttcaactgtgaagactgaagactaacccacaactgaaggtgtgctacttcgatttgtcactttctctctctttcagagagcagatttgttagattgtttaacaggcatgtatagctttcagcgttgtgctccgtataaatgagggactgcacggcatttcattagaatggaatggttaggatttgaaccaaggaagaagagactaaactgctcaatatagtttttcctctttcttttgagaaagttctttttccctcctctgtttttgacctgccggttttgtttttgtacatttatccttcttgtgagactttgaccatctacagtataatagcactgtggcttgcgg

SEQ ID NO: 204399 - DNA, 1717 bp, Zea Mays
gtgcctttccttctcgctttcactggtaccaggtggcgaccatacagcacggaactccagttcaccgctgcctttcttctactgttcaccccgcgtgcgctcgctcactcgctctctcccctctggctctgagtggcgctagtgggcgaccgccgccgcgtccctccgtcaggtgcccaggtgtagcctcgtcagcccctccgtcaggtcttcgtcggccccctcgccgacgagcacccaccagatcccattctttcgacgaggctgaagcagctgaaaatgcaaagtctgcagacattgaccggaggattttgcaagaaacaaaagccgaacaacacatccacaagctcttacttctcggtgctggagaatcggggaagtctacaatatttaaacaaataaagcttcttttccaaactggctttgacgaggcagagcttaggagctacacatcagtcatccatgctaatgtgtatcagacaattaaaatattatatgagggagctaaagagttagcccaagtggaaccagattcttcaaaatatgtcttatctccagataatcaggagattggagaaaaactatcagaaattggtgccagattggaatacccatcgttgaacaaagaacgtgtacaggatgtaagaaaactatggcaagatccagccattcaggaaacttattcacgtgggagtattctgcaagtcccagactgtgcacagtacttcatggaaaatttggacaaattatctgaagaagattatgtaccgacaaaggaggatgtgcttcatgcaagagtacggacaaatggtgtggtagaaactcagtttagccctctaggagagagcaaaagaggcggagaggtctataggctgtacgatgtaggaggccagagaaacgagagaaggaaatggatccatcttttcgaaggtgttaatgctgtaatattctgtgctgccattagcgagtatgatcagatgttatttgaggatgagacaaagaacagaatgatggagactaaagaactctttgattgggtgctaaagcaaagatgttttgagaaaacctcattcatgttatttcttaacaaatttgacatatttgagagaaaaatacaaaaggtccctttaagcgtgtgcgagtggtttaaagattaccagcccactgcacctggcaaacaggaggtggaacacgcctacgagtttgtaaaaaagaagtttgaggagctctacttccaaagcagcaagcctgaccgtgtcgaccgagtgttcaagatctacagaacaacagccctggatcagaaacttgtaaagaagacattcaagctgatcgacgagagcatgaggcgttccagagaaggaacttgatcgaggatgtggtgttataagccacaagacaagtaactaggatggtgtgaggagcagaaagtttacagtgtcgcggctttggccgattgtgattctttttacatgaggaacatttgttgatctttttgccccaccacaagccagtaaaagtatctgttttgcgctggtcttggggaggtttgggtcgtctccatttccccccaatgttaggacaaaatgtacttaccatcttttggagctctgcctgtttggcctcacaatatcaagttcattcgttgttgtctatgcagcatgcctattcacgaattgtctgaatttgttaaccaacaacagatgaaagttcgattggt

SEQ ID NO: 204400 - DNA, 1817 bp, Zea Mays
cgagaacgtgcctttccttctcgctttcactggtaccaggtggcgaccatacagcacggaactccagttcaccgctgcctttcttctactgttcaccccgcgtgcgctcgctcactcgctctctcccctctggctctgagtggcgctagtgggcgaccgccgccgcgtccctccgtcaggtgcccaggtgtagcctcgtcagcccctccgtcaggtcttcgtcggccccctcgccgacgagcacccaccaggcatgagagcgcgcttctagaataatgtctgtgcttacctgcgtgattgaaagcatgggctcatcctgtagcagatcccattctttcgacgaggctgaagcagctgaaaatgcaaagtctgcagacattgaccggaggattttgcaagaaacaaaagccgaacaacacatccacaagctcttacttctcggtgctggagaatcggggaagtctacaatatttaaacaaataaagcttcttttccaaactggctttgacgaggcagagcttaggagctacacatcagtcatccatgctaatgtgtatcagacaattaaagtatgctatactaaaaaggatattatatgagggagctaaagagttagcccaagtggaaccagattcttcaaaatatgtcttatctccagataatcaggagattggagaaaaactatcagaaattggtgccagattggaatacccatcgttgaacaaagaacgtgtacaggatgtaagaaaactatggcaagatccagccattcaggaaacttattcacgtgggagtattctgcaagtcccagactgtgcacagtacttcatggaaaatttggacaaattatctgaagaagattatgtaccgacaaaggaggatgtgcttcatgcaagagtacggacaaatggtgtggtagaaactcagtttagccctctaggagagagcaaaagaggcggagaggtctataggctgtacgatgtaggaggccagagaaacgagagaaggaaatggatccatcttttcgaaggtgttaatgctgtaatattctgtgctgccattagcgagtatgatcagatgttatttgaggatgagacaaagaacagaatgatggagactaaagaactctttgattgggtgctaaagcaaagatgttttgagaaaacctcattcatgttatttcttaacaaatttgacatatttgagagaaaaatacaaaaggtccctttaagcgtgtgcgagtggtttaaagattaccagcccactgcacctggcaaacaggaggtggaacacgcctacgagtttgtaaaaaagaagtttgaggagctctacttccaaagcagcaagcctgaccgtgtcgaccgagtgttcaagatctacagaacaacagccctggatcagaaacttgtaaagaagacattcaagctgatcgacgagagcatgaggcgttccagagaaggaacttgatcgaggatgtggtgttataagccacaagacaagtaactaggatggtgtgaggagcagaaagtttacagtgtcgcggctttggccgattgtgattctttttacatgaggaacatttgttgatctttttgccccaccacaagccagtaaaagtatctgttttgcgctggtcttggggaggtttgggtcgtctccatttccccccaatgttaggacaaaatgtacttaccatcttttggagctctgcctgtttggcctcacaatatcaagttcattcgttgttgtctatgcagcatgcctattcacgaattgtctgaatttgttaaccaacaacagatgaaagttcgattggt

SEQ ID NO: 204401 - DNA, 1822 bp, Zea Mays
gttccattaaaaactaaacacccagaaaaaaaaacacctcctcgttccattctcgtccgtttctcgaccaaacacgctctctctcggcagcgatgcgagaacgtgcctttccttctcgctttcactggtaccaggtggcgaccatacagcacggaactccagttcaccgctgcctttcttctactgttcaccccgcgtgcgctcgctcactcgctctctcccctctggctctgagtggcgctagtgggcgaccgccgccgcgtccctccgtcaggtgcccaggtgtagcctcgtcagcccctccgtcaggtcttcgtcggccccctcgccgacgagcacccaccagcagatcccattctttcgacgaggctgaagcagctgaaaatgcaaagtctgcagacattgaccggaggattttgcaagaaacaaaagccgaacaacacatccacaagctcttacttctcggtgctggagaatcggggaagtctacaatatttaaacaaataaagcttcttttccaaactggctttgacgaggcagagcttaggagctacacatcagtcatccatgctaatgtgtatcagacaattaaaatattatatgagggagctaaagagttagcccaagtggaaccagattcttcaaaatatgtcttatctccagataatcaggagattggagaaaaactatcagaaattggtgccagattggaatacccatcgttgaacaaagaacgtgtacaggatgtaagaaaactatggcaagatccagccattcaggaaacttattcacgtgggagtattctgcaagtcccagactgtgcacagtacttcatggaaaatttggacaaattatctgaagaagattatgtaccgacaaaggaggatgtgcttcatgcaagagtacggacaaatggtgtggtagaaactcagtttagccctctaggagagagcaaaagaggcggagaggtctataggctgtacgatgtaggaggccagagaaacgagagaaggaaatggatccatcttttcgaaggtgttaatgctgtaatattctgtgctgccattagcgagtatgatcagatgttatttgaggatgagacaaagaacagaatgatggagactaaagaactctttgattgggtgctaaagcaaagatgttttgagaaaacctcattcatgttatttcttaacaaatttgacatatttgagagaaaaatacaaaaggtccctttaagcgtgtgcgagtggtttaaagattaccagcccactgcacctggcaaacaggaggtggaacacgcctacgagtttgtaaaaaagaagtttgaggagctctacttccaaagcagcaagcctgaccgtgtcgaccgagtgttcaagatctacagaacaacagccctggatcagaaacttgtaaagaagacattcaagctgatcgacgagagcatgaggcgttccagagaaggaacttgatcgaggatgtggtgttataagccacaagacaagtaactaggatggtgtgaggagcagaaagtttacagtgtcgcggctttggccgattgtgattctttttacatgaggaacatttgttgatctttttgccccaccacaagccagtaaaagtatctgttttgcgctggtcttggggaggtttgggtcgtctccatttccccccaatgttaggacaaaatgtacttaccatcttttggagctctgcctgtttggcctcacaatatcaagttcattcgttgttgtctatgcagcatgcctattcacgaattgtctgaatttgttaaccaacaacagatgaaagttcgattggt

SEQ ID NO: 204402 - DNA, 1099 bp, Zea Mays
atattaaagagattggagaaaaactatcagaaattggtgccagattggaatacccatcgttgaacaaagaacgtgtacaggatgtaagaaaactatggcaagatccagccattcaggaaacttattcacgtgggagtattctgcaagtcccagactgtgcacagtacttcatggaaaatttggacaaattatctgaagaagattatgtaccgacaaaggaggatgtgcttcatgcaagagtacggacaaatggtgtggtagaaactcagtttagccctctaggagagagcaaaagaggcggagaggtctataggctgtacgatgtaggaggccagagaaacgagagaaggaaatggatccatcttttcgaaggtgttaatgctgtaatattctgtgctgccattagcgagtatgatcagatgttatttgaggatgagacaaagaacagaatgatggagactaaagaactctttgattgggtgctaaagcaaagatgttttgaggtccctttaagcgtgtgcgagtggtttaaagattaccagcccactgcacctggcaaacaggaggtggaacacgcctacgagtttgtaaaaaagaagtttgaggagctctacttccaaagcagcaagcctgaccgtgtcgaccgagtgttcaagatctacagaacaacagccctggatcagaaacttgtaaagaagacattcaagctgatcgacgagagcatgaggcgttccagagaaggaacttgatcgaggatgtggtgttataagccacaagacaagtaactaggatggtgtgaggagcagaaagtttacagtgtcgcggctttggccgattgtgattctttttacatgaggaacatttgttgatctttttgccccaccacaagccagtaaaagtatctgttttgcgctggtcttggggaggtttgggtcgtctccatttccccccaatgttaggacaaaatgtacttaccatcttttggagctctgcctgtttggcctcacaatatcaagttcattcgttgttgtctatgcagcatgcctattcacgaattgtctgaatttgttaaccaacaacagatgaaagttcgattggt

SEQ ID NO: 204403 - DNA, 696 bp, Zea Mays
ctcgaatcggcaaaacaccaggggaacgctcccccgagtcgcgaccccgggcaagtttccccacgggcggggcgacgaaatcaccgctctgctccgacgtccagctctactcgcgagcaggacatcaccgcgcgtccaccatctctggcttgctgtcctccgcgcgtcatctccatccctggcttgagtgtgttaagtggaagcaacacatgaagcggacatggagaaggaagctggcatgacactaaaacgcataaagttgacttgtgacgttcatgttttagatgtcttattctactgccaaacttcctagtactccatttttatactatattgtctatctgtacgtgtgaatggagatgatgatattatgtgatgtgatgatggatggattagcttcgttgaatattagatgatattatgtgatgatgatattaaacgggcattgtagtattgatacatgcttcatatttctggatttttagtgatgttttattgtttatgagttttctaaatattccttatttttgtttgattttttctaaatttttgatgtatttttttgctcaagaggggtatttagcacctttctttccaaacaatgccaggaaaatatacctgggaggggagattctctccgggaaataaggtggcatataaaatcccctcctgggttagtttccaagggattttttt

SEQ ID NO: 204404 - DNA, 1199 bp, Zea Mays
aaccaaacagcgagcgcaaggaagaaaggtcgaagcgtcgtctctctcggcacggagcctagtgcccggcctcgtgagatccgaaattcagaagcgaggatggcgacgaccgcgactaggcggtggtggaggcggcacgacggcggcgacgatgacccagacgacctcgtccccatggacacccaagagcaagaagagctggtccggtctctggaggctaagcaggcgcagcaaggccgccgttggaggcgcgtcttcgcggggttcctcctagcggtaccatgcttacttcatggaagatttgcctgcaccaatggtcataattgcagattggatagctgctctagcatgcctatttgctgtgaaaggattactacagaattcaggcccatcaaagaagtggatgtggtattcttgctatgttggcattttggtagccatcttttggacatactacatcttgaggttgccaagaattcgatgggatgttgcatggctcccactcggtcctttgatggctggtgcattgagcctgtatgtggaccatgtgctgctggagtcaatgcaagatatcagcacattgagaagttacatgtataacttcaaggccttgtagttttgagcataatttcccttgcacctatatgcagctatatgtggaacaggttcaggtcatttctccttttttttagtggcagagttgcggtggtaccttgttaaatggtgtgttagcatgaatttttaacctcagagaatacttgtgcatcacttccgctctgtggcgggtgtatgtacaagctgtggtgccaataggcaccgcggctgtttgaaacacccccctgcttcagtgcttctactgatgtccatatttgttgtagaaattgatgatttttgagaggcttaggttgtgtttggttgcgggattgctggggtcgacatacttcttctagtagtagtacaacaggttctagtagtagtataacagggagtggagtactgccatgcttgcgatgatatgtgtgttagattatgtgttgtctgcaggattacagtaagttttcagtacatttccatacagctaaagcagagacaatgtgatttgattttagaggattttacatatggcattcaacctggtttaggtcactgtacctagacagcaacatttcttttctttatctttaaagccggtacaaaac

SEQ ID NO: 204405 - DNA, 1631 bp, Zea Mays
aaccaaacagcgagcgcaaggaagaaaggtcgaagcgtcgtctctctcggcacggagcctagtgcccggcctcgtgagatccgaaattcagaagcgaggatggcgacgaccgcgactaggcggtggtggaggcggcacgacggcggcgacgatgacccagacgacctcgtccccatggacacccaagagcaagaagagctggtccggtctctggaggctaagcaggcgcagcaaggccgccgttggaggcgcgtcttcgcggggttcctcctaggttacgtggccttccttgtctactccagtttccatcatgcttggtctccctgggagctgcggtaccatgcttacttcatggaagatttgcctgcaccaatggtcataattgcagattggatagctgctctagcatgcctatttgctgtgaaaggattactacagaattcaggcccatcaaagaagtggatgtggtattcttgctatgttggcattttggtagccatcttttggacatactacatcttgaggttgccaagaattcgatgggatgttgcatggctcccactcggtcctttgatggctggtgcattgagcctgtatgtggaccatgtgctgctggagtcaatgcaagatatcagcacattgagaagttacatgtataacttcaaggccttgtagttttgagcataatttcccttgcacctatatgcagctatatgtggaacaggcagaatttgatctgggcacaaggtacaatatgtcctaccttagagattttactacaaagtttatgtttattcctgttctttcgttgaaacatgttgaagaggacctcagatcgttagagacttcgctaacgagagcttgccggattgtttaattctctttaggggtacccatacgcacgcgcttgcgccaatcgtgccttattcaatggagaatagtgttgcagatgcaatgtacaacaaaattattgtttttgttttcgaccaagttgtggataccacaccctggaagagttggtggtagattcttcatcaagtatggaatgtctgcgatgcctagctaggtgcttgatggcaacaggtgcatatcaaaactattaattattttcatgtgttcctgcttcaagaacacatgcaatagtaataggtttccattagtttaaatgtcacatgcaaagaagcaaacaccacccagactttcttcttagtttgccattatcacatctgtactcatcatgcacatgaaacttttggttatgtacaactcaaaggtagaaggaagaccttaaggtatgttgtcatagtaattgtgaaatggatttggcactggtatttgatattttctgacttctagcatcactctgaaggcacatgataaagctcgagctttatcgatggtcggacgatgataacgcgctggaagaagtaatgagtagagagtatgttctttatttcttatttatgtacaaattaagatctcacggacgaatttaacaccgtgcgcagggcgcgcggcaatacactagtacagattaaattttgttgattgtgtgcctcttgaacatgcagttaactgtttcctgagcaatgaatgtaagaaaggttaccagacgttccaatgcagtcaaa

SEQ ID NO: 204406 - DNA, 1422 bp, Zea Mays
cttgggtcgtctgcttcgcctcttctatggtgtgtggtcaggtgggtgtgcatcgcgctgacaacatttattatccggatcgccacagtcccgttgctcgtgaaccagttgaaggccacgacgaagctaagagcaataaatccagagatggaagtcattaaagaccagatgaatagtatggatccaaaatcagtgcaggagggacaagctaaaatgaaagcgctgttcaaaaaacatggtgttagtccacttactccaatgaaaggactcctgatccaagggccaatattcatgagctttttctttgccatatcaaacatggttgagaaagtaccttcattcaaaggaggtggaacattgtggtttactgacctgacgactccagattctctttacatcttgcctatgttaacaggactgaccttcttggccacagtggagcttaacttgcaagaaggaatggagggaaatcctatggctggtaaaatgaagtacttttctagaggagtagctgttttgacagtcccatttacaatgaactttgccacggcagttttctgttactggacctcatcaaacatattcaccctgttatatggtcttgttatccggcgaccagctgtgaggaagtggtttgatcttcctgctttggaaaatacgcgttcgctcacggcaaagccagtattcaatatgtttggtggatccaaggcaataccagccgcacagtcaccagtagcgatcgcaggagcccagcaatctggtctggaccaacctgatgcttctgctcttggctataaggtcaaaaatcttgagaagaaagtgaaatccaggggtaaatctcggaaacacaggtaaaattttgtgcatctgtgccccagatgagcaatctgtacttccaccatcggaatgatggatacttgatttgtcctgatatgccccccaaaaatcagattttgtattaggaacctatcttttcgtcgtttttggctgcttttgttttgatttttcaggggggggcgggggtgaaataagccacataaatgtttgacttagtaccagagttgattatacacaaaatgtatttcagtaacttgtgatagttaaaacattggagggtcatcttccaaggattggtatgaaagctacgttgaagttcagggacagtcaatcaacttttgaggcaccattcgacattctgtagcaattggcaattaggttcaaagtgtgctgggcagaattttgtggcctgaatgaatattgagtttgtatgtactaaactgtcttagaataccatttacaggacgtttggatcctttcattttagaggaattggaattcactcaataaagtaacttatttagtttggaatttgacattccaccactttctaaaattcagatataaacctatcttaaattcagg

SEQ ID NO: 204407 - DNA, 1340 bp, Zea Mays
cgaaaccaagaacctccatggacggtcgaacttgtctgagcagaagatatgcaataaatccagagatggaagtcattaaagaccagatgaatagtatggatccaaaatcagtgcaggagggacaagctaaaatgaaagcgctgttcaaaaaacatggtgttagtccacttactccaatgaaaggactcctgatccaagggccaatattcatgagctttttctttgccatatcaaacatggttgagaaagtaccttcattcaaaggaggtggaacattgtggtttactgacctgacgactccagattctctttacatcttgcctatgttaacaggactgaccttcttggccacagtggagcttaacttgcaagaaggaatggagggaaatcctatggctggtaaaatgaagtacttttctagaggagtagctgttttgacagtcccatttacaatgaactttgccacggcagttttctgttactggacctcatcaaacatattcaccctgttatatggtcttgttatccggcgaccagctgtgaggaagtggtttgatcttcctgctttggaaaatacgcgttcgctcacggcaaagccagtattcaatatgtttggtggatccaaggcaataccagccgcacagtcaccagtagcgatcgcaggagcccagcaatctggtctggaccaacctgatgcttctgctcttggctataaggtcaaaaatcttgagaagaaagtgaaatccaggggtaaatctcggaaacacaggtaaaattttgtgcatctgtgccccagatgagcaatctgtacttccaccatcggaatgatggatacttgatttgtcctgatatgccccccaaaaatcagattttgtattaggaacctatcttttcgtcgtttttggctgcttttgttttgatttttcaggggggggcgggggtgaaataagccacataaatgtttgacttagtaccagagttgattatacacaaaatgtatttcagtaacttgtgatagttaaaacattggagggtcatcttccaaggattggtatgaaagctacgttgaagttcagggacagtcaatcaacttttgaggcaccattcgacattctgtagcaattggcaattaggttcaaagtgtgctgggcagaattttgtggcctgaatgaatattgagtttgtatgtactaaactgtcttagaataccatttacaggacgtttggatcctttcattttagaggaattggaattcactcaataaagtaacttatttagtttggaatttgacattccaccactttctaaaattcagatataaacctatcttaaattcagg

SEQ ID NO: 204408 - DNA, 1889 bp, Zea Mays
cgcctcgcctagtcgcttcccactgcgcgccgccacgcaccagcccagccagccatggcgttcgccgcgcggaggagcatcgccacccggctctctcaccatctcacgcgacgcctccatccctgcgttccacattcgcgtacctccgactccctcgacgagcaggcgtcgagaccctcgccaccgctcccgctcccgctcccaccacttcacgtccagctcaagcaacgttctagagaagtccaaatcctaggcttcctccctttctcgctccgcctcgcggggccaacccgccgcaccttctcgtcctcagcccccgcccccaacctcgaggcggcaccagccgccgaggtcgatgccgcgggcgtgcttgcggatgcagcggaggcggcggcgtcagtgccagcgccgttcccaggggaggtagccgccgcggctgcggactcattcccccctgttgccgcacttcagcacattatcgacgctatccatacctttaccgggctgaactggtgggtgtgcatcgcgctgacaacatttattatccggatcgccacagtcccgttgctcgtgaaccagttgaaggccacgacgaagctaagagcaataaatccagagatggaagtcattaaagaccagatgaatagtatggatccaaaatcagtgcaggagggacaagctaaaatgaaagcgctgttcaaaaaacatggtgttagtccacttactccaatgaaaggactcctgatccaagggccaatattcatgagctttttctttgccatatcaaacatggttgagaaagtaccttcattcaaaggaggtggaacattgtggtttactgacctgacgactccagattctctttacatcttgcctatgttaacaggactgaccttcttggccacagtggagcttaacttgcaagaaggaatggagggaaatcctatggctggtaaaatgaagtacttttctagaggagtagctgttttgacagtcccatttacaatgaactttgccacgttttctgttactggacctcatcaaacatattcaccctgttatatggtcttgttatccggcgaccagctgtgaggaagtggtttgatcttcctgctttggaaaatacgcgttcgctcacggcaaagccagtattcaatatgtttggtggatccaaggcaataccagccgcacagtcaccagtagcgatcgcaggagcccagcaatctggtctggaccaacctgatgcttctgctcttggctataaggtcaaaaatcttgagaagaaagtgaaatccaggggtaaatctcggaaacacaggtaaaattttgtgcatctgtgccccagatgagcaatctgtacttccaccatcggaatgatggatacttgatttgtcctgatatgccccccaaaaatcagattttgtattaggaacctatcttttcgtcgtttttggctgcttttgttttgatttttcaggggggggcgggggtgaaataagccacataaatgtttgacttagtaccagagttgattatacacaaaatgtatttcagtaacttgtgatagttaaaacattggagggtcatcttccaaggattggtatgaaagctacgttgaagttcagggacagtcaatcaacttttgaggcaccattcgacattctgtagcaattggcaattaggttcaaagtgtgctgggcagaattttgtggcctgaatgaatattgagtttgtatgtactaaactgtcttagaataccatttacaggacgtttggatcctttcattttagaggaattggaattcactcaataaagtaacttatttagtttggaatttgacattccaccactttctaaaattcagatataaacctatcttaaattcagg

SEQ ID NO: 204409 - DNA, 897 bp, Zea Mays
tgcaccaactaagagtcatacttggcagttttctgttactggacctcatcaaacatattcaccctgttatatggtcttgttatccggcgaccagctgtgaggaagtggtttgatcttcctgctttggaaaatacgcgttcgctcacggcaaagccagtattcaatatgtttggtggatccaaggcaataccagccgcacagtcaccagtagcgatcgcaggagcccagcaatctggtctggaccaacctgatgcttctgctcttggctataaggtcaaaaatcttgagaagaaagtgaaatccaggggtaaatctcggaaacacaggtaaaattttgtgcatctgtgccccagatgagcaatctgtacttccaccatcggaatgatggatacttgatttgtcctgatatgccccccaaaaatcagattttgtattaggaacctatcttttcgtcgtttttggctgcttttgttttgatttttcaggggggggcgggggtgaaataagccacataaatgtttgacttagtaccagagttgattatacacaaaatgtatttcagtaacttgtgatagttaaaacattggagggtcatcttccaaggattggtatgaaagctacgttgaagttcagggacagtcaatcaacttttgaggcaccattcgacattctgtagcaattggcaattaggttcaaagtgtgctgggcagaattttgtggcctgaatgaatattgagtttgtatgtactaaactgtcttagaataccatttacaggacgtttggatcctttcattttagaggaattggaattcactcaataaagtaacttatttagtttggaatttgacattccaccactttctaaaattcagatataaacctatcttaaattcagg

SEQ ID NO: 204410 - DNA, 1947 bp, Zea Mays
gagaaatgaagcttcggctctgccctcggtggctcagccaccggtttcagcgccagttcaaccccgcacccgcaccccggtgcggcacggatcccaccgggcgcagcgcacgacccacaaagtcagaaagccgctgcccggaaatcgcccgcctccgctccgctacgctctcaccacctcctccgacgtctgatcggcatcgccttcgcctccgctaaaatactcgcggtccacgctctcctccaaatcccatcgccacgccttcgcccgcgcgcgtctctccctcccccacactccgccaccagcgccgaagcagagcagccatggccggttacgagcagcgcgtcgttgccgtcatcatggtcggcggccccaccaaagggacgcggttccggccgctgtcgctgaacgtgcccaagccgctcttccctatcgccggccagcccatggtgcaccaccccatctccgcctgcagccggatccccaacctggcacagatataccttatcgggttctacgacgagcgggaattcgcgctatatgtctcgtctatctccaacgagctcaggatccctgtcaggtacctgcgagaggataagcctcacgggtcagctggagggctctacatctttagagattacatcatggaagacagcccgtcacacatagttctgcttaactgcgacgtctgttctagcttcccccttccagacatgctggaggcccataaaaaatatggaggaatgggtactttactagtcaacaaggtatctgcagagtcagctaaccagtttggcgagttggtagctgatcctgaaacaaacgaactgctgcactatacggaaaagccagagacttttgtgagtgatctcataaattgtggagtatatatatttacccccaatatctttagcgccattgaggatgtcttaaaacagaaaaaagacagagcaaatttgcggcgtgtatctagctttgaagctcttcattcagcaaccaagtatgtattgtgttatactgtttatgtttttttttttacaaatcttctttgtcctgcagttatcacctttctcttcgccattatgtggaggttcttccaaaaactagccaggcctaggctcttccaccagactttgttcggttagatcaagacattttatcccctcgagcaggaaagaaagagctgtacacataccagacacttgatttttgggaacagataaaaaccccagggatgtctttgagatgctctggattatatctttctcggttccgccgtacctctcctcatcttttagcctcaggagatggcaaaagaactgccactattgtaggcgatgtgtatatccatccatctgccaaggtgcatcctacttcaaagattggccccaatgtttctatatcagcaaatgcgcgcgttggagctggtgccaggcttatcaattgcataattctagatggtgttgaaattatggaaaatgcggttgttatacattcaattgtggggtggaagtcatccattggaaaatggtcacgtgtacagggcgaaggtgatcaaaatgccaaacttggcattactattcttggtgaagccgttgatgttgaagatgaagtagtgatagttaacagcatcgtgctcccaaataaaactctcaatgtcagtgtccaagaggagatcatcctataatagccgtcattttttgttttatccctaataagcatgccactgcacaatcttgacttgctgtgctactttgattagcgagtgtggtgtaaaatgtacgaacaactaacacccgagctgctagcttcagattaaagcaagctgttcaaactgccgcagctgtaatccatagagacaaaacactattgaagacttctagcccacaagtgaaattggaagtataatcaaatcctaatataattgtcataatcatattgttaaac

SEQ ID NO: 204411 - DNA, 2036 bp, Zea Mays
ggctcagccaccggtttcagcgccagttcaaccccgcacccgcaccccggtgcggcacggatcccaccgggcgcagcgcacgacccacaaagtcagaaagccgctgcccggaaatcgcccgcctccgctccgctacgctctcaccacctcctccgacgtctgatcggcatcgccttcgcctccgctaaaatactcgcggtccacgctctcctccaaatcccatcgccacgccttcgcccgcgcgcgtctctccctcccccacactccgccaccagcgccgaagcagagcagccatggccggttacgagcagcgcgtcgttgccgtcatcatggtcggcggccccaccaaagggacgcggttccggccgctgtcgctgaacgtgcccaagccgctcttccctatcgccggccagcccatggtgcaccaccccatctccgcctgcagccggatccccaacctggcacagatataccttatcgggttctacgacgagcgggaattcgcgctatatgtctcgtctatctccaacgagctcaggatccctgtcagggtctctggccaatttaaattttaggtacctgcgagaggataagcctcacgggtcagctggagggctctacatctttagagattacatcatggaagacagcccgtcacacatagttctgcttaactgcgacgtctgttctagcttcccccttccagacatgctggaggcccataaaaaatatggaggaatgggtactttactagtcaacaaggtatctgcagagtcagctaaccagtttggcgagttggtagctgatcctgaaacaaacgaactgctgcactatacggaaaagccagagacttttgtgagtgatctcataaattgtggagtatatatatttacccccaatatctttagcgccattgaggatgtcttaaaacagaaaaaagacagagcaaatttgcggcgtgtatctagctttgaagctcttcattcagcaaccaagtatgtattgtgttatactgtttatgtttttttttttacaaatcttctttgtcctgcagttatcacctttctcttcgccattatgtggaggttcttccaaaaactagccaggcctaggctcttccaccagactttgttcggttagatcaagacattttatcccctcgagcaggaaagaaagagctgtacacataccagacacttgatttttgggaacagataaaaaccccagggatgtctttgagatgctctggattatatctttctcggttccgccgtacctctcctcatcttttagcctcaggagatggcaaaagaactgccactattgtaggcgatgtgtatatccatccatctgccaaggtgcatcctacttcaaagattggccccaatgtttctatatcagcaaatgcgcgcgttggagctggtgccaggcttatcaattgcataattctagatggtgttgaaattatggaaaatgcggttgttatacattcaattgtggggtggaagtcatccattggaaaatggtcacgtgtacagggcgaaggtgatcaaaatgccaaacttggcattactattcttggtgaagccgttgatgttgaagatgaagtagtgatagttaacagcatcgtgctcccaaataaaactctcaatgtcagtgtccaagaggagatcatcctataatagccgtcattttttgttttatccctaataaggtctgagtaccaatcacatagtttaagtttattcattctcaccatgtaagcttctattagattgagattattgttttgggtttataccttgcagcatgccactgcacaatcttgacttgctgtgctactttgattagcgagtgtggtgtaaaatgtacgaacaactaacacccgagctgctagcttcagattaaagcaagctgttcaaactgccgcagctgtaatccatagagacaaaacactattgaagacttctagcccacaagtgaaattggaagtataatcaaatcctaatataattgtcataatcatattgttaaac

SEQ ID NO: 204412 - DNA, 1797 bp, Zea Mays
cagccaccggtttcagcgccagttcaaccccgcacccgcaccccggtgcggcacggatcccaccgggcgcagcgcacgacccacaaagtcagaaagccgctgcccggaaatcgcccgcctccgctccgctacgctctcaccacctcctccgacgtctgatcggcatcgccttcgcctccgctaaaatactcgcggtccacgctctcctccaaatcccatcgccacgccttcgcccgcgcgcgtctctccctcccccacactccgccaccagcgccgaagcagagcagccatggccggttacgagcagcgcgtcgttgccgtcatcatggtcggcggccccaccaaagggacgcggttccggccgctgtcgctgaacgtgcccaagccgctcttccctatcgccggccagcccatggtgcaccaccccatctccgcctgcagccggatccccaacctggcacagatataccttatcgggttctacgacgagcgggaattcgcgctatatgtctcgtctatctccaacgagctcaggatccctgtcaggtacctgcgagaggataagcctcacgggtcagctggagggctctacatctttagagattacatcatggaagacagcccgtcacacatagttctgcttaactgcgacgtctgttctagcttcccccttccagacatgctggaggcccataaaaaatatggaggaatgggtactttactagtcaacaaggtatctgcagagtcagctaaccagtttggcgagttggtagctgatcctgaaacaaacgaactgctgcactatacggaaaagccagagacttttgtgagtgatctcataaattgtggagtatatatatttacccccaatatctttagcgccattgaggatgtcttaaaacagaaaaaagacagagcaaatttgcggcgtgtatctagctttgaagctcttcattcagcaaccaaggctcttccaccagactttgttcggttagatcaagacattttatcccctcgagcaggaaagaaagagctgtacacataccagacacttgatttttgggaacagataaaaaccccagggatgtctttgagatgctctggattatatctttctcggttccgccgtacctctcctcatcttttagcctcaggagatggcaaaagaactgccactattgtaggcgatgtgtatatccatccatctgccaaggtgcatcctacttcaaagattggccccaatgtttctatatcagcaaatgcgcgcgttggagctggtgccaggcttatcaattgcataattctagatggtgttgaaattatggaaaatgcggttgttatacattcaattgtggggtggaagtcatccattggaaaatggtcacgtgtacagggcgaaggtgatcaaaatgccaaacttggcattactattcttggtgaagccgttgatgttgaagatgaagtagtgatagttaacagcatcgtgctcccaaataaaactctcaatgtcagtgtccaagaggagatcatcctataatagccgtcattttttgttttatccctaataagcatgccactgcacaatcttgacttgctgtgctactttgattagcgagtgtggtgtaaaatgtacgaacaactaacacccgagctgctagcttcagattaaagcaagctgttcaaactgccgcagctgtaatccatagagacaaaacactattgaagacttctagcccacaagtgaaattggaagtataatcaaatcctaatataattgtcataatcatattgttaaac

SEQ ID NO: 204413 - DNA, 2212 bp, Zea Mays
gccgtcgcgtcgatgcaagttgagacgtccctgcctggctgcctggctccctgccgcaaccgcatcaacgacgcacggcgccacggccacggcacggcaccacgcgctcagacgtccacgggctaccaaccccagctcaccgcactcaacccattgctgccacggcgatcacctcacccaccccgcgcacttttctcatcgcgccaacgcaaacaccacagcgcagcagcaagcgagctaactggagtacaaagcaagccaattcgctctgtgcctgtgccgctgcctaccgtcgcgcgagacgggcgagctcctctcccggccgccgacgccgcgggggattccttttccccggaatgctctgccgctccgtccgggcggaagaggagcactaggcggcggctcggatggggcgcccggggtacatcacggtgcccatactctcggtgctcgccgcgatcggctatgtctactacaccacggtgttcctggcgatccccgcgtggctggggctctcctcggcgaccgggctcgccaacgccgcggtcttcagcgcgctcgccgccgcctgcgtcgctacctacgccgtcgccgtatcgcgcgacccgggccgcgtgccagcgtccttcgtgcccgatgtcgaggacgccgggagccccatccacgagatcaagcgcaagggtggtgatttgagatactgccagaaatgttcgcattataaacctcctcgagcgcaccattgtcgtgcctgcaaaagatgtgttctaagaatggaccaccactgtatatggattaataactgtgttgggcatgagaactacaagatattcctagtttttgttatgtatgctgtaattgcaagcttctattctatggttctcattatagggggtgctgtgcatttacctaaagatgaacaaccaagcagtgattcttctagaacatctatagttgtttgtggggttcttctgtgccctttagcattggcactaatggtcctattgggttggcatgtttacctcatcttacataataagactactatcgagtatcatgaaggagttagggctacatggttggctgaaaaggctggaaacgtttatcatcatccttataacctgggaatctatgagaacctagtttcggtgctaggtcctaacatgttgtgctggctgtgcccaatatcaaggaacatcggaaatggtgttcgtttccgcacatcatatgacactccactatcaacttcagcaatgtgatgcacaccatatatatctgctaaatcgcaaaagaaactcaggtgcccacacaaagtgctaggtttgctattcttcacagttctgatttttagcatttaaccaaagcgtttgtgtatccttaaaaggagagtgttttccaatgcttgaacttttgtagtaagggtgtgctacatcaaatccagcgtgtttaggatactgctacatacatcaaatcctaaagcctcctagaatctgtcattaggaatttttagagatgctgacatacttagatttttctctctttttggggacattcttgatcaaataagtaattattgcttgtgtagtagactagagtgggctgtattaacacacactaaaaaaaacggaaagaaaaggaaagatgtactcgtggttgttctgttgtaaaattatgtccaaactggtttttttttgtcgtgaaagctcgtcagctcgtgtattgttttgtcagatagtacataggagtaatgagtgttaaggaccaatcaaccaaatactattttatgtatacacttgttgagaaatacacgtggatatagctgtttgcacatatgggtgtatcctatttgttttgtgagctgtaccagcacgcgttactcgttatctctgccgcctcgcctggaatctggattcctgcatgttcctgattacacagctgatcaagaggtcgtctggctacgaaccttgggaatgaccctgcagagtagtaatcgtctggcacagcattatagacagtcaatgcaaggctgggctagcgaatcacttcctgcattggctgaaaccctgagcgagaggcagaatagtctgcacgcatactcggaggcccggcgcagaccgtaaagcagtacctctgttgaccagcagcgtatgcctctttactgtgaaggcacgcataggccgttgagaatttctagcggataaaatgctattgaaaa

SEQ ID NO: 204414 - DNA, 2217 bp, Zea Mays
gccgtcgcgtcgatgcaagttgagacgtccctgcctggctgcctggctccctgccgcaaccgcatcaacgacgcacggcgccacggccacggcacggcaccacgcgctcagacgtccacgggctaccaaccccagctcaccgcactcaacccattgctgccacggcgatcacctcacccaccccgcgcacttttctcatcgcgccaacgcaaacaccacagcgcagcagcaagcgagctaactggagtacaaagcaagccaattcgctctgtgcctgtgccgctgcctaccgtcgcgcgagacgggcgagctcctctcccggccgccgacgccgcgggggattccttttccccggaatgctctgccgctccgtccgggcggaagaggagcactaggcggcggctcggatggggcgcccggggtacatcacggtgcccatactctcggtgctcgccgcgatcggctatgtctactacaccacggtgttcctggcgatccccgcgtggctggggctctcctcggcgaccgggctcgccaacgccgcggtcttcagcgcgctcgccgccgcctgcgtcgctacctacgccgtcgccgtatcgcgcgacccgggccgcgtgccagcgtccttcgtgcccgatgtcgaggacgccgggagccccatccacgagatcaagcgcaagggtggtgatttgagatactgccagaaatgttcgcattataaacctcctcgagcgcaccattgtcgtgcctgcaaaagatgtgttctaagaatggaccaccactgtatatggattaataactgtgttgggcatgagaactacaagatattcctagtttttgttatgtatgctgtaattgcaagcttctattctatggttctcattatagggggtgctgtgcatttacctaaagatgaacaaccaagcagtgattcttctagaacatctatagttgtttgtggggttcttctgtgccctttagcattggcactaatggtcctattgggttggcatgtttacctcatcttacataataagactactatcgagtatcatgaaggagttagggctacatggttggctgaaaaggctggaaacgtttatcatcatccttataacctgggaatctatgagaacctagtttcggtgctaggtcctaacatgttgtgctggctgtgcccaatatcaaggaacatcggaaatggtgttcgtttccgcacatcatatgacactccactatcaacttcagcaatgtgatgcacaccatggagggagtatctgctaaatcgcaaaagaaactcaggtgcccacacaaagtgctaggtttgctattcttcacagttctgatttttagcatttaaccaaagcgtttgtgtatccttaaaaggagagtgttttccaatgcttgaacttttgtagtaagggtgtgctacatcaaatccagcgtgtttaggatactgctacatacatcaaatcctaaagcctcctagaatctgtcattaggaatttttagagatgctgacatacttagatttttctctctttttggggacattcttgatcaaataagtaattattgcttgtgtagtagactagagtgggctgtattaacacacactaaaaaaaacggaaagaaaaggaaagatgtactcgtggttgttctgttgtaaaattatgtccaaactggtttttttttgtcgtgaaagctcgtcagctcgtgtattgttttgtcagatagtacataggagtaatgagtgttaaggaccaatcaaccaaatactattttatgtatacacttgttgagaaatacacgtggatatagctgtttgcacatatgggtgtatcctatttgttttgtgagctgtaccagcacgcgttactcgttatctctgccgcctcgcctggaatctggattcctgcatgttcctgattacacagctgatcaagaggtcgtctggctacgaaccttgggaatgaccctgcagagtagtaatcgtctggcacagcattatagacagtcaatgcaaggctgggctagcgaatcacttcctgcattggctgaaaccctgagcgagaggcagaatagtctgcacgcatactcggaggcccggcgcagaccgtaaagcagtacctctgttgaccagcagcgtatgcctctttactgtgaaggcacgcataggccgttgagaatttctagcggataaaatgctattgaaaa

SEQ ID NO: 204415 - DNA, 1585 bp, Zea Mays
caagaaacgagtatattggtagcgaccctcgacccagaaacggcgtccccgacttggataagcaggggtggtgatttgagatactgccagaaatgttcgcattataaacctcctcgagcgcaccattgtcgtgcctgcaaaagatgtgttctaagaatggaccaccactgtatatggattaataactgtgttgggcatgagaactacaagatattcctagtttttgttatgtatgctgtaattgcaagcttctattctatgggggtgctgtgcatttacctaaagatgaacaaccaagcagtgattcttctagaacatctatagttgtttgtggggttcttctgtgccctttagcattggcactaatggtcctattgggttggcatgtttacctcatcttacataataagactactatcgagtatcatgaaggagttagggctacatggttggctgaaaaggctggaaacgtttatcatcatccttataacctgggaatctatgagaacctagtttcggtgctaggtcctaacatgttgtgctggctgtgcccaatatcaaggaacatcggaaatggtgttcgtttccgcacatcatatgacactccactatcaacttcagcaatgtgatgcacaccatatatatctgctaaatcgcaaaagaaactcaggtgcccacacaaagtgctaggtttgctattcttcacagttctgatttttagcatttaaccaaagcgtttgtgtatccttaaaaggagagtgttttccaatgcttgaacttttgtagtaagggtgtgctacatcaaatccagcgtgtttaggatactgctacatacatcaaatcctaaagcctcctagaatctgtcattaggaatttttagagatgctgacatacttagatttttctctctttttggggacattcttgatcaaataagtaattattgcttgtgtagtagactagagtgggctgtattaacacacactaaaaaaaacggaaagaaaaggaaagatgtactcgtggttgttctgttgtaaaattatgtccaaactggtttttttttgtcgtgaaagctcgtcagctcgtgtattgttttgtcagatagtacataggagtaatgagtgttaaggaccaatcaaccaaatactattttatgtatacacttgttgagaaatacacgtggatatagctgtttgcacatatgggtgtatcctatttgttttgtgagctgtaccagcacgcgttactcgttatctctgccgcctcgcctggaatctggattcctgcatgttcctgattacacagctgatcaagaggtcgtctggctacgaaccttgggaatgaccctgcagagtagtaatcgtctggcacagcattatagacagtcaatgcaaggctgggctagcgaatcacttcctgcattggctgaaaccctgagcgagaggcagaatagtctgcacgcatactcggaggcccggcgcagaccgtaaagcagtacctctgttgaccagcagcgtatgcctctttactgtgaaggcacgcataggccgttgagaatttctagcggataaaatgctattgaaaa

SEQ ID NO: 204416 - DNA, 3640 bp, Zea Mays
aaaaaaacacgcatcatcccctcctgtccgagatatttgtgcagcgccgcaaaagcgcatatccccccggccctctcgctccgccgctccgtgcgagctcccgctcccgacacgcttcccgcccgccagatcggtcccgcgcgcctcttctgcctgcatccgcgcccgcgaccaccgcttctaggtttagggttccggcagagtaggcggtgagatgggtgtgccggcgttctaccggtggctggcggagaagtacccgatggtggtggtggacgtggtggaggaggagcccgtcgagatcgagggcgtccgggtccccgtcgacacctccaagcccaaccccaacggcctcgagttcgacaacctctacctcgacatgaacggcatcatacacccctgcttccaccccgaggataggccctctccaacaacatttgctgaggttttccagtgcatgttcgattacatcgatagactcttcatcatggttcgccctaggaagcttatgtacatggccattgatggtgtggctccacgtgctaaaatgaaccaacagcgttctagacgattcagagctgcaaaagatgcagctgatgcggctgcagaggaagaacggttgcgtgaagagtttgagagggaaggaagaaggcttcctgcaaaacaacaatcacaaacttgtgattctaatgttattactccaggaaccgagtttatggctgttctttcagttgcgttacagtactacattcatcaaagactgaattatgatcctggatggaaaaaaatcaaagttattctatctgatgccaatgttcctggcgaaggggagcataaaataatgtcgtatattcgtggtcaacggaatctccctggatttaatccaaacacacgccattgcttatatggcctggatgcagacctcataatgttagctttagcaactcatgaagtacacttctctatattgagagaggtagtttttacacctgggcagcaggacaaatgcttcttatgtggtcaggtggggcatctagccgctaattgtgaaggaaaggcaaagagaaaagctggggaatacgatgagaaaggtgaagctattgttccaaagaaaccataccagttcttgaatatctggacccttcgggagtacttagaatatgagttcagaatgccaaatccgcctttccagattgattttgaacggattgttgatgatttcatcttcatgtgctttttcgttggcaacgattttcttccgcatatgccaacactagagatcagggagggagctatcaatctattaatggctgtgtacaagaaagaatttccttcaatgggtggctatttaacagattcttgcacgccggatctgaatagagtcgaacacttcattcaagcagttggctcttatgaggataaaatatttcagaaaagggcgcgtttgcatcagcgtcaagcagaaagaataaaacgggaaaaggcccaagcaaagcgcggggatgatctggatccccatgtcagagatgatcttattgtacctgtttcaaatttccgagggtcccgccttgcatctggagcagtaccttcaccatatgaacagaatggatctcagagagaaaggtacaaccaaactcggaaagctccaagagtatcatcatcaggttccagcattgctgctgctatcgttgaggctgaacaagatcttgaagcacaggagcgtgaaaataaagaagagttgaagtctatgcttaaggatgctcttcgtgagaaatcagatgtcttcaattctgaaaattcagaggaggacaaggtaaagcttggagaaccaggatggagggataggtactatgaagagaagtttggggcaaggacacctgaacggatggaagaaatacggagggatgttgctctcaaatatactgaaggattgtgttgggttatgcactactactatgaaggggtgtgctcatggcaatggttttatccttatcattatgctccttttgcttcggatttaacgagtctgagtcagctcaatataactttcgaacttgggtcaccattcaagccatttgatcagctaatgggggttttccctgctgcaagtgcccatgcacttcctttaaagtatcggcaactgatgactgatccaaattcaccaataattgatttttatccaactgattttgaagtagatatgaatgggaaaagattctcttggcaggggatagcaaaactgccctttatagaagaagatcggttgctggctgagattaaaaaagttgaggatactttgacgcctgaagaagcaaggagaaacagtaccatgtgcaatatgctttttgtgaatggcgcccattcactttctccctatatctactctctcaacagtaaattcgggcatctgccagacaaagaccgtggtgcaatcaaagaaaaacttgatccttcagctagtggaggaatgaatggttacattgcactctgtggtggggacccgtcccctcctgtcttcagatctcctgtagatgggcttgaggacatcatggataatcaagtgatatgctcaatctacaagcttccagatccacacaagcacatcgctcgtccaccagctggtgttatcatacccaagaagagtgtagaagccggtgatctgaaaccaccaccagtgctgtggcatgaagacagcggtaggaggcctcatgataacaaccaccggaggccttatgataacagcaacaggcaaaacccatcaggagctctatctggccgccaactcggggaagctgcccatcgacttgttgtaaacagcttgaatgttcggggtggtgggcaaaataattccccatctatgccatatcagacaatgatgagtggtatgaactatccaaatggaaggcatcatgtgggtaaccatggagtgcctccgagaatggaacagcctgctggtcgttctggctggcatgtttctgatgataacatgaccaatggtcaagcagcttatggtcagtatcagcctgaaaggttgggaccttcccggcatgaacgaggtaaccatggaaggcaacagtataacccatatgcaagagataaccaccatgattctagtggaagagttcagccacctggataccatcaaaaccgtggcaacccacagtctgctgctccatcagcaggtcctggactgtatgggccataccccccagcatatgctggtggttattctgggggataccagcctgtaccatatgggggtcaacaatggcagcagcgaccttatggaggcgggacaccccccacaagacctaactcacaccaatcacaaaaccgttatggtaccttagacagaagttctaacaagaggtcctcagatgtagaagaaaatgagcttttggaccttgatcttgacgaccttgaggatctcacagatgccctcggcgagtcattcctggatttcttccttctctatttcttgggcggctttggtatgtcgggtattgggttatttcttgaccgctacttttggggagatatgccaacaggtcatatatctggatgctcatcaaactctgcgagtcaacgtttggttccggaggcagttaggagtggaacgactccgtctcagagagccaattga

SEQ ID NO: 204417 - DNA, 1187 bp, Zea Mays
cacaggcacagatctcatctggtgtgtagtagactcgtcgtctcagctcgcgcgtgctcaccactgacctaccccgcttcaaaacagccaaactggaaaaaaagattctccgtccacgcctcgtcccaaccctagccccgtcgatctcgcatggccaccggcccgcgatctctccacgccctcctcggcggcggcgcaggcctcttccacctcttcctaaccttgaggtttcagatgcagttgttgaaaaggctgcagattatgctcttgtatggatcaataggctgctggctgtcggtcatgacatcgccatcaagagaaataggaaagtttttataaaggtgatattgattttgtggctggtttcatttgttggaatgctcttcaactttcttacactcatttacattggtgtaatgctttctctgttggttccaccactctatgagaagtatcaggatcaggttgatgaaaaggttggcgtagcgcacagtataatatcgaggcacataaataccattgttatcagggctgggcaatcagccaaggagaagaagactgaataaaagaattgttttgatgtattgtggaacatctctggttgtcaagtggagttatgatagtgggcttttcatctttggactctccatatggccctccacttacattagttctcgatatgctgatctgaggttttgatgtgcgctgttgatttcaggaaatgagacggcttgtgtatttttttctttttgaacatgaggtttactatgggcgcatatcttactcgaaatgatattttgagaaattgcaactcgtgcatacaagtgtgtgggctgcttgcgctgttagccatatgatctctctgtcactgattttaattttaggctgctctgacgaactctgtggagctcattcgatgcccatctgctggtagctcgttttctgaaatactaataagatgtattttgcaaagacagctgtaccgtgtgaatgaatgggttattttgtcgacgattctgtaaggtgtagagaagtctttatcagtggacttttaccgtcaatttctgttccgatatatcaattgctagagcatcaattgcagattaaaaggtttatttacgaaatgtcatctattgacatatattttatgtactaaacatgcatgtaatttgatttatcgtttgtcg

SEQ ID NO: 204418 - DNA, 2589 bp, Zea Mays
agataacacaatttatatgataagagtttgaaataggatgcaagagctgcctcatgctctcattttgcctagcaatagccaaaaaaaatttcgttcgtgtgcacgccgattttcaaagaaaataaaaaagcgagggtaaggaaactcagattaggttatatttggataatctagtattaacttcaactatcaacgcatgtgaattgaggtcatacagcgtaaagattctccgctccccggccgcaaatcccccactggccagtggccaccaccaccgcctcgattcgccacgtttggttctgctgaggtcgggatttggtgtgccgagctattccttgctcaattggatctcctccgcgcgattcgattcgattcgattcggttcggttcgttccaatcggggttttgctacttccgctgccaccggtgtgctccgagctgctcaagctgcgcgccggatacctggctgctcgatctgattcggtctccaacaccagccccctccgcggccgccgctccccgctgaccccggcgccatttcgacccgcgcggccgatccttggatggttccgatcaatcgggaccaagagacccaaggcttcatcagctcacccggcccccggcggcggtcgatccatggccggggagaaagcgccgcgcgcgttccccatcgaggagcttccaggccacctcatcggggaggtcctgacctcgggcgggctcgcggccgccgacctcgccaggctcgaggccacctgccgcgcgctcaggccgctcgccgaatacgccgcgtccaagctctgcgccgcgcgggcggcgttcgcggctatggggcccgccgcgcgtggggggctgctagagaggtgcgggggaagctggaagaaggtgctcaggttcctgcagtccgtcgagcagtcgtcaggcacggtcgagaccacatcgggcagcatgcaagtagccacaggaagatatcacacacttttggtccatgactcttctgtctattcttgtgggtccagcttgtgtggtgtgctaggtcatggcccagatactacacagtgtgcggcattcagtcgggtttccttcccatcactttcttgtgttataaacatctctgcttcacacaaccatgctgcttttgttttggaatctggggaggttttcacctgtggtgataactcatcattatgctgtggtcatggcgaagtgggaagaactatatttcgaccaatgcaagtagaagcgcttaaagggattccctgcaagcaggttgctactggtctaagttttactgtgattcttactagggatggacaagtatatacttgtggaagtaatacgcatggccaacttggtcatggtgacaccatagacagggccactccaaagcttattgaattgtttgaaggctccactccggtggtgcagattgcagccggtgcaagctacacgtttgctgtaacagatgatggaacagttcattcctttgggtcttgtactaatttctgccttggacatggggatcagcatgatgaacttcttccacgtgcaatccaatcatttaagtggagaaacattcatgtagtccgtgtttctgctggagatgagcatgccgtggctcttgatgcactaggatatgtctggtgcagtggcgagaggtatctcactgagtcaccagtcgtgggtttttcgaagcagtctctccacatttgcgggtgaaggcttgcctcagtttatccctttctcagaccacttatgtgggagcctccggtttatacatggggcaaaggatactgtggagccttaggccatggtgatgagaatgataaaactagcccagaattgatcagcagcttgaagggccaagttgctgtgcaggtatgtgcaaggaagagaaagacatttgttctcacggacaagggctcagttgttgcatttggatggatgggctttgggagcttagggtttcccgaccgaggaccgttggacaaagtaatgaggccccgcgctcttgagagcctgcaggatcactacgtctcccaaataagcaccggactgtaccacactgttgcagtgacaagtaagggcattgtgttcgggtttggggacaatgagagagcccaacttgggcaggagtacattcgtgggtgcttaaaacctactgagataatgttccaaaagagcatggaagacataccgattgcggcgcctagtggttgacttgaatgccatcattttggacactgttgcctacatgtgttgtatttatatcggaattcttgtcggcaagtgtattttatacttcgtgctttgtgagtaatctgggtgaacgggggaaagacggaagtggttggaattggaggacagtgttgtgtagccaaagaagcatatagtttagtaacgtgtaatgtatcgaataattcaacccaccatttttcttctgtacaaaatttattggtgtgtttgtatttttttctctcttgtccccttcatgttttcttggttctgtgctagcaactgttgagtaaatagcgtttgctcccctggaacttgttatattagtgcctaatcttgctagtttctatcgcc

SEQ ID NO: 204419 - DNA, 2328 bp, Zea Mays
ctcattttgcctagcaatagccaaaaaaaatttcgttcgtgtgcacgccgattttcaaagaaaataaaaaagcgagggtaaggaaactcagattaggttatatttggataatctagtattaacttcaactatcaacgcatgtgaattgaggtcatacagcgtaaagattctccgctccccggccgcaaatcccccactggccagtggccaccaccaccgcctcgattcgccacgtttggttctgctgaggtcgggatttggtgtgccgagctattccttgctcaattggatctcctccgcgcgattcgattcgattcgattcggttcggttcgttccaatcggggttttgctacttccgctgccaccggtgtgctccgagctgctcaagctgcgcgccggatacctggctgctcgatctgattcggtctccaacaccagccccctccgcggccgccgctccccgctgaccccggcgccatttcgacccgcgcggccgatccttggatggttccgatcaatcgggaccaagagacccaaggcttcatcagctcacccggcccccggcggcggtcgatccatggccggggagaaagcgccgcgcgcgttccccatcgaggagcttccaggccacctcatcggggaggtcctgacctcgggcgggctcgcggccgccgacctcgccaggctcgaggccacctgccgcgcgctcaggccgctcgccgaatacgccgcgtccaagctctgcgccgcgcgggcggcgttcgcggctatggggcccgccgcgcgtggggggctgctagagaggtgcgggggaagctggaagaaggtgctcaggttcctgcagtccgtcgagcagtcgtcaggcacggtcgagaccacatcgggcagccttgtgtggtgtgctaggtcatggcccagatactacacagtgtgcggcattcagtcgggtttccttcccatcactttcttgtgttataaacatctctgcttcacacaaccatgctgcttttgttttggaatctggggaggttttcacctgtggtgataactcatcattatgctgtggtcatggcgaagtgggaagaactatatttcgaccaatgcaagtagaagcgcttaaagggattccctgcaagcaggttgctactggtctaagttttactgtgattcttactagggatggacaagtatatacttgtggaagtaatacgcatggccaacttggtcatggtgacaccatagacagggccactccaaagcttattgaattgtttgaaggctccactccggtggtgcagattgcagccggtgcaagctacacgtttgctgtaacagatgatggaacagttcattcctttgggtcttgtactaatttctgccttggacatggggatcagcatgatgaacttcttccacgtgcaatccaatcatttaagtggagaaacattcatgtagtccgtgtttctgctggagatgagcatgccgtggctcttgatgcactaggatatgtttatacatggggcaaaggatactgtggagccttaggccatggtgatgagaatgataaaactagcccagaattgatcagcagcttgaagggccaagttgctgtgcaggtatgtgcaaggaagagaaagacatttgttctcacggacaagggctcagttgttgcatttggatggatgggctttgggagcttagggtttcccgaccgaggaccgttggacaaagtaatgaggccccgcgctcttgagagcctgcaggatcactacgtctcccaaataagcaccggactgtaccacactgttgcagtgacaagtaagggcattgtgttcgggtttggggacaatgagagagcccaacttgggcaggagtacattcgtgggtgcttaaaacctactgagataatgttccaaaagagcatggaagacataccgattgcggcgcctagtggttgacttgaatgccatcattttggacactgttgcctacatgtgttgtatttatatcggaattcttgtcggcaagtgtattttatacttcgtgctttgtgagtaatctgggtgaacgggggaaagacggaagtggttggaattggaggacagtgttgtgtagccaaagaagcatatagtttagtaacgtgtaatgtatcgaataattcaacccaccatttttcttctgtacaaaatttattggtgtgtttgtatttttttctctcttgtccccttcatgttttcttggttctgtgctagcaactgttgagtaaatagcgtttgctcccctggaacttgttatattagtgcctaatcttgctagtttctatcgcc

SEQ ID NO: 204420 - DNA, 2348 bp, Zea Mays
agattctccgctccccggccgcaaatcccccactggccagtggccaccaccaccgcctcgattcgccacgtttggttctgctgaggtcgggatttggtgtgccgagctattccttgctcaattggatctcctccgcgcgattcgattcgattcgattcggttcggttcgttccaatcggggttttgctacttccgctgccaccggtgtgctccgagctgctcaagctgcgcgccggatacctggctgctcgatctgattcggtctccaacaccagccccctccgcggccgccgctccccgctgaccccggcgccatttcgacccgcgcggccgatccttggatggttccgatcaatcgggaccaagagacccaaggcttcatcagctcacccggcccccggcggcggtcgatccatggccggggagaaagcgccgcgcgcgttccccatcgaggagcttccaggccacctcatcggggaggtcctgacctcgggcgggctcgcggccgccgacctcgccaggctcgaggccacctgccgcgcgctcaggccgctcgccgaatacgccgcgtccaagctctgcgccgcgcgggcggcgttcgcggctatggggcccgccgcgcgtggggggctgctagagaggtgcgggggaagctggaagaaggtgctcaggttcctgcagtccgtcgagcagtcgtcaggcacggtcgagaccacatcgggcagcatgcaagtagccacaggaagatatcacacacttttggtccatgactcttctgtctattcttgtgggtccagcttgtgtggtgtgctaggtcatggcccagatactacacagtgtgcggcattcagtcgggtttccttcccatcactttcttgtgttataaacatctctgcttcacacaaccatgctgcttttgttttggaatctggggaggttttcacctgtggtgataactcatcattatgctgtggtcatggcgaagtgggaagaactatatttcgaccaatgcaagtagaagcgcttaaagggattccctgcaagcaggttgctactggtctaagttttactgtgattcttactagggatggacaagtatatacttgtggaagtaatacgcatggccaacttggtcatggtgacaccatagacagggccactccaaagcttattgaattgtttgaaggctccactccggtggtgcagattgcagccggtgcaagctacacgtttgctgtaacagatgatggaacagttcattcctttgggtcttgtactaatttctgccttggacatggggatcagcatgatgaacttcttccacgtgcaatccaatcatttaagtggagaaacattcatgtagtccgtgtttctgctggagatgagcatgccgtggctcttgatgcactaggatatgtctggtgcagtggcgagaggtatctcactgagtcaccagtcgtgggtttttcgaagcagtctctccacatttgcgggtgaaggcttgcctcagtttatccctttctcagaccacttatgtgggagcctccggatactgtggagccttaggccatggtgatgagaatgataaaactagcccagaattgatcagcagcttgaagggccaagttgctgtgcaggtatgtgcaaggaagagaaagacatttgttctcacggacaagggctcagttgttgcatttggatggatgggctttgggagcttagggtttcccgaccgaggaccgttggacaaagtaatgaggccccgcgctcttgagagcctgcaggatcactacgtctcccaaataagcaccggactgtaccacactgttgcagtgacaagtaagggcattgtgttcgggtttggggacaatgagagagcccaacttgggcaggagtacattcgtgggtgcttaaaacctactgagataatgttccaaaagagcatggaagacataccgattgcggcgcctagtggttgacttgaatgccatcattttggacactgttgcctacatgtgttgtatttatatcggaattcttgtcggcaagtgtattttatacttcgtgctttgtgagtaatctgggtgaacgggggaaagacggaagtggttggaattggaggacagtgttgtgtagccaaagaagcatatagtttagtaacgtgtaatgtatcgaataattcaacccaccatttttcttctgtacaaaatttattggtgtgtttgtatttttttctctcttgtccccttcatgttttcttggttctgtgctagcaactgttgagtaaatagcgtttgctcccctggaacttgttatattagtgcctaatcttgctagtttctatcgcc

SEQ ID NO: 204421 - DNA, 1213 bp, Zea Mays
gggatcaaggctgggacagccagcagttgctactggtctaagttttactgtgattcttactagggatggacaagtatatacttgtggaagtaatacgcatggccaacttggtcatggtgacaccatagacagggccactccaaagcttattgaattgtttgaaggctccactccggtggtgcagattgcagccggtgcaagctacacgtttgctgtaacagatgatggaacagttcattcctttgggtcttgtactaatttctgccttggacatggggatcagcatgatgaacttcttccacgtgcaatccaatcatttaagtggagaaacattcatgtagtccgtgtttctgctggagatgagcatgccgtggctcttgatgcactaggatatgtttatacatggggcaaaggatactgtggagccttaggccatggtgatgagaatgataaaactagcccagaattgatcagcagcttgaagggccaagttgctgtgcaggtatgtgcaaggaagagaaagacatttgttctcacggacaagggctcagttgttgcatttggatggatgggctttgggagcttagggtttcccgaccgaggaccgttggacaaagtaatgaggccccgcgctcttgagagcctgcaggatcactacgtctcccaaataagcaccggactgtaccacactgttgcagtgacaagtaagggcattgtgttcgggtttggggacaatgagagagcccaacttgggcaggagtacattcgtgggtgcttaaaacctactgagataatgttccaaaagagcatggaagacataccgattgcggcgcctagtggttgacttgaatgccatcattttggacactgttgcctacatgtgttgtatttatatcggaattcttgtcggcaagtgtattttatacttcgtgctttgtgagtaatctgggtgaacgggggaaagacggaagtggttggaattggaggacagtgttgtgtagccaaagaagcatatagtttagtaacgtgtaatgtatcgaataattcaacccaccatttttcttctgtacaaaatttattggtgtgtttgtatttttttctctcttgtccccttcatgttttcttggttctgtgctagcaactgttgagtaaatagcgtttgctcccctggaacttgttatattagtgcctaatcttgctagtttctatcgcc

SEQ ID NO: 204422 - DNA, 819 bp, Zea Mays
gtcgcacttcgggacacttctccctccgctgcatctcactttctctcccggctgtttcgtcttccttggctttcctcctctctacgcgctttcatttcatccatgtcggcttcctcgtttgctcggcttcagcacaaacgcttcatctgaatttgatctgggcacaaggtacaatatgtcctaccttagagattttactacaaaggggtacccatacgcacgcgcttgcgccaatcgtgccttattcaatggagaatagtgttgcagatgcaatgtacaacaaaattattgtttttgttttcgaccaagttgtggataccacaccctggaagagttggtggtagattcttcatcaagtatggaatgtctgcgatgcctagctaggtgcttgatggcaacaggtgcatatcaaaactattaattattttcatgtgttcctgcttcaagaacacatgcaatagtaataggtttccattagtttaaatgtcacatgcaaagaagcaaacaccacccagactttcttcttagtttgccattatcacatctgtactcatcatgcacatgaaacttttggttatgtacaactcaaaggtagaaggaagaccttaaggtatgttgtcatagtaattgtgaaatggatttggcactggtatttgatattttctgacttctagcatcactctgaaggcacatgataaagctcgagctttatcgatggtcggacgatgataacgcgctggaagaagtaatgagtagagattaactgtttcctgagcaatgaatgtaagaaaggttaccagacgttccaatgcagtcaaa

SEQ ID NO: 204423 - DNA, 1036 bp, Zea Mays
cgcacttcgggacacttctccctccgctgcatctcactttctctcccggctgtttcgtcttccttggctttcctcctctctacgcgctttcatttcatccatgtcggcttcctcgtttgctcggcttcagcacaaacgcttcatctggtattgacatccacctcggctctgtttgtttggcagaatttgatctgggcacaaggtacaatatgtcctaccttagagattttactacaaagatcgttagagacttcgctaacgagagcttgccggattgtttaattctctttaggggtacccatacgcacgcgcttgcgccaatcgtgccttattcaatggagaatagtgttgcagatgcaatgtacaacaaaattattgtttttgttttcgaccaagttgtggataccacaccctggaagagttggtggtagattcttcatcaagtatggaatgtctgcgatgcctagctaggtgcttgatggcaacaggtgcatatcaaaactattaattattttcatgtgttcctgcttcaagaacacatgcaatagtaataggtttccattagtttaaatgtcacatgcaaagaagcaaacaccacccagactttcttcttagtttgccattatcacatctgtactcatcatgcacatgaaacttttggttatgtacaactcaaaggtagaaggaagaccttaaggtatgttgtcatagtaattgtgaaatggatttggcactggtatttgatattttctgacttctagcatcactctgaaggcacatgataaagctcgagctttatcgatggtcggacgatgataacgcgctggaagaagtaatgagtagagagtatgttctttatttcttatttatgtacaaattaagatctcacggacgaatttaacaccgtgcgcagggcgcgcggcaatacactagtacagattaaattttgttgattgtgtgcctcttgaacatgcagttaactgtttcctgagcaatgaatgtaagaaaggttaccagacgttccaatgcagtcaaa

SEQ ID NO: 204424 - DNA, 980 bp, Zea Mays
cgcacttcgggacacttctccctccgctgcatctcactttctctcccggctgtttcgtcttccttggctttcctcctctctacgcgctttcatttcatccatgtcggcttcctcgtttgctcggcttcagcacaaacgcttcatctggcagaatttgatctgggcacaaggtacaatatgtcctaccttagagattttactacaaagagcttgccggattgtttaattctctttaggggtacccatacgcacgcgcttgcgccaatcgtgccttattcaatggagaatagtgttgcagatgcaatgtacaacaaaattattgtttttgttttcgaccaagttgtggataccacaccctggaagagttggtggtagattcttcatcaagtatggaatgtctgcgatgcctagctaggtgcttgatggcaacaggtgcatatcaaaactattaattattttcatgtgttcctgcttcaagaacacatgcaatagtaataggtttccattagtttaaatgtcacatgcaaagaagcaaacaccacccagactttcttcttagtttgccattatcacatctgtactcatcatgcacatgaaacttttggttatgtacaactcaaaggtagaaggaagaccttaaggtatgttgtcatagtaattgtgaaatggatttggcactggtatttgatattttctgacttctagcatcactctgaaggcacatgataaagctcgagctttatcgatggtcggacgatgataacgcgctggaagaagtaatgagtagagagtatgttctttatttcttatttatgtacaaattaagatctcacggacgaatttaacaccgtgcgcagggcgcgcggcaatacactagtacagattaaattttgttgattgtgtgcctcttgaacatgcagttaactgtttcctgagcaatgaatgtaagaaaggttaccagacgttccaatgcagtcaaa

SEQ ID NO: 204425 - DNA, 1053 bp, Zea Mays
cgcacttcgggacacttctccctccgctgcatctcactttctctcccggctgtttcgtcttccttggctttcctcctctctacgcgctttcatttcatccatgtcggcttcctcgtttgctcggcttcagcacaaacgcttcatctggcagaatttgatctgggcacaaggtacaatatgtcctaccttagagattttactacaaagtttatgtttattcctgttctttcgttgaaacatgttgaagaggacctcagatcgttagagacttcgctaacgagagcttgccggattgtttaattctctttaggggtacccatacgcacgcgcttgcgccaatcgtgccttattcaatggagaatagtgttgcagatgcaatgtacaacaaaattattgtttttgtttcgaccaagttgtggataccacaccctggaagagttggtggtagattcttcatcaagtatggaatgtctgcgatgcctagctaggtgcttgatggcaacaggtgcatatcaaaactattaattattttcatgtgttcctgcttcaagaacacatgcaatagtaataggtttccattagtttaaatgtcacatgcaaagaagcaaacaccacccagactttcttcttagtttgccattatcacatctgtactcatcatgcacatgaaacttttggttatgtacaactcaaaggtagaaggaagaccttaaggtatgttgtcatagtaattgtgaaatggatttggcactggtatttgatattttctgacttctagcatcactctgaaggcacatgataaagctcgagctttatcgatggtcggacgatgataacgcgctggaagaagtaatgagtagagagtatgttctttatttcttatttatgtacaaattaagatctcacggacgaatttaacaccgtgcgcagggcgcgcggcaatacactagtacagattaaattttgttgattgtgtgcctcttgaacatgcagttaactgtttcctgagcaatgaatgtaagaaaggttaccagacgttccaatgcagtcaaa

SEQ ID NO: 204426 - DNA, 950 bp, Zea Mays
gcacttcgggacacttctccctccgctgcatctcactttctctcccggctgtttcgtcttccttggctttcctcctctctacgcgctttcatttcatccatgtcggcttcctcgtttgctcggcttcagcacaaacgcttcatctggcagaatttgatctgggcacaaggtacaatatgtcctaccttagagattttactacaaaggggtacccatacgcacgcgcttgcgccaatcgtgccttattcaatggagaatagtgttgcagatgcaatgtacaacaaaattattgtttttgttttcgaccaagttgtggataccacaccctggaagagttggtggtagattcttcatcaagtatggaatgtctgcgatgcctagctaggtgcttgatggcaacaggtgcatatcaaaactattaattattttcatgtgttcctgcttcaagaacacatgcaatagtaataggtttccattagtttaaatgtcacatgcaaagaagcaaacaccacccagactttcttcttagtttgccattatcacatctgtactcatcatgcacatgaaacttttggttatgtacaactcaaaggtagaaggaagaccttaaggtatgttgtcatagtaattgtgaaatggatttggcactggtatttgatattttctgacttctagcatcactctgaaggcacatgataaagctcgagctttatcgatggtcggacgatgataacgcgctggaagaagtaatgagtagagagtatgttctttatttcttatttatgtacaaattaagatctcacggacgaatttaacaccgtgcgcagggcgcgcggcaatacactagtacagattaaattttgttgattgtgtgcctcttgaacatgcagttaactgtttcctgagcaatgaatgtaagaaaggttaccagacgttccaatgcagtcaaa

SEQ ID NO: 204427 - DNA, 1952 bp, Zea Mays
cgggacacttctccctccgctgcatctcactttctctcccggctgtttcgtcttccttggctttcctcctctctacgcgctttcatttcatccatgtcggcttcctcgtttgctcggcttcagcacaaacgcttcatctggtattgacatccacctcggctctgtttgtttggtgagatacagtttcttttctcccccgtcgtctgctccttctcggtgggtatctggttctagattggaaatatccaacgccctctcgctttttaaatccttcaatcttccatatgcctgcttggcactgctagattcgtttaggttttccctacaacatgtgaatatgtcactgcctttttttggataaaatggtttggaagatctgcaaacttcatttttctttttttaggattccacccttctactgaaaggttcgtgttctcttgtttgtgctctccaattttgttttttttctttttcctaggcttcaggttcgtttcttttccgaaaatgatcctttttggttgagctaagttttcctttttatatcctcgtctgtttcgttttaggtggacatctgatttcattcaggtgaactgtttgcatcgaagcggagatttcattttccttttttgtcgatacattgaggttcgaaaagggcactattttacttagctaattgattgagtgcctctgttcttcaaactttttttcaatgtttagggtttgtctggttttagcttttcgagctattccttggtttctgtgctccattctaagacctgtatattgctcgtaactttgactatttgcaaataacagtgttgctattcctgagaagtaatagcagtgttgcttctgattttctacctttccctgagttcttcgtctttattttttttcactttaaccaaatgtagtttttatttcctgctcgttccgaacatttccttgtctctcatttttatatatgtctcctaagatcggttcatgcatccaacccacatcaaaatcaacagacatggtatctattgataaacagaggcaattactattgcagcttgggatcaaacatggtttacaaatttgttgtattactatgggcgtgtaaaaagggtcaattctatgttctaaacttatttccaaacattcaggcagaatttgatctgggcacaaggtacaatatgtcctaccttagagattttactacaaaggggtacccatacgcacgcgcttgcgccaatcgtgccttattcaatggagaatagtgttgcagatgcaatgtacaacaaaattattgtttttgttttcgaccaagttgtggataccacaccctggaagagttggtggtagattcttcatcaagtatggaatgtctgcgatgcctagctaggtgcttgatggcaacaggtgcatatcaaaactattaattattttcatgtgttcctgcttcaagaacacatgcaatagtaataggtttccattagtttaaatgtcacatgcaaagaagcaaacaccacccagactttcttcttagtttgccattatcacatctgtactcatcatgcacatgaaacttttggttatgtacaactcaaaggtagaaggaagaccttaaggtatgttgtcatagtaattgtgaaatggatttggcactggtatttgatattttctgacttctagcatcactctgaaggcacatgataaagctcgagctttatcgatggtcggacgatgataacgcgctggaagaagtaatgagtagagagtatgttctttatttcttatttatgtacaaattaagatctcacggacgaatttaacaccgtgcgcagggcgcgcggcaatacactagtacagattaaattttgttgattgtgtgcctcttgaacatgcagttaactgtttcctgagcaatgaatgtaagaaaggttaccagacgttccaatgcagtcaaa

SEQ ID NO: 204428 - DNA, 747 bp, Zea Mays
tttctgctcaattcgcctgttgctcatcttcagtgggagaaacatggaacctgctctgcccctgtggttcaggatgaattacagtatttcacccttgcccttgacctctacttcaagtataacgttacggaaatgctgtcaagtggatggatacaggtttcaaatggtaaggaatatgcactgagcgatgtcatcgataccatcaaacatgcttttgggggatcaccacaaattgtttgcaagaggggttcaatcgaagaacttaggttatgcttcgacaaagaattgaagcctcgtgattgccttaccacttctttggcgaatggaagtgtatcaaaaagcaagcactgcccgcggtacatcaccttgccaacgtatgatccccttgtgcttgccaattcaactgtagagatcatgacacagttcgatgaatttgaggtgcctgcagctctttatacagcctaaaatgcaattgttgcaatagcagaaggtgctcgcgtgagcacctagaaccaggcacatttatcctgggatattcaatcatttgtacatgtacacttgaaagagaactgacatcttttcaacctgaaaatttataagctttatgtaaccgtgaaggtcggatattgcacatgtaattcgctaaatcaaaactgtatcttgaggtagaattttcaagtagtaataatagagatataagaaacttatcgcccatcatgtctgtcattaatcatgattcatggatta

SEQ ID NO: 204429 - DNA, 1570 bp, Zea Mays
tgaggttcgtgccagggcgctatggtataacttggctgtcaaatatgcaattccaacatttgaatcctccatgggagaggcaagaggaaagggcaacccaaaagacgatgcaaatgaagcggctgatggattagcaagcaggacaagagactgagatccatcctccagacacgcgcacgccaaggatcgcattcgccaagcaacgtcgggtcggcggcgcgggggcgatggagacgcggcggccgcggcgcggctggaacaaacgcttcgtcctcccgctcgcgctcctctgcctcgccgtgctgctccccggcgcgctgctcccgccgtccgcctcggcgtcgtcttcgtcgccggccgcgggaggtggcagcaggaaacgccggtgggttgggtttgactactatgtactggcgctgcagtggccgggcaccatctgccgcgagaccagcaactgctgcgacaccaatggctgctgccgatcacagcctctcaagtggttcacgattcatggtctttggccacagtataactatgggggctggccatcatgctgcagaccaaccagattcaacataaataagatcttaatgttgatgccgatactcgagaagtattggccgtccttgtactgtggttcttcttcaacctgctttggtggaagggggccattttgggtgcatgagtggggtatgcagtttctgaacttgctgggcacgaataacgttctgttctgttacctcttaattgggtcgaggaatctgtttatgttttgctgtgtagcagtggatgcagtttttgcagatatactcctaagaatctaatgttaagataacccatttactcttttctggcagaaactcatgggacctgtgcttaccctgaaatacaggatgaatatgactacttctccacagcactgtatctctacagcaaatacaatgttacgaaagctctgagaaaagcacgtatccggcctacaagcggcagaaaatacgccgttggccatattgttgccgtcattgaatatgcgtttggggcaatgccgtcactcgtctgtaagaacggctcagttcaagaactcaggctctgcttccacaaggattatcagcctcgtgattgcacgcttgaggccggctctgcaccgaacggcagaagctactgccctcgctacatcacgttcccgtcgtacaaaccgtccgtggtggccaatactacggaggggatcaacaaccaatccaatggcgaggttccgagctacatgcgtacgtctgactctgagtagcgtccaggactccaggttctgtgggcctctgccgagccgagtttgtatcaaatatcaatagagcgagacgccacggcgtgcttgcaaaattaccggcccggtatggtcctgtataattctttcattcacagtatcgaatgactggccaccgcgcaccgggatttggaaatgaaatgtgaatgttaatgtatattatattcacttgactgtaccagattcgtgcacaggatagtttgacaacttcgtttttttccaaattattctcatttccttacggccctgttt

SEQ ID NO: 204430 - DNA, 1186 bp, Zea Mays
gtcaaatatgcaattccaacatttgaatcctccatgggagaggcaagaggaaagggcaacccaaaagacgatgcaaatgaagcggctgatggattagcaagcaggacaagagactgagatccatcctccagacacgcgcacgccaaggatcgcattcgccaagcaacgtcgggtcggcggcgcgggggcgatggagacgcggcggccgcggcgcggctggaacaaacgcttcgtcctcccgctcgcgctcctctgcctcgccgtgctgctccccggcgcgctgctcccgccgtccgcctcggcgtcgtcttcgtcgccggccgcgggaggtggcagcaggaaacgccggtgggttgggtttgactactatgtactggcgctgcagtggccgggcaccatctgccgcgagaccagcaactgctgcgacaccaatggctgctgccgatcacagcctctcaagtggttcacgattcaaactcatgggacctgtgcttaccctgaaatacaggatgaatatgactacttctccacagcactgtatctctacagcaaatacaatgttacgaaagctctgagaaaagcacgtatccggcctacaagcggcagaaaatacgccgttggccatattgttgccgtcattgaatatgcgtttggggcaatgccgtcactcgtctgtaagaacggctcagttcaagaactcaggctctgcttccacaaggattatcagcctcgtgattgcacgcttgaggccggctctgcaccgaacggcagaagctactgccctcgctacatcacgttcccgtcgtacaaaccgtccgtggtggccaatactacggaggggatcaacaaccaatccaatggcgaggttccgagctacatgcgtacgtctgactctgagtagcgtccaggactccaggttctgtgggcctctgccgagccgagtttgtatcaaatatcaatagagcgagacgccacggcgtgcttgcaaaattaccggcccggtatggtcctgtataattctttcattcacagtatcgaatgactggccaccgcgcaccgggatttggaaatgaaatgtgaatgttaatgtatattatattcacttgactgtaccagattcgtgcacaggatagtttgacaacttcgtttttttccaaattattctcatttccttacggccctgttt

SEQ ID NO: 204431 - DNA, 1619 bp, Zea Mays
gtcaaatatgcaattccaacatttgaatcctccatgggagaggcaagaggaaagggcaacccaaaagacgatgcaaatgaaggtaacatttgtaggcgtcgtagcttggttttgcttcacgagcacaacaagccatccatctatgatctatcccgctccctccatccgcaagcaaaagctaatcgatcttcccatgatctccttcaattgctactaataaactactcctataatagaatcagttacctcagttgctcgtatagggcatgttctccaagctactccgtccccagtccccaccatttcaaattgcaaataaaactgcaatctcgcagcggctgatggattagcaagcaggacaagagactgagatccatcctccagacacgcgcacgccaaggatcgcattcgccaagcaacgtcgggtcggcggcgcgggggcgatggagacgcggcggccgcggcgcggctggaacaaacgcttcgtcctcccgctcgcgctcctctgcctcgccgtgctgctccccggcgcgctgctcccgccgtccgcctcggcgtcgtcttcgtcgccggccgcgggaggtggcagcaggaaacgccggtgggttgggtttgactactatgtactggcgctgcagtggccgggcaccatctgccgcgagaccagcaactgctgcgacaccaatggctgctgccgatcacagcctctcaagtggttcacgattcatggtctttggccacagtataactatgggggctggccatcatgctgcagaccaaccagattcaacataaataagatcttaatgttgatgccgatactcgagaagtattggccgtccttgtactgtggttcttcttcaacctgctttggtggaagggggccattttgggtgcatgagtgggaaactcatgggacctgtgcttaccctgaaatacaggatgaatatgactacttctccacagcactgtatctctacagcaaatacaatgttacgaaagctctgagaaaagcacgtatccggcctacaagcggcagaaaatacgccgttggccatattgttgccgtcattgaatatgcgtttggggcaatgccgtcactcgtctgtaagaacggctcagttcaagaactcaggctctgcttccacaaggattatcagcctcgtgattgcacgcttgaggccggctctgcaccgaacggcagaagctactgccctcgctacatcacgttcccgtcgtacaaaccgtccgtggtggccaatactacggaggggatcaacaaccaatccaatggcgaggttccgagctacatgcgtacgtctgactctgagtagcgtccaggactccaggttctgtgggcctctgccgagccgagtttgtatcaaatatcaatagagcgagacgccacggcgtgcttgcaaaattaccggcccggtatggtcctgtataattctttcattcacagtatcgaatgactggccaccgcgcaccgggatttggaaatgaaatgtgaatgttaatgtatattatattcacttgactgtaccagattcgtgcacaggatagtttgacaacttcgtttttttccaaattattctcatttccttacggccctgttt

SEQ ID NO: 204432 - DNA, 1439 bp, Zea Mays
gtcaaatatgcaattccaacatttgaatcctccatgggagaggcaagaggaaagggcaacccaaaagacgatgcaaatgaaggtaacatttgtaggcgtcgtagcttggttttgcttcacgagcacaacaagccatccatctatgatctatcccgctccctccatccgcaagcaaaagctaatcgatcttcccatgatctccttcaattgctactaataaactactcctataatagaatcagttacctcagttgctcgtatagggcatgttctccaagctactccgtccccagtccccaccatttcaaattgcaaataaaactgcaatctcgcagcggctgatggattagcaagcaggacaagagactgagatccatcctccagacacgcgcacgccaaggatcgcattcgccaagcaacgtcgggtcggcggcgcgggggcgatggagacgcggcggccgcggcgcggctggaacaaacgcttcgtcctcccgctcgcgctcctctgcctcgccgtgctgctccccggcgcgctgctcccgccgtccgcctcggcgtcgtcttcgtcgccggccgcgggaggtggcagcaggaaacgccggtgggttgggtttgactactatgtactggcgctgcagtggccgggcaccatctgccgcgagaccagcaactgctgcgacaccaatggctgctgccgatcacagcctctcaagtggttcacgattcaaactcatgggacctgtgcttaccctgaaatacaggatgaatatgactacttctccacagcactgtatctctacagcaaatacaatgttacgaaagctctgagaaaagcacgtatccggcctacaagcggcagaaaatacgccgttggccatattgttgccgtcattgaatatgcgtttggggcaatgccgtcactcgtctgtaagaacggctcagttcaagaactcaggctctgcttccacaaggattatcagcctcgtgattgcacgcttgaggccggctctgcaccgaacggcagaagctactgccctcgctacatcacgttcccgtcgtacaaaccgtccgtggtggccaatactacggaggggatcaacaaccaatccaatggcgaggttccgagctacatgcgtacgtctgactctgagtagcgtccaggactccaggttctgtgggcctctgccgagccgagtttgtatcaaatatcaatagagcgagacgccacggcgtgcttgcaaaattaccggcccggtatggtcctgtataattctttcattcacagtatcgaatgactggccaccgcgcaccgggatttggaaatgaaatgtgaatgttaatgtatattatattcacttgactgtaccagattcgtgcacaggatagtttgacaacttcgtttttttccaaattattctcatttccttacggccctgttt

SEQ ID NO: 204433 - DNA, 1455 bp, Zea Mays
caacaagccatccatctatgatctatcccgctccctccatccgcaagcaaaagctaatcgatcttcccatgatctccttcaattgctactaataaactactcctataatagaatcagttacctcagttgctcgtatagggcatgttctccaagctactccgtccccagtccccaccatttcaaattgcaaataaaactgcaatctcgcagcggctgatggattagcaagcaggacaagagactgagatccatcctccagacacgcgcacgccaaggatcgcattcgccaagcaacgtcgggtcggcggcgcgggggcgatggagacgcggcggccgcggcgcggctggaacaaacgcttcgtcctcccgctcgcgctcctctgcctcgccgtgctgctccccggcgcgctgctcccgccgtccgcctcggcgtcgtcttcgtcgccggccgcgggaggtggcagcaggaaacgccggtgggttgggtttgactactatgtactggcgctgcagtggccgggcaccatctgccgcgagaccagcaactgctgcgacaccaatggctgctgccgatcacagcctctcaagtggttcacgattcatggtctttggccacagtataactatgggggctggccatcatgctgcagaccaaccagattcaacataaataagatcttaatgttgatgccgatactcgagaagtattggccgtccttgtactgtggttcttcttcaacctgctttggtggaagggggccattttgggtgcatgaggatgaatatgactacttctccacagcactgtatctctacagcaaatacaatgttacgaaagctctgagaaaagcacgtatccggcctacaagcggcagaaaatacgccgttggccatattgttgccgtcattgaatatgcgtttggggcaatgccgtcactcgtctgtaagaacggctcagttcaagaactcaggctctgcttccacaaggattatcagcctcgtgattgcacgcttgaggccggctctgcaccgaacggcagaagctactgccctcgctacatcacgttcccgtcgtacaaaccgtccgtggtggccaatactacggaggggatcaacaaccaatccaatggcgaggttccgagctacatgcgtacgtctgactctgagtagcgtccaggactccaggttctgtgggcctctgccgagccgagtttgtatcaaatatcaatagagcgagacgccacggcgtgcttgcaaaattaccggcccggtatggtcctgtataattctttcattcacagtatcgaatgactggccaccgcgcaccgggatttggaaatgaaatgtgaatgttaatgtatattatattcacttgactgtaccagattcgtgcacaggatagtttgacaacttcgtttttttccaaattattctcatttccttacggccctgttt

SEQ ID NO: 204434 - DNA, 564 bp, Zea Mays
aacttcgtcaacgttatgttctcttgcaccaactattgcatcaagaaaagccaataccgattgggatgaccccgtttctttggtcacatggaatggctgacaaagtagtattgtttgaagctggccaggctggtccaccgtttttgcaaagcgctggtgttaactgtgagttcaaggcatatccagatctgggtcattcgctttcccaagaagagctactttatcttgagtcgtggatcaagagtcgtctaaatgcctctcaagagaaggacggttaactgattccatcatgcttaagtggcatttatttagtatttttattatacgatacacagatcaactacttgtcctggaatttgttatttggaatttccgattggttatcgttgtcgggtgaataagggcacatagaaccgggatcttctgctggccatggatgttctaaatgcacttgtaacggccctggtatctgacactctcctacaatacaagggctgcagctctagcttgaattgcctggtcaactaaactgtctttgccatggattagcatgttcgtttgaaa

SEQ ID NO: 204435 - DNA, 299 bp, Zea Mays
caagtagctggacactgacgtgcaactccacagcattagacctgtcctctgctgctcagggttttcacaagggttgctggtcaccaccaaaatgaagagtttgcagtgagagggaaggaaccaaaggatgaagttcagatttacacatggaaggatgcgaccctccgcgagctcactgatcttgtgaaagaggttgctcttccagcaagaaaaaggaatgcaaggctttcttttgcatttgtatacccagacaagaatggtcgttttgttgtcagacagcatgtcttggtgggccgtca

SEQ ID NO: 204436 - DNA, 1385 bp, Zea Mays
attaagagaggatgcatgtttatcgtctggtcgccttctcttccccatcatctccgcgcattttatatgcaggcttgcgcctgtcacttctcccctgtccttgctccccctcgatcccgcatcagtgcgtcacattcaccgggaatggcaacgctcaaggtcccagccactgttcctcccgtcgccgatgactgcgaccagctgcgcaaagcattccaagggtggggcacgaacgaggcgctcatcatctccatcctcggccaccgcgacgccgcgcagcgccgcgccatccgccgcgcttacgccgaggcctacggcgaggagctcctccgctccatcacggacgagatctccggcgacttcgagagggccgtgatcctgtggacgctggacccagcggagcgcgacgcggtgctggccaacgaggcggcgcggaagtggaagcccgggaaccgtgtgctcgtcgagatcgcctgcacgcgcacctccgcgcagatcttcgcgaccaggcaggcttatcacgagcggttcaagcgctcgcttgaggaagacatcgctgcgcacgtcactggggacttccgcaagctattggtgccacttgtaagtacttaccgctatgatggaccagaggtcaacacaaggttggcacactcagaagccaaactacttcatgagaagatccatcacaaggcttacagtgatgatgagatcatcagaatcctcaccactaggagcaaacctcagctgattgctacattcaatcattacaatgatgcatttggccaccgaatcaacaaggatctgaaggctgacccccaggacgagtacctcagaacgctgcgggcgatcatccggtgcttcagttgccctgacaggtactttgagaaggtggctaggcaggccatagcggggctaggcacagatgagaactccctgaccagggtcatcaccacccgcgctgaggtggacctcaaactgattaaggaggcgtaccagaagaggaacagcgtgccgctggagcgggccgtcgcgggggacacctccggcgactacgagagcatgctcctcgcgctcctggggcaggagtgatgagccgtactggtgcgctggtgcctttctgaccggcgccgtggtgtttgttcgtgatcgtaataaacctgattgcctagctgtacgtgaggctgtttcttcggtcctggtactgtcgctgcagcatgcatagcagtggaccagtggtgataaataagttactgtgctttcgacgaatgaaccctttttttgtgtctaagttgtggaacctcgagaaagtttttgtgtctaaggctgtctttagtagattgcataagtttaaaataagagataagataagagatgtgctaatagct

SEQ ID NO: 204437 - DNA, 1352 bp, Zea Mays
cgccttctcttccccatcatctccgcgcattttatatgcaggcttgcgcctgtcacttctcccctgtccttgctccccctcgatcccgcatcagtgcgtcacattcaccgggaatggcaacgctcaaggtcccagccactgttcctcccgtcgccgatgactgcgaccagctgcgcaaagcattccaagggtggggcacgaacgaggcgctcatcatctccatcctcggccaccgcgacgccgcgcagcgccgcgccatccgccgcgcttacgccgaggcctacggcgaggagctcctccgctccatcacggacgagatctccggcgacttcgagggccgtgatcctgtggacgctggacccagcggagcgcgacgcggtgctggccaacgaggcggcgcggaagtggaagcccgggaaccgtgtgctcgtcgagatcgcctgcacgcgcacctccgcgcagatcttcgcgaccaggcaggcttatcacgagcggttcaagcgctcgcttgaggaagacatcgctgcgcacgtcactggggacttccgcaagctattggtgccacttgtaagtacttaccgctatgatggaccagaggtcaacacaaggttggcacactcagaagccaaactacttcatgagaagatccatcacaaggcttacagtgatgatgagatcatcagaatcctcaccactaggagcaaacctcagctgattgctacattcaatcattacaatgatgcatttggccaccgaatcaacaaggatctgaaggctgacccccaggacgagtacctcagaacgctgcgggcgatcatccggtgcttcagttgccctgacaggtactttgagaaggtggctaggcaggccatagcggggctaggcacagatgagaactccctgaccagggtcatcaccacccgcgctgaggtggacctcaaactgattaaggaggcgtaccagaagaggaacagcgtgccgctggagcgggccgtcgcgggggacacctccggcgactacgagagcatgctcctcgcgctcctggggcaggagtgatgagccgtactggtgcgctggtgcctttctgaccggcgccgtggtgtttgttcgtgatcgtaataaacctgattgcctagctgtacgtgaggctgtttcttcggtcctggtactgtcgctgcagcatgcatagcagtggaccagtggtgataaataagttactgtgctttcgacgaatgaaccctttttttgtgtctaagttgtggaacctcgagaaagtttttgtgtctaaggctgtctttagtagattgcataagtttaaaataagagataagataagagatgtgctaatagct

SEQ ID NO: 204438 - DNA, 3232 bp, Zea Mays
cttgtcttgtcttatcttttgaactgatgagagtgtacggagcactgctgtggtcgctcgggaaagtcctgaacacaccagaagtcatgcgtgtctacataggttcattcaacgacaagccgatcagggagacagcggctgggccgctgggcatggagctgttccagaaggaacaagatgacttgctctcggacctgaacgacatccccaagaaggcctgcgaccgtcggatcaacgagttcgtgaagcgggcaagggcggctaaagtccacgcgcacataatcagccatctgaagaaagagatgcctgcactgatgggcaaggccaaggctcagcagaagctgctcgacgggctggatcaacagttcgccaaggtccagaaggagctgcacctgccgccaggggacttcccgagcgtggaggagtacagggagctcctgagcgcctacaacttcgacaggttcgagaagctgaggcccaagatggtccagggcgtggacgacatgctggcctacgacatcccggacctcctgaagaagttcaggaacccctacgactgaagccggaaacccactctcttgcctcctcggggaggggtggcagagcttcagcgacggacgaggaggacgtgccggtgcagcagcggttcatctggtcagggaagagaaagatgcggcgccttttcacgactccatctctcttctggattactcagtgctgcagcgtaaactcgcgcgcagttccctgtaaaagctggagcttttctgagcgtgtaggtgcgttggtggaacttgggcccccacccaagatctcacctatctgcactgggctggccggctgtgcccgtcgccaaccaccgtgcttccgccattgcgtcgccgcataaccttggccaagcgtgaacttcatataataccaacttcatataatccgccattactggcaaggcgcatgtcccatgtcgtccgtagaactcgggctgatgacgggtgccactcaacagtcaacacacgggctagggctaattgtatatagaatttcatatactgccagcttcagctttcacagcaaacggaggttttattataaaaaaaaacatcgtgttccaaaccgccggtggtcttccttcctattcaacggctaaaaagtctattggtgtactttgaaaagctgcaggaggaggagagtaaaaaaaaaaaaaaggtggtgcggtgaccgtaggtctggacatgcgtagcgtagccaccggtgccgtgcacgcggtacagcagcagcagcacggacgtgcaccgctgtgtgtcgcttccggacccgtctacgttttacgtggtcataccaaagactccagtcgccaccacagaaatccaaggcgccagccagcacaaggccaaaggccaaaaccaagccggcgggcccgctttccgtcccgtcagattccctcccccgtccgtccgtccgtctctgccccatccctcacccctcctccctactccctaggcagcaaagcagcgagaaagcagctcgcagttcccacccaccaaaccaaactctcctccacaacctcccccgccgcccctcctcttctcggcttctcccctgccttgttcggccccaaaacggcaagagccgacgccagcaaaccctcgggttcgggagggaaggaaggaaggcacgagcagcgcgcctgcctacccgcagctaaccccaaacagcaacgtcgtagccgacgagagcctccgccacctacccaccaactcccgcccgtcgcctccgcttgggttctcgtcgagcagttggtgggcacctaccgcatccagagagagagtgagccactgagccagggcggcaagggggagatgaagaagctgtaccagggcggcaaggggcggcgggtgcacccggcgccggctgacgcatcggcagccgtggcgctgccggccgccgtgctggccctggcgtccgcgctgacggccgaggagcaggaggtgctggcctacctcctgtcctgcggcggcggcggcggccggcaccaccacggccgccgccgcggggcccacccgccggagatgggctgcgcctgcttcggctgctacaagagcttctgggcgcgctgggacgcgtcgcccaaccgccacctcatccaccgcatcatcgacgccgtcgaggaggagggcggggcggggggcccgcgccgccctccccggcgccggcgccgcggtggtggcggtggtggtggccgccgcggcggcggcgacgctgccgacgaggacgccgcggagacgggccccggcgtggaccacgacaacctcccggcgtgcgacggcggctccgggatggacatggaccaccgctgccacggagagtacgacggcgacggcgacggcgacgaggaggaggaggagaccagcagcgtggacggcgacgacgcgtcggtggacagcgagggcggtggcagcgccgagaagagcacggtggggaggctggtgcgcttcatcggggagaaggtttggggcgcctggaactgatcgggctgtggcccaccgccgccgctcgccggttcttgtagattaggggaaggggaccaccagcaaggactgcgtggtctcgtcaaggtcagtactcatcagtgccagtagtggctgttttgatcagggagcgcctcctgctccacgccctttttcctcttattgcttttgtttaatcatggcggatttgttgcactctgatgatgagtgatgacgagcatgccaggattggaggagggtggattatcccatccaatttctcacctctcttctccccctcccctcagcccccctgtaccatatttttgctcctttcgttcggtagtccagttcaacaatgaacttgcaagagaactctcgtcaacattcaatgtgccctgattcatatgcgttgaatgtcgtcagcatttgattcttcctgtcacgagtgcggactgtgatgtttgcgcgaagctttgcacaaaggttagcatcaagctatgcctgcctcgttgtccacgtctgctgcctgcctgcctgtgccaattgccaagggagggaagaggaaagcatagcatcggtgcaaaggcgttgttttttctttttttgggtacccctttccttggttccacacaagctcaagctggttgttttgagcaggcgtgttgcatgcacgcccttgggtgggtggggttctaattctatcgcatctccctgaacaatgcaag

SEQ ID NO: 204439 - DNA, 191 bp, Zea Mays
tccatgaaaatcgtgatctacctgtcggtgcaggacttcttgcagaagagggaaaaggagaagtttgagaaggaggaggccaaaaagcagaaagaggaggcgaggaagaagagggctaagtccaggcagaagagaagaaattattgatctcaggatgaactacccccaccaatttttggagtctcttggat

SEQ ID NO: 204440 - DNA, 1197 bp, Zea Mays
tttactagttgcgggattacgaggggaaaaactatgaggaggtacagccccccttatcgcagcccccccaggaggggatatggtggcagaggaagaagcccccctcctcccaggaggggatatggaggacgcaaggagggtagtggaagccttttggtccgcaacatcccattaagtgtcagagcggaggatcttcgagttccttttgaaaggtttggccctgttcgggatgtttacattccaaaggactattactctggggagcctcgaggatttgcctttgtagagtttgttgatccttacgatgcctctgaagcccagtatcacatgaatcgccaagttttctttggtcgggaaatagctgttgttcttgctgctgagtcacgaaaaaggccagaagaaatgcgcagcagaactagagtaagaggttactctggtcatgaaggtcgccggtcttcttactatggtcggtctcgttctcgctctcctcgctatcggggccgtcctcggtcgagatcatactctcctgctccaaggcgggggaatgactactctgcctctccaaggagacaggaagcccatcgctcatctcctcccaggcgcctgccaaaggagcatgatgaagataagaagcggaggtcctactctcctgccagtagagatgatgctgacaatgtttatgagaagaggtcgcccccagcagacagcgatggatctcctctgcaccgcaggtcccccaaggagtactcgggctcacctcctggatcccgctccaggtccgccgacgattctcctgttgccagtgactgatcgaccgatggatgctacaatatgaatggtatgcgcatgcggtcatcagtcctatgtctttgtcagaccgagctcactaaacttacccccctttgggggtcgatgttgtattgctaagttccgtttgtgctaagtattagcgcatactgctagactgccactgtcgtctgtgctatgcatgcttttgatctcgagtgatgtttgaggaaccagtgatcgtgttgatggtgctgaacattggaacctgcagtacagtgtagcatgatgcttgcttgctgggccacggcccgttcactgggacctgttgcgtttccgtctttcgagtttgattgatgctgctgcgggtgcttttagccgtcctgtgctactactcccttttcgaattag

SEQ ID NO: 204441 - DNA, 1242 bp, Zea Mays
cttacaaaatcgtacagtataaggtttatttttgcgtttattggtgtcggtgctatactctttgtcacatcgatctttggttgtgctggagctagaaatggatgctgcttatctatttactcattcctcattattttgttcatactggtcgagcttgctgcaggaggcttcattttcttcaaccatagctggaaagaggttattccagttgacaaaactggaaactttgacatgatgtacagttttttgaaagagaattggagaattgcaaagtgggttgcacttggagctgttgtatttgaggcattgttgttcactgtagctatcatagtacagtcaggcaaccaaaccgactatgacagcgacgatgagtacatcggcgcaaggtccggaatacggcagccattggtgaaccagcaagctgctgctgctgctgctgatcctagggtgcccaatctcgactaccgcccaatccggaacgacgcatggagccaacggatgagagagaagtacggggtggatagcttcgatccgaacaggtttcagccggccaccatatctcctggagaacaaagaaaccgatgcacgattctctgaggcaagttctacatatatccaaccgcgcaattaacaccgagttgcagagagtatgcgcctggattattcggtgttgcctggctgtgtggcatccggagggcttcacattctcgtctgtatttttttttttggtttacatagtccaaactcagcacaccagtgctgtttttgtaataagtattgaaccaagttcgtgttctagataacgttccaatgtgcataaaaactttccctgttaccagacatgtctgttacggaaagcttttacatcgtcagagatgtccatgcgggcatatgaagctgttgagctttcctgtcgtgcattattgtgacagagcgagcatattcgtatggaaaaaaggcatctgttcctcagctctgctccaaaaggagtgatgtgttcccctgccaaagatccacacaagctatcagtcgtcttacagatcaagatctggctatgacatgttaggtcctgatcagcactgcatattgtgtctgctgtctaaaagctggaaaagtgatgtcgatactgtaagactatgaaagtgcctcgatgtattgcataggaggcttaaaatatatcgagacacatgaaactctaaccctaatgggccagtggtgctagcctacctacacataggaaca

SEQ ID NO: 204442 - DNA, 1343 bp, Zea Mays
gttttcaagtgcttgcctggtttgggcatacgatgaaaaaaaaagaccttcaaattcatcattgtttcgaaagaatagttatttttcctctaaatggttcactgcggatttatgaaaaatagtggtgcagatatggatatcattgatgtcaagtacatacagaaatgcaaattcgtggttgcctctggtattttcgatggttacgacatccctcaccagccatccaatatcagccgccggtctcagaagctgttctgcttcctgatggtggtggacgaagtatctcttgattttatccaaaagaacaccaccgtcaagatcgacagcgctggagggaaatgggttggcatatggcgacttctaacagtgcaccgcctcccattcgacgaacctagaaggaacgggaaaatacccaagatcttgacgcacagactattccctcaagcttggtatagcatttggattgacgggaaaatggagctcatagttgatccgctgcttattctcgagaggtacctctggcgtggaaaatacacattcgcggtggctgtccacaagcatcataggagcatctacgaggagggcgacgcgatcaagcgacggaagcgctacgcccgccctttggttgatcttcagatgaagatgtactattacgaggggatggagccttggagcccgaagaaaaagatgcctggcgatgtgccggagggagccgtgctgatccgggaacacacagcgacgaccaacctgttcagctgcctctggttcaacgaggtgaacctcttcaccccacgcgaccagatcagcttcggctacgtggcgcgcaggctcggcgacgctctcgagctcttcatgttccccaactgcgagtacaactcgctgttcgtcctgcacaggcacacgagggagcactcgtctaaggtggagtgggccaaaacggtcgacgagatcgtggagaaggggctgagggagagtagaggagggttggggctgtggactccgtaccctgcggacctcagctccgtggaactccctgctgtaagaagaacttcgccggcaggataaggctaggctgtcaaagaccacaaagctcccagcctagcctgccgatcctgtgatctttgattcgttcatggttgtacagagtagaactccactgtttgtttgttttttttggcgtagattctgtaggctgacgcttggagtttgttgcttccagttctgtacaacactcatctacggaggtagcacagaaggatttctcacaaaagaaaaatcatgactcgtcaggtctagtatagggatatcaaaacagcattagaagtcgtcacacacaaaacaac

SEQ ID NO: 204443 - DNA, 1460 bp, Zea Mays
attagggcatttggcactgaagcatttgcagatattgttgaatgctaaatgaatgggtctggcatgagccaatcatcaacttgatattctccaagatccatagatgatgaaggttcactgcggatttatgaaaaatagtggtgcagatatggatatcattgatgtcaagtacatacagaaatgcaaattcgtggttgcctctggtattttcgatggttacgacatccctcaccagccatccaatatcagccgccggtctcagaagctgttctgcttcctgatggtggtggacgaagtatctcttgattttatccaaaagaacaccaccgtcaagatcgacagcgctggagggaaatgggttggcatatggcgacttctaacagtgcaccgcctcccattcgacgaacctagaaggaacgggaaaatacccaagatcttgacgcacagactattccctcaagcttggtatagcatttggattgacgggaaaatggagctcatagttgatccgctgcttattctcgagaggtacctctggcgtggaaaatacacattcgcggtggctgtccacaagcatcataggagcatctacgaggagggcgacgcgatcaagcgacggaagcgctacgcccgccctttggttgatcttcagatgaagatgtactattacgaggggatggagccttggagcccgaagaaaaagatgcctggcggtgagtgaaatcacacatgcccacaatactctacacaactgttgttttgtcactttaacgttagcacttcctgaaagaccagctaaagctataacctgcagatgtgccggagggagccgtgctgatccgggaacacacagcgacgaccaacctgttcagctgcctctggttcaacgaggtgaacctcttcaccccacgcgaccagatcagcttcggctacgtggcgcgcaggctcggcgacgctctcgagctcttcatgttccccaactgcgagtacaactcgctgttcgtcctgcacaggcacacgagggagcactcgtctaaggtggagtgggccaaaacggtcgacgagatcgtggagaaggggctgagggagagtagaggagggttggggctgtggactccgtaccctgcggacctcagctccgtggaactccctgctgtaagaagaacttcgccggcaggataaggctaggctgtcaaagaccacaaagctcccagcctagcctgccgatcctgtgatctttgattcgttcatggttgtacagagtagaactccactgtttgtttgttttttttggcgtagattctgtaggctgacgcttggagtttgttgcttccagttctgtacaacactcatctacggaggtagcacagaaggatttctcacaaaagaaaaatcatgactcgtcaggtctagtatagggatatcaaaacagcattagaagtcgtcacacacaaaacaac

SEQ ID NO: 204444 - DNA, 1653 bp, Zea Mays
cctacggcggccagtaacaggcatacagaaactcatccatgactaaagcaaactaacaagaactaccacaatgctagctaactagcagggaggcccgaaatgggggcggtgagcaaagacaactttgcaccagccatctctcaaagctctttgcaaaaaagacagtaaagttctctctgtgttggactcgatggggctctcatccaaaccactccaccgctgcccgatacctgttgcggatgatccaaatgttgttgtcataccaaagaggactcccaacacaattgtgaagaagttggcatatataactgttgacaaacaggataaagatccctcaccgctgtttggaggacgtcaaaactggaaacagagggaggagagctttaaactgaactctaccatgaaggttcactgcggatttatgaaaaatagtggtgcagatatggatatcattgatgtcaagtacatacagaaatgcaaattcgtggttgcctctggtattttcgatggttacgacatccctcaccagccatccaatatcagccgccggtctcagaagctgttctgcttcctgatggtggtggacgaagtatctcttgattttatccaaaagaacaccaccgtcaagatcgacagcgctggagggaaatgggttggcatatggcgacttctaacagtgcaccgcctcccattcgacgaacctagaaggaacgggaaaatacccaagatcttgacgcacagactattccctcaagcttggtatagcatttggattgacgggaaaatggagctcatagttgatccgctgcttattctcgagaggtacctctggcgtggaaaatacacattcgcggtggctgtccacaagcatcataggagcatctacgaggagggcgacgcgatcaagcgacggaagcgctacgcccgccctttggttgatcttcagatgaagatgtactattacgaggggatggagccttggagcccgaagaaaaagatgcctggcgatgtgccggagggagccgtgctgatccgggaacacacagcgacgaccaacctgttcagctgcctctggttcaacgaggtgaacctcttcaccccacgcgaccagatcagcttcggctacgtggcgcgcaggctcggcgacgctctcgagctcttcatgttccccaactgcgagtacaactcgctgttcgtcctgcacaggcacacgagggagcactcgtctaaggtggagtgggccaaaacggtcgacgagatcgtggagaaggggctgagggagagtagaggagggttggggctgtggactccgtaccctgcggacctcagctccgtggaactccctgctgtaagaagaacttcgccggcaggataaggctaggctgtcaaagaccacaaagctcccagcctagcctgccgatcctgtgatctttgattcgttcatggttgtacagagtagaactccactgtttgtttgttttttttggcgtagattctgtaggctgacgcttggagtttgttgcttccagttctgtacaacactcatctacggaggtagcacagaaggatttctcacaaaagaaaaatcatgactcgtcaggtctagtatagggatatcaaaacagcattagaagtcgtcacacacaaaacaac

SEQ ID NO: 204445 - DNA, 1743 bp, Zea Mays
aattgtaaactgtgatcttccaggctgcaccaactccatctccaggtggaatggagttagcttgcctgcacactcagtcacggtggcgtccctataaggcgtaggcctgacgtcacccacgccctcgcctcgcacggggcggcgcggcggccggcggagggaatggcgaggcgaagcagaggcagcggcagcgtcacggacgcggcgtcgaaggcggacgcggcggcgatgcggatggtgtcccgcaggggcgccgtgcggctggtgctcgtgtcggccaccgcctgggccatgctcgggctcgtcgcgctcgccttccacctccggccatgcagctcccgcgtcgcattcctctcagctctttgcaaaaaagacagtaaagttctctctgtgttggactcgatggggctctcatccaaaccactccaccgctgcccgatacctgttgcggatgatccaaatgttgttgtcataccaaagaggactcccaacacaattgtgaagaagttggcatatataactgttgacaaacaggataaagatccctcaccgctgtttggaggacgtcaaaactggaaacagagggaggagagctttaaactgaactctaccatgaaggttcactgcggatttatgaaaaatagtggtgcagatatggatatcattgatgtcaagtacatacagaaatgcaaattcgtggttgcctctggtattttcgatggttacgacatccctcaccagccatccaatatcagccgccggtctcagaagctgttctgcttcctgatggtggtggacgaagtatctcttgattttatccaaaagaacaccaccgtcaagatcgacagcgctggagggaaatgggttggcatatggcgacttctaacagtgcaccgcctcccattcgacgaacctagaaggaacgggaaaatacccaagatcttgacgcacagactattccctcaagcttggtatagcatttggattgacgggaaaatggagctcatagttgatccgctgcttattctcgagaggtacctctggcgtggaaaatacacattcgcggtggctgtccacaagcatcataggagcatctacgaggagggcgacgcgatcaagcgacggaagcgctacgcccgccctttggttgatcttcagatgaagatgtactattacgaggggatggagccttggagcccgaagaaaaagatgcctggcgatgtgccggagggagccgtgctgatccgggaacacacagcgacgaccaacctgttcagctgcctctggttcaacgaggcacacgagggagcactcgtctaaggtggagtgggccaaaacggtcgacgagatcgtggagaaggggctgagggagagtagaggagggttggggctgtggactccgtaccctgcggacctcagctccgtggaactccctgctgtaagaagaacttcgccggcaggataaggctaggctgtcaaagaccacaaagctcccagcctagcctgccgatcctgtgatctttgattcgttcatggttgtacagagtagaactccactgtttgtttgttttttttggcgtagattctgtaggctgacgcttggagtttgttgcttccagttctgtacaacactcatctacggaggtagcacagaaggatttctcacaaaagaaaaatcatgactcgtcaggtctagtatagggatatcaaaacagcattagaagtcgtcacacacaaaacaac

SEQ ID NO: 204446 - DNA, 2563 bp, Zea Mays
gatctattttacctgaacttttgaatactggggatgctttggagagataccaacaggttgcccaaaagctggaagccttgattgctaatgatggcaaagatgtggaaattcaggtgtgttagccgtgatgaggctgcattagcagtagcacaaaaggttttcaagagtttgtacgataacacatcaaataccacttatgtctcctggcttctagcaaccttagttgcaatacgagatgtctgcaagcttgttgtcaaagagttaacaagttgggtaatatattcagatgaagagaagaagtttaacattgatatcatttttggccttattcgttcggagttgctgaatattggggagtacaatgttcatttggcaaagttaattgatgggggaagaaataaggttgcaacggagtttgcaatgtcccttgtccaagcattgtttgctcatgatcctgttggcttcacagagtttcagaatgttcttgatgcactatcgaagcatacaaagagaccaggttcacctgaatcgttgcaacaattgattgaaatcgcaaggaataatgtgagcaccactactggttttgttgctgtgaaggatgaaaaggtcaaactgccgaaggataaaaaggttttagctacccgggcaaacaaggaggaaaacactgctaatgaaattacactagttgatccaaatcaggtggcagtcctgttttctgaatggtgtcagatgtgtaatcatgtaagtgctagtgatgcggcatacactcgttttgtcacacagttgcagcaagatggtctgctgaagggggatgatatctctgaacgcttcttccgtattctcacggaacttgctgttacacactctctagtctccgagcagatcgttgctcctggtggatcatctcagcaatcaccacagcaacctcacatttcatatttctccattgattcatatgcaaagcttgtggttatggttctcaagtactcagtggagataacaccaaataaagccagtatactttccaagatcctatctgttacagtgaggtccattcagaaagatgctgaggaaaagaaagcttcatttaatcctcgaccatacttccgattgtttataaattggctctatgatcttactactaccgatggtcaccatgatagttctaattttcaggttttgactgcatttgcaaatgcattccacatgctacaacccttgagagttcctgcctggagctttgcttggcttgagctggtgagtcacaggagcttcatgccaaaactgctgatgtgcaattcacagaaaggttggccattttttcagcgactgcttgttgctcttctcaagttcatggaaccatatctgagaaatgctgaactcccagaggcgatggaccttttatacaagggaactatgcgagttctgcttgtactactgcatgactttcctgaatttctttgtgattatcacttcagtttctgcgatgtgattccttcaagttgcattcaaatgcgcaatgtcattcttagtgcttttccacgtaacatgagactgccagacccttctacccctaatctaaagattgatttgttggctgaaatttcaatagcaccacgaatcatgtcggatgttgatggtgcccttaaatcaaagcagttgaagactgaggttgatgaatatctcaagaggccggaaggctcttcctttttaagtgacctgaaccaaaaattgctgctgcctcagaatgaagcaagtgttgctgggacacgctacaacgtgcctctgatcaattcacttgttttttatgttggcatccaagctgtgcaacaactgcaactgaacaaggctaatccgtctgcatcagtacagcagattaaccatatatctccgatggacattttccagattggaacagctaccgatatattcaggagtcttataacaagtttggatacagagggccgctaccttctgttgaatgcaatcgctaaccaactgcgctatccaaatagccatacacactactactccttcatcactctgtatctattttccgaggctacccaggaaattacccaggagcaaatcacaagggttcttctggagcgtctcatagtgaaccgcccccatccttgggggttacttattactttcattgaattgataaagaatccgcgttacaacttttggagccggtcttttacacactgtgcacctgagatagagaaactgttcgagtcggtggcaaggtcatgtggcgcaaaagttgtggacgaaggaatcagcgtgcaggatggcagccactaaagccatctgctttgttcaagtgttgtttttgtgctatttcttctctggcactggaaattttctgtgcttgtacagatcgtctgtatagtaaagctgttagtcacacgtgtcggtgcactgccaaaccttagcaggtgcctgggagaatgcttttgtttgtatgaattttagtcagcaatatggatggtttgcaatatcgctcgctgctacttcgcgccagtacaacagatccaggtttcattgaagaaaatgc

SEQ ID NO: 204447 - DNA, 2531 bp, Zea Mays
gatctattttacctgaacttttgaatactggggatgctttggagagataccaacaggttgcccaaaagctggaagccttgattgctaatgatggcaaagatgtggaaattcagtctgttattatggaagttcctgatatcttgcgtaggtgtgttagccgtgatgaggctgcattagcagtagcacaaaaggttttcaagagtttgtacgataacacatcaaataccacttatgtctcctggcttctagcaaccttagttgcaatacgagatgtctgcaagcttgttgtcaaagagttaacaagttgggtaatatattcagatgaagagaagaagtttaacattgatatcatttttggccttattcgttcggagttgctgaatattggggagtacaatgttcatttggcaaagttaattgatgggggaagaaataaggttgcaacggagtttgcaatgtcccttgtccaagcattgtttgctcatgatcctgttggcttcacagagtttcagaatgttcttgatgcactatcgaagcatacaaagagaccaggttcacctgaatcgttgcaacaattgattgaaatcgcaaggaataatgtgagcaccactactggttttgttgctgtgaaggatgaaaaggtcaaactgccgaaggataaaaaggttttagctacccgggcaaacaaggaggaaaacactgctaatgaaattacactagttgatccaaatcaggtggcagtcctgttttctgaatggtgtcagatgtgtaatcatgtaagtgctagtgatgcggcatacactcgttttgtcacacagttgcagcaagatggtctgctgaagggggatgatatctctgaacgcttcttccgtattctcacggaacttgctgttacacactctctagtctccgagcagatcgttgctcctggtggatcatctcagcaatcaccacagcaacctcacatttcatatttctccattgattcatatgcaaagcttgtggttatggttctcaagtactcagtggagataacaccaaataaagccagtatactttccaagatcctatctgttacagtgaggtccattcagaaagatgctgaggaaaagaaagcttcatttaatcctcgaccatacttccgattgtttataaattggctctatgatcttactactaccgatggtcaccatgatagttctaattttcaggttttgactgcatttgcaaatgcattccacatgctacaacccttgagagttcctgcctggagaaaggttggccattttttcagcgactgcttgttgctcttctcaagttcatggaaccatatctgagaaatgctgaactcccagaggcgatggaccttttatacaagggaactatgcgagttctgcttgtactactgcatgactttcctgaatttctttgtgattatcacttcagtttctgcgatgtgattccttcaagttgcattcaaatgcgcaatgtcattcttagtgcttttccacgtaacatgagactgccagacccttctacccctaatctaaagattgatttgttggctgaaatttcaatagcaccacgaatcatgtcggatgttgatggtgcccttaaatcaaagcagttgaagactgaggttgatgaatatctcaagaggccggaaggctcttcctttttaagtgacctgaaccaaaaattgctgctgcctcagaatgaagcaagtgttgctgggacacgctacaacgtgcctctgatcaattcacttgttttttatgttggcatccaagctgtgcaacaactgcaactgaacaaggctaatccgtctgcatcagtacagcagattaaccatatatctccgatggacattttccagattggaacagctaccgatatattcaggagtcttataacaagtttggatacagagggccgctaccttctgttgaatgcaatcgctaaccaactgcgctatccaaatagccatacacactactactccttcatcactctgtatctattttccgaggctacccaggaaattacccaggagcaaatcacaagggttcttctggagcgtctcatagtgaaccgcccccatccttgggggttacttattactttcattgaattgataaagaatccgcgttacaacttttggagccggtcttttacacactgtgcacctgagatagagaaactgttcgagtcggtggcaaggtcatgtggcgcaaaagttgtggacgaaggaatcagcgtgcaggatggcagccactaaagccatctgctttgttcaagtgttgtttttgtgctatttcttctctggcactggaaattttctgtgcttgtacagatcgtctgtatagtaaagctgttagtcacacgtgtcggtgcactgccaaaccttagcaggtgcctgggagaatgcttttgtttgtatgaattttagtcagcaatatggatggtttgcaatatcgctcgctgctacttcgcgccagtacaacagatccaggtttcattgaagaaaatgc

SEQ ID NO: 204448 - DNA, 2510 bp, Zea Mays
gatctattttacctgaacttttgaatactggggatgctttggagagataccaacaggttgcccaaaagctggaagccttgattgctaatgatggcaaagatgtggaaattcagtctgttattatggaagttcctgatatcttgcgtaggtgtgttagccgtgatgaggctgcattagcagtagcacaaaaggttttcaagagtttgtacgataacacatcaaataccacttatgtctcctggcttctagcaaccttagttgcaatacgagatgtctgcaagcttgttgtcaaagagttaacaagttgggtaatatattcagatgaagagaagaagtttaacattgatatcatttttggccttattcgttcggagttgctgaatattggggagtacaatgttcatttggcaaagttaattgatgggggaagaaataaggttgcaacggagtttgcaatgtcccttgtccaagcattgtttgctcatgatcctgttggcttcacagagtttcagaatgttcttgatgcactatcgaagcatacaaagagaccaggttcacctgaatcgttgcaacaattgattgaaatcgcaaggaataatgtgagcaccactactggttttgttgctgtgaaggatgaaaaggtcaaactgccgaaggataaaaaggttttagctacccgggcaaacaaggaggaaaacactgctaatgaaattacactagttgatccaaatcaggtggcagtcctgttttctgaatggtgtcagatgtgtaatcatgtaagtgctagtgatgcggcatacactcgttttgtcacacagttgcagcaagatggtctgctgaagggggatgatatctctgaacgcttcttccgtattctcacggaacttgctgttacacactctctagtctccgagcagatcgttgctcctggtggatcatctcagcaatcaccacagcaacctcacatttcatatttctccattgattcatatgcaaagcttgtggttatggttctcaagtactcagtggagataacaccaaataaagccagtatactttccaagatcctatctgttacagtgaggtccattcagaaagatgctgaggaaaagaaagcttcatttaatcctcgaccatacttccgattgtttataaattggctctatgatcttactactaccgatggtcaccatgatagttctaattttcaggttttgactgcatttgcaaatgcattccacatgctacaacccttgagagttcctgcctggagcgactgcttgttgctcttctcaagttcatggaaccatatctgagaaatgctgaactcccagaggcgatggaccttttatacaagggaactatgcgagttctgcttgtactactgcatgactttcctgaatttctttgtgattatcacttcagtttctgcgatgtgattccttcaagttgcattcaaatgcgcaatgtcattcttagtgcttttccacgtaacatgagactgccagacccttctacccctaatctaaagattgatttgttggctgaaatttcaatagcaccacgaatcatgtcggatgttgatggtgcccttaaatcaaagcagttgaagactgaggttgatgaatatctcaagaggccggaaggctcttcctttttaagtgacctgaaccaaaaattgctgctgcctcagaatgaagcaagtgttgctgggacacgctacaacgtgcctctgatcaattcacttgttttttatgttggcatccaagctgtgcaacaactgcaactgaacaaggctaatccgtctgcatcagtacagcagattaaccatatatctccgatggacattttccagattggaacagctaccgatatattcaggagtcttataacaagtttggatacagagggccgctaccttctgttgaatgcaatcgctaaccaactgcgctatccaaatagccatacacactactactccttcatcactctgtatctattttccgaggctacccaggaaattacccaggagcaaatcacaagggttcttctggagcgtctcatagtgaaccgcccccatccttgggggttacttattactttcattgaattgataaagaatccgcgttacaacttttggagccggtcttttacacactgtgcacctgagatagagaaactgttcgagtcggtggcaaggtcatgtggcgcaaaagttgtggacgaaggaatcagcgtgcaggatggcagccactaaagccatctgctttgttcaagtgttgtttttgtgctatttcttctctggcactggaaattttctgtgcttgtacagatcgtctgtatagtaaagctgttagtcacacgtgtcggtgcactgccaaaccttagcaggtgcctgggagaatgcttttgtttgtatgaattttagtcagcaatatggatggtttgcaatatcgctcgctgctacttcgcgccagtacaacagatccaggtttcattgaagaaaatgc

SEQ ID NO: 204449 - DNA, 2275 bp, Zea Mays
ccgcgacaggcagctcgctcccctcccgccccactcgtcggctagtcgcctagtccctttcccttccacacgattcggagcagcacgtgcgcgtcaaaccttaccaccaccgccatcgtcttgcggctaaattgccttgagacgccgcagcactgcagcagcacagggggggagaaggggcgggcgctcgagtgaaccaccactacactactccgcgtctccctcccctggctacgaggctataataacgagcgcgtaagacggccggcggcgcacgcagccatgtccgcgcacctccgcctactctcggccgcccacgtctccgcgcccacacccacctccctccaccgcctccgtggccctcctccttctcctcccgcggcccgcctccggctgctgctgcgaccgccgcggctcggggggagccaggcgcgcttcgccggcgccgtccgctgctccggctcggcgtcggcgccggcggtcgcgcgggttggcgaggacagcgacgcggcggcgggcatatgggagcaggtgcgggatatcgtcgtgttcgccggccccgcgctagggctctggatctgcggtccgctcatgagcctcatcgacaccatggtcatcggccagacctccgcactccagctcgccgcgctagggcctgggacagtgttctgcgattacctaagctacatattcatgttcctctcggtcgcaacatccaacatggtggccacctccttagccaaaaaggatgaagaacttacacaacatcaagtgtctatgttactgtttcttgctcttgcttgtggcataggaatgtttttgttcaccaaggtgtttggtactcaagtattgactgcttttactggatctgggaattatgaacttatttcttcggccaatacatatgcacagataagaggtttcgcatggcctgcagttcttgttggcttagttgctcaaagtgctagtctgggcatgaaggactcttggggtcctttgaaggcattggcagctgctagtgttataaatggtgttggtgatatatttctttgctctgtttgtgactatggaattgctggtgctgcctgggcaactatggtttcacagctttcatgatgatgcaaaatctaagcaataagggttttcgagctttctcatttacgattccatcagttagagagctattgcagatatttgaaattgcagctcctgtttttgtgacaatgacgtccaaggtggcattttatgcattgctcacatattctgcgacttctatgggagcaataacgcttgcagcccatcaggttatgatcaatgtcttatgcatgtgtactgtttggggcgaacctctgtctcaaactgcacagtcattcatgcctgagctggtatatggtgctaatcggaatctgaccaaggcaaggatgctattgaagtcacttgtgatcattggagcgataactggattgaccttgggggtagtagggacacttgttccatggcttttccccagtgtctttaccaatgaccaaagggtcatccagcagatgcaccgagtactggctccatatttcagtgtattgctggtgactccttcaatacactcccttgagggaacactcttggctggaagggatttgagatatttgagtcaatcaatgggtgtctgcttttccattggaacccttctcttgatgcttctccgcagcaagggtagcttggcaggatgctggtgggttctcgtcttatttcagtggagccggttcggaagcgctttgctacgacttgtttctccgacgggcatgctgttcaacaaaaacttcaaccaggtcgagtacattgaggcaaaaacgacatgaagatgcactgtacccatcacaagaggtgggatgatgaagatgtagaaaatgaggcacagaaacctggaaagatgaatagatgcaaaaggattcgcaaaaaccatgggaagatcatttgggcaaatcacttccgtccagaaggggatcagagttggctacgatcacttccattcgtcctaggaactatatacctcacagattcatggaagctgagaactgtagtagtggctacgctttccaacacttggcagtttgcgcccgtagaatggagttaaactgagtgctaaattttgtttcttgttactaaccgttaagaatcacgagatggttaatgatggttgagcttgtccagaaaacatggataagtgaggtctcaaaaaatgtagcatcttttccaatattatcgtttcttatgccat

SEQ ID NO: 204450 - DNA, 1524 bp, Zea Mays
aaaagccggcttagccgttcgctgcagctagtttgcagctgctttcacagcggcctggctggccgaaagggccgtgcgggaagccaaccaggccaccgccgccaaagcgcggggaagtccgacgaacgaagcagtacaagcgaacgaacctaggcaggaccggttcgctgtctcgtcccgacctcgccgcccgccctcccgcacgcctgcccatggaggcgctgtggaagcaggcctccaggctcaaggaccaggtcgctcggcagggtgtgttcaagcagtttggctatgggaattctgataatgcatttacagatgaatcagaggttaaaatgcatcagagattggaaaagctttacttatcgactcgtgctgctaacattttcaaagagacattgttcggggcatggagggctatatagtcacaggatccaaacaagtcgaaatagggaataaattgtctgacgacagccaaaaatatggtgctgaaaacacatgtacaagtggtgatactttatccaaagctgctacatacttcgggaaggcacgctcacagatggaaaaggagcgcggcaacatgttgaatgcatttggcacacaggtggcagagccactgcgggcaatggtaatgggtgtgcacctttagaggatgcaagacatctggcccagagatatgacagaacgaggcaagaagctgaagcacaggctgtcgaagtatcaagacggcagaatagggtgagggagtcagctgggaatggagatatgatatcgaaattggaagccgctgagtacaagcttgaagaactgaagtcaaacatggtggcattagggaaggaagctatctcagcaatgtcagcagttgagactcagcagcaatggttgaccttacaacgtctcattgcactggttgaggctgagagaggttaccatcagagagttctggagatacttgaccagttggaaaaagaaatggtgtctgagcgccaaaaaattgaagcacccctgactccagcagctgacaattacatgccaccaccaccaccatcttatgatgaagttaacggagcgtttgcatccacttctgttaatgaatcagtccaatctgtcaatttcttccttggagaggcccttgattccttcaaagctgaaagtgagtttgagcttaccttgtcagctggtgacattgtaattgtccgaaagatttcaagcaatggttgggcagaaggtgaatgcaagggcaaagcaggatggtttcctcatgcttatatcgaaaggcgagaacatgttctagcaagcaaagttccacatatcttttaggagtttttggctggtacatcatttctattgttgggagctggaatagtatccatgttttcattttctcttacgtcgcgtatgtacttaccggctgtcatgtgcataattaaactttacttccttattttagtctggagaagattttggatgtaacatatatttgagggaccaattggacactggttgcctcgatattgtgaaatagtt

SEQ ID NO: 204451 - DNA, 1190 bp, Zea Mays
cgagatcagtgtatcctctacagctcaaaaggtagaatctgtggtcggtgacttgaaggaggagtacggagagcaacatgtggaactgtctgtgatgttagaaatggaaaggatgtaaaggcacttgtggagtttgcacgtgacaaacttaagcatattgatatatggatcaacaatgctggatcaaatgcatatacatacaaaccactagtggagacctctgatgaggctctcatggaaatcatcaccactaacacccttggattgatgatatgttgtcgtgaggcaataaatatgatgaggaaccaacctcgaggtggtcacatattcaaccttgatggtgctggttctgatggaaggccaactccaagatttgctgcatatggtgcaacaaagagaagtgttgtgcatcttacgaagtcacttcaggctgaattgcagatgaatgaagtgaataatgtgatggtgcacaatctatcgcctggcatggtcacaacagatcttcttatgtctggtgcaactacaaaacaagcaaaaattttcatcaatatattagctgaacctcctgatgtggttgcagactaccttgttccaaacgtcagagaaatccctaccaagcaatccatgaagccaacctacattcgtttcctcacaggcttgaaggcctactcaagaattttttctagacttgcttttggtgctaggagaaacaagtatgttactgaagattagttatgctgccagcttccaactgaagagattaggaacaattcttttcattaagcgtcacttacttttctcataagatgggatgtattacagatgtcatctcatgagaacagtgatatactcttctgtacagtagtagcaatttttttagtaaatgcataggaaaactgtgcatcaatatatcaagaagaatatagaaataaggtctaaaatagaccacaacatgataaccacctcacctcacgaatatacaaaagagtccatctaaaaatgatcaaacaccagctttactcatatggttactcaaaacactgttttacactgtttgtagagtggagtttgaatattagcatgaggatgggtaaactgttggagatagcctaaggctaaagggcacacaacccctcggcacctataggcgtagggcaccattgatgagcgtcgtctttaatgttttaaat

SEQ ID NO: 204452 - DNA, 2557 bp, Zea Mays
ttcccgcccaaagcctcctctttattcccttcttcccgccatcccccgaacacttcgccgcccccctcccgcctcccgctgttctctgcctcccacccccacgccgccgtcccatcaccgccgctgggatgaagaaccctgacttcgccgcagacaaagcgctcgccaaggacttcctgtccaatttcaccggccctcacggcgagcccaagtacctgaacatcctgcaagatgtcgcgaacaggaagatacgcgcggtccagatcgagctggacgacctattccactataaggatgtcgacgaggagttcttgcagcgtgtcaccgagaacacgcggcgctacatcggcatcttcgcggaggccatggacgagatcatgccggagcccacagaggcgtacaccgtcgacgaggaccaggacatcctgatgacgcagcgtgtggatgagggggccgacggcggcgcggacggcacggacccgctacagaaaatgccaccagagatcaaacggttctttgaggtttacatcaaggcattctcaaaggtgactccactcaccattcggcaagtgaaggcatccaacattggtcagcttgtgaaaatatctgggattgttactcgctgctcggatgtgaagcccttgatgcaggttgctgtttatacatgtgaagaatgtggcttcgagatataccaggaagtgactgctagagtgtttatgcccctcattgaatgtccatctcaacgatgcaagctgaacaaagcgaagggaaatctaatccttcaactgcgtgcgtcaaagtttttgaaatttcaggaggtaaagcttcaagagttagcagagcacgtaccaaagggccacattcctcgtgctctgactgttcatctaagaggagagctgactagaaaggattagttgctgatacttacttggaagcaatgtctgtcacccacttcaagaaaaaatatgaggagtatgatctaaaaggtgatgaacaagaacaaattgaccgattggctgaggacggtgatatctacagtaagctggcaaggtccttggcacctgaaatatttggccatgaagatgtcaaaaaggcactgctgttactacttgttggtgcaccccatcggaagctcgcagatggcatgaagatcagaggagacctgcatatatgcatgatgggagatcctggtgttgcaaagagtcaacttctgaagcatattatcaatgttgcaccaagaggagtgtacaccactggacgtgggagcagtggtgttggacttaccgctgcagtccagaaagatccagtaacaaatgagtttgtcctcgaaggtggagcactggtactggcagatatgggcatttgtgctatagatgagtttgacaagatggaagagtcagacaggacagcgattcatgaggtaatggagcagcaaacagttagcattgccaaggctggcatcaccacctctcttaatgcgagaactgcaattctggctgctgcaaatccagcatggggaaggtatgatatgaggagaaccccagcagaaaatataaatctacctccagctcttctgtctcgtttcgacctcctttggttaatcctggatcgtgcagacatggaaactgatcttgaaatggcaagacacgttgttcatgtgcatcaaaatcttgaatcaccagcgctggggttcacaccacttgagccatctgtactcagagcatacatatctgctgctagaagagtcattccttctgttcctagagagctcgaggaatacattgcaactgcatattccagcatccgccaagaggaggcgaagtcaaatgcaccaacctcctacacaactatcagaacacttttgagcatactccgtatctctattgccttggcaagactgaggttctcagaaactgtggctcagagcgatgtcgacgaagcactgcgactgatgcaaatgtccaagtactcattatactcagatgaccgccagcggtctggccttgatgcaatatctgacatatattccatcctgagagacgaagctgctaggacgagcagcatggatgtgagatacgctcacgctcttaacttgatctccagaaagggatacagcgaggctcaattgaaggaatgcttggaggaatacgcttccctgaatgtgtggcagatccatccaagcacatttgacatccacttcattgatgcctgatgcagaagccgatgccgatcacctaacatttcatcatgatccaaggatttgaagaccttcgactgaagcctaacaagatttaaaagttttctagtgatagtgaacgacagcccatttcttgatggcaatgatgtaatgctgagaagcctatctcaattgcactagtagaaacaatctcaattgtactagaagaaccattcttgtatgacttgtgagtagcttgtttttatatttgctgacatttttccacacttgatagtgaagtagatgtaacttgcgtgtttcttgtttgcttgttataaatcaatacgacacaaagtagatcaaatatagagaatatacata

SEQ ID NO: 204453 - DNA, 1150 bp, Zea Mays
cgtccttcgtccagccccagcccaagctccagccgccgcttggctcctgccgtcctgcgtcctggtccagcgcttcctctccagctccagcgccgcagcgcgctcgcccgtgcctcatctccagctctccagcgccgcagcgcgctcacggcccaccagcgccagccgccaggccgccaccgcggcaccgccaggcgcccaggcgcgctcgcccgccgaccgccgttgtccttgtccagccgccggagtccggagcaccgagcacgggagcagccgaggcgagcaaccgagcaccgccattgagcaacagtgaccgtgagccaagccgggaactctgggggtcagtagcccgatggctttcgctgagagattgatccgcaaacgattaagaagagtactgttattctgaacaaaaagaagtaaatcgttttctttactctaccataagttctattttaatatcgccactctattgattaaaaatgactatttttcatatttcaacgaagttgaattttattgaatttttatttttattttgctttgctttgttgggaatgcgtttacgctgcaaacgagataactccaaacacccaccattaacatctctagcggcggcattagcggcttctcgaccgcctatcgcctcatgctcgtttagcgcatactgccgcttttttgaaccctgcggttggaatacccagcactaaaatcctaggcccgcaactggctgcggggcggacagtcgattagagtcttcaactagtcattaaaggcctttttagaagtggagtattttctctgttttttagataatactgtagtatttgagaagggtaaaattgagaaaaaaacacgactaactgtaaaagtgaggacaccagtaaaacctagaacaccagcttaaaaaacctttttttctaatacagtttttggtagactcttcaaaagatatgttttcgaaactgcagttttgactatattgcactactttcacagttttaaaaacttaactccaaaaattttcaatacttgggcctagctgatgctcttagggaggtaggatagagtctgttctttattgtgctgtaatctgtagtttttgttttagttgttagtgtgtgcagtgtgtgtgtgcgtgcaggtgtcc

SEQ ID NO: 204454 - DNA, 2693 bp, Zea Mays
aaggaggccgtggctagttgacggaaaaaaacaaaggtccgagaagattcttgaaacagttgtccagtcatccatccttcgtgtcagtcacctcacgcagcaccacaggtccacagctggtcagctgccatgcatcctgcagccagcctcacaaccgacgagctgcagatgaggcgaacgccaaccacccgccaagatcaacagcattgcacaacacaaggcaacagaaacagaacacacagagagacatgagagcaaagcaggggaatggaatggacaatggagatcctctccctccctgccttgctatttttcgccgctcgtgagatggcggcgggtgaaatgccctgaccagcgtgcgtgcacatgcccggggaacggacccgccggggctgaccgctgctagggcccggcgtcgtgtccggtagcggttggggcggaacggcgacgccgtcggagtcgcagtcgcggtcccggcttcctcctcatctccattgccttcggacgggccaaggcgccagtagcggaagcgtggacgtgagcgagcgcatccgcgcggccattgagagcttgtgcaagacttaaccgtttcgtggtgcgtcatgtcgtctaattcttcgaccggcccgcgcccacggccgtctccgtcgccgccgccgccaaaaagcagcccttctccttcgcactcaactgcgccgccgccgtcagcggactcgtcgtctccgggcccatcactgcccagcgactcctcgccgccaccggcggcgtccaggtcgcatggcgctcaggcctcctcaccagccaagccccactctccacgggagcaaccgtctagaggttccgcggacgacggtggcaggccgccaccggctcccgcgcaccgtggcgggcccaccatggtggaaatcgttttcgccgcggccggcgccgcggcgctcctcgtcatcctcatcgccgcctgcgtgtgctgctcgaggaagacggcgccgaggaggaggaagagacctcacaatcccatgcattactacgcggacttcccgtcgtcggcgtgcaaagccgcagtggcagaacgacaccgtcgcggcggcgacgcggagcaccttcggcccgccgggaggtggctggcatgcgccgccgcccgacatgacctccggcccgcacggcgcacggccgccgccgccgacgacaccgcacgaggcgctgctggggctcggcaagggcaccttcagctacgaggagctggcggcggccacaggcgacttctcggcggcgaacctgctggggcagggcgggttcgggtacgtgcacaagggggtgctccccggcggcatggtggtggccgtgaagcagctcaagtccgacagcgggcagggggagcgcgagttccaggccgaggtggacatcatcagccgcgtgcaccaccgccacctcgtgtccctcgttggccactgcatcgccggcgcgcgccgcgtgctcgtctaccagttcgtgcccaacaagaccctcgagttccacctccacggaaaagggcagccggtgatggagtggtcgacgaggctgcgcattgcgctcggatcagccaagggcctcgcctacctgcatgaagactgtgagccatccccggatcattcaccgcgacatcaagtcggccaacattcttctcgacaacaacttccaagccaaggtcgccgacttcgggctggccaagctgacgtcggacagcaacacgcacgtgtcgacccgtgtgatggggacgttcgggtacctggcgccggagtacgcgtcgagcgggaagctgacggacaagtcggacgtcttctcctacggcgtggtgctgctggagctcctgacggggcggcgccccatcgacgccggcgacgcgcgctcgttcctcgacgtcgacgacagcctcgtggactgggcgaggccggcgctgtcgcgcgcgctggccgacggcgactacgacggcgtcgcggacccgaggctgcggggcaactacgacaccatggagatggcgcgcatggccgccagcgccgcggcagccgtgcgccactcggccaagaagcgccccaagatgagtcagatcgtgagggcactcgagggggacatctcgctggaggacctcaacgacaacgagggggtgcgacctgggcagagcatggcgttaggcacggcggccgcggcctcgtacaaggccaaagctcccggaccgtacacgcacggcgtggaacggatcaggcaggcgcccacggtgtacagcggcgcggtgggccgtccctctacgatcggcaacgacggcgatgagtcccgtgaaccgcaccagtagcaggccggaagcagcagcagctgagttgctaccgtgtacgcatgtgatgctgcacctttgcaactcatgctcgccgcgccgttattgattgcgtgaacgtcctgctttggcgtctgtgagctgcttaatcccagctgttgcctgcaaagctgtaacggcagcctgcgagctgctgctgtacctgtacatatcgacaatcaaccacacggagaatgtgcagatgaacaaaaccctatacgtttgtgcattgcaaagcagatcagggcacgaaagaatacacggcgctaataggacgcaagggacagtggtacacgatcgatgcctcggtatagaagtttgaaccacaaacaaaaccacaattagggtg

SEQ ID NO: 204455 - DNA, 2724 bp, Zea Mays
aaggaggccgtggctagttgacggaaaaaaacaaaggtccgagaagattcttgaaacagttgtccagtcatccatccttcgtgtcagtcacctcacgcagcaccacaggtccacagctggtcagctgccatgcatcctgcagccagcctcacaaccgacgagctgcagatgaggcgaacgccaaccacccgccaagatcaacagcattgcacaacacaaggcaacagaaacagaacacacagagagacatgagagcaaagcaggggaatggaatggacaatggagatcctctccctccctgccttgctatttttcgccgctcgtgagatggcggcgggtgaaatgccctgaccagcgtgcgtgcacatgcccggggaacggacccgccggggctgaccgctgctagggcccggcgtcgtgtccggtagcggttggggcggaacggcgacgccgtcggagtcgcagtcgcggtcccggcttcctcctcatctccattgccttcggacgggccaaggcgccagtagcggaagcgtggacgtgagcgagcgcatccgcgcggccattgagagcttgtgcaagacttaaccgtttcgtggtgcgtcatgtcgtctaattcttcgaccggcccgcgcccacggccgtctccgtcgccgccgccgccaaaaagcagcccttctccttcgcactcaactgcgccgccgccgtcagcggactcgtcgtctccgggcccatcactgcccagcgactcctcgccgccaccggcggcgtccaggtcgcatggcgctcaggcctcctcaccagccaagccccactctccacgggagcaaccgtctagaggttccgcggacgacggtggcaggccgccaccggctcccgcgcaccgtggcgggcccaccatggtggaaatcgttttcgccgcggccggcgccgcggcgctcctcgtcatcctcatcgccgcctgcgtgtgctgctcgaggaagacggcgccgaggaggaggaagagacctcacaatcccatgcattactacgcggacttcccgtcgtcggcgtgcaaagccacaggtaatagcagcacgtactacccgaacgggccgcagccgcagtggcagaacgacaccgtcgcggcggcgacgcggagcaccttcggcccgccgggaggtggctggcatgcgccgccgcccgacatgacctccggcccgcacggcgcacggccgccgccgccgacgacaccgcacgaggcgctgctggggctcggcaagggcaccttcagctacgaggagctggcggcggccacaggcgacttctcggcggcgaacctgctggggcagggcgggttcgggtacgtgcacaagggggtgctccccggcggcatggtggtggccgtgaagcagctcaagtccgacagcgggcagggggagcgcgagttccaggccgaggtggacatcatcagccgcgtgcaccaccgccacctcgtgtccctcgttggccactgcatcgccggcgcgcgccgcgtgctcgtctaccagttcgtgcccaacaagaccctcgagttccacctccacgggcagccggtgatggagtggtcgacgaggctgcgcattgcgctcggatcagccaagggcctcgcctacctgcatgaagactgccatccccggatcattcaccgcgacatcaagtcggccaacattcttctcgacaacaacttccaagccaaggtcgccgacttcgggctggccaagctgacgtcggacagcaacacgcacgtgtcgacccgtgtgatggggacgttcgggtacctggcgccggagtacgcgtcgagcgggaagctgacggacaagtcggacgtcttctcctacggcgtggtgctgctggagctcctgacggggcggcgccccatcgacgccggcgacgcgcgctcgttcctcgacgtcgacgacagcctcgtggactgggcgaggccggcgctgtcgcgcgcgctggccgacggcgactacgacggcgtcgcggacccgaggctgcggggcaactacgacaccatggagatggcgcgcatggccgccagcgccgcggcagccgtgcgccactcggccaagaagcgccccaagatgagtcagatcgtgagggcactcgagggggacatctcgctggaggacctcaacgacaacgagggggtgcgacctgggcagagcatggcgttaggcacggcggccgcggcctcgtacaaggccaaagctcccggaccgtacacgcacggcgtggaacggatcaggcaggcgcccacggtgtacagcggcgcggtgggccgtccctctacgatcggcaacgacggcgatgagtcccgtgaaccgcaccagtagcaggccggaagcagcagcagctgagttgctaccgtgtacgcatgtgatgctgcacctttgcaactcatgctcgccgcgccgttattgattgcgtgaacgtcctgctttggcgtctgtgagctgcttaatcccagctgttgcctgcaaagctgtaacggcagcctgcgagctgctgctgtacctgtacatatcgacaatcaaccacacggagaatgtgcagatgaacaaaaccctatacgtttgtgcattgcaaagcagatcagggcacgaaagaatacacggcgctaataggacgcaagggacagtggtacacgatcgatgcctcggtatagaagtttgaaccacaaacaaaaccacaattagggtg

SEQ ID NO: 204456 - DNA, 3713 bp, Zea Mays
gttgtctgttgcctcaccacccctctgtccctgcttccttctgctcccgcaacgggtggcctccgttccccgaccccgcccgactctcccacacatctccggcgctctcttcgagtcctcctgcagtcccgccgccttctcatcgctaccaaaattgcaaagccggactggaactcgcgtcgcgcgcaggggcatggacccggacgacgaaccagcggcgcagcggaaagccgtcgacttgcacctgccgcgcgacacggagcctgcctcctcgcccgcgtgcacccgccgcgccgcgccgcgcgtgctcagctactgtgacgtccctttcgcctccgcctcggcgcagcgctgcgcatcattcccgcagcgccacggagagctggcgcacgcccgctcggcctccttcgcagcctggatcgaaggcggctcggcgtcggcgccggcggcggcactcgagcgggccatgtcgcagtacggcggtgcggacggcgcgctgccagagttcgtcggcgccggcggtggcgagggcatcttccgcgtgccgctccgcgcggcgatgcacccggcgcgcccgccgccgctcgaggtgcggccccacccgctgcgggagacacaggcgggcgcctttctgaggacgctggcctgcgacccgcggcgacggcagctgtgggcgggcgccgagtccggggttcgagtgtggggcctccacgaggtgttccgtgggtggtggccgggcgccgggccgcggcgccgcggtgacgaggaggccgcgccgttcagagagtccgtgccggtcccgcccgcgctctgcgccgctgtcgacggcgctaacgggatggtgtggacggggcacagggacggcaggatcagggcgtggcgcatggaccacgccgcgcccgccggaggatactccgccggcagtgcgcccatgttcaaggaggccctctcgtggcaggcgtacagtcgcacgccggtgctcgccatcgtcgtcacgttggatgctaagactagggaacttttaaaagtatttggcatcgatggacaagtcgacttagctcgtcctgaggccccagtaatgcccgaacaattcatagaggaagagattaaagtaaaacccacaaaaagggagaggccgcaaggttctttcacattttttcagaaatctaggaatgccttgatgggcgcagctgatgctgtacgcagagttgcaacaaaagggacatttgtcgaagataatcggcgaactgaagcagtggctcaagcaatgaatgggacaatttggtctggttgcacagatggttcaattattgtttgggatggaaatgggaatagactgcgagaatttcattaccatagttcttctgttcgatgcataaagacactcggagacaaggtttgggtgggctatgcaagtggcactattcaagttgtcgatgtcgaaggtaaccttcaggcaggatggattggtcatagctgcccagtcatagacatggcaattagtgattcttacattttttctttggcacatcatggtggtattcgaggatggcctctaagttcccctagctccctagatgatattctatgctatgagttggctagcagggaactgttatacacaaggctagagaaccttaaaatactggttgggacttggaatgttgcacaagagaaagcttctcctgaagcactaaggtcatggttgggtggtgcattttttgatgttgggctggtggtggttggtttgcaagaggtcgagatgggtgctggagttcttgccatggcagctgccaaagaaagtgtagggcttgaaggcagtgccaatgggcagtggtggatagacagtattggcaaaacacttgatgagggaatatccttccacagagttggttcaaggcagttggcaggactacttattgctgcatgggcaacgaatgaccttaggccacatgttggtgatgttgatactgctgcagtgccatgtggctttgggcgtgctattggcaacaagggtggcgtcggattaagaataagagtctttggtcgcaggatatgttttgtaaacaatcattttgctgcacatcaagagaatgttagccgccgcaatgctgattttgaccgcatttatcggacaatgactttcaccaaacctcagggatctgcagcttctgctacagctgtccaattgcataaagcagtgagtgctaatgaaaatcaagcagatgaaggtaggcctgatctggcagaagctgatatggttatcttccttggtgatttgaactaccgacttgatggcatcacctatgatgaagcaagggacatggtctcccagaggagctttgactggcttagagaaagggatcaacttcgagcggaaatgaaggcgggaaatgtgtttcagggaatgcgtgaaggcccaatcagatttcctccaacctacaagttccagagacaccagtcgggtctctcagggtatgattcaggcgagaagaagagaatacctgcttggtgcgacaggatactgtatcgagatagccgtcctgtaccaatagctgaatgctcattagagtgccctgtcgtcgctgcaatcacagcgtacgaatcttgcatggatgtcacagacagtgaccataaacccgtgagatgtacattcagcgtcgatattgcaagagtagacgagctgataaggaggcaagagtttggaaaaataatcgaatctaacaaaaaggttcgctctttgcttcgagagctccgttctgttccggacaccgtcgtcaacgcgaacaacattacattggaaaatcaccaagaagatgtcatcctccggataactaataactgtgaaaccagcaaggccgcttttgaaatcctgtgtgaaggccagacagtcagaaagcagggcggaacccaatctgaggagctgctcccaagggcgtcctttggcttcccactttggcttgaggtccaaccatcgatgggtctcatcggcccaggagaaacagcggaagtcgtcgtgcgccacgacgacttcctgacgcaggaagagtacgtcgacggagcacagcggaaccggtggcgcgaggccacccgagacctggaggtcgtgctctcggtgacagtcacgggcagctccagctcctcggccgaggccgtcgcgcacagggtcaccgtccggcactgctgcccggcgcctccggctcccctgcccgccaaccggcgctctgccgctgcctcgcctcgtgacgacgttgccgcgtcggataaccagtcgaaccacctgcaccgttccgatctcgccagcttcggtagctcggaggtgcgtgacctgtgcgggggcttgtgaaagcgagtttcgctgcctttgcttcatcgtcctgcattcctgctccttacatgtgcgtcgtcctgccgttctttgcgtgtcgaatcaaaaagcgagagagaaagaaagagagaggaaaaaaaaggaagaaagaagagagtgcaattgttgtaattacctgtagtaggtaaaattttcaagctaaccttttttttttgaccttcttaagttaagtagtagatgtggcattgaaattgtgttggtgcaaagtggagtgagtgtatggttgtatgtatagtaatggaggttgtatgcttgtatagtctattgattggacgatgctttgctcctactgcaatacagcgcaacgagaactgcagctgctcgc

SEQ ID NO: 204457 - DNA, 3672 bp, Zea Mays
gtctgttgcctcaccacccctctgtccctgcttccttctgctcccgcaacgggtggcctccgttccccgaccccgcccgactctcccacacatctccggcgctctcttcgagtcctcctgcagtcccgccgccttctcatcgctaccaaaattgcaaagccggactggaactcgcgtcgcgcgcaggggcatggacccggacgacgaaccagcggcgcagcggaaagccgtcgacttgcacctgccgcgcgacacggagcctgcctcctcgcccgcgtgcacccgccgcgccgcgccgcgcgtgctcagctactgtgacgtccctttcgcctccgcctcggcgcagcgctgcgcatcattcccgcagcgccacggagagctggcgcacgcccgctcggcctccttcgcagcctggatcgaaggcggctcggcgtcggcgccggcggcggcactcgagcgggccatgtcgcagtacggcggtgcggacggcgcgctgccagagttcgtcggcgccggcggtggcgagggcatcttccgcgtgccgctccgcgcggcgatgcacccggcgcgcccgccgccgctcgaggtgcggccccacccgctgcgggagacacaggcgggcgcctttctgaggacgctggcctgcgacccgcggcgacggcagctgtgggcgggcgccgagtccggggttcgagtgtggggcctccacgaggtgttccgtgggtggtggccgggcgccgggccgcggcgccgcggtgacgaggaggccgcgccgttcagagagtccgtgccggtcccgcccgcgctctgcgccgctgtcgacggcgctaacgggatggtgtggacggggcacagggacggcaggatcagggcgtggcgcatggaccacgccgcgcccgccggaggatactccgccggcagtgcgcccatgttcaaggaggccctctcgtggcaggcgtacagtcgcacgccggtgctcgccatcgtcgtcacgttggatgctaagactagggaacttttaaaagtatttggcatcgatggacaagtcgacttagctcgtcctgaggccccagtaatgcccgaacaattcatagaggaagagattaaagtaaaacccacaaaaagggagaggccgcaaggttctttcacattttttcagaaatctaggaatgccttgatgggcgcagctgatgctgtacgcagagttgcaacaaaagggacatttgtcgaagataatcggcgaactgaagcagtggctcaagcaatgaatgggacaatttggtctggttgcacagatggttcaattattgtttgggatggaaatgggaatagactgcgagaatttcattaccatagttcttctgttcgatgcataaagacactcggagacaaggtttgggtgggctatgcaagtggcactattcaagttgtcgatgtcgaaggtaaccttcaggcaggatggattggtcatagctgcccagtcatagacatggcaattagtgattcttacattttttctttggcacatcatggtggtattcgaggatggcctctaagttcccctagctccctagatgatattctatgctatgagttggctagcagggaactgttatacacaaggctagagaaccttaaaatactggttgggacttggaatgttgcacaagagaaagcttctcctgaagcactaaggtcatggttgggtggtgcattttttgatgttgggctggtggtggttggtttgcaagaggtcgagatgggtgctggagttcttgccatggcagctgccaaagaaagtctctcttatggccttaggtagggcttgaaggcagtgccaatgggcagtggtggatagacagtattggcaaaacacttgatgagggaatatccttccacagagttggttcaaggcagttggcaggactacttattgctgcatgggcaacgaatgaccttaggccacatgttggtgatgttgatactgctgcagtgccatgtggctttgggcgtgctattggcaacaagggtggcgtcggattaagaataagagtctttggtcgcaggatatgttttgtaaacaatcattttgctgcacatcaagagaatgttagccgccgcaatgctgattttgaccgcatttatcggacaatgactttcaccaaacctcagggatctgcagcttctgctacagctgtccaattgcataaagcagtgagtgcatgcgatcatcaagctttgttcgcggcaataactggctaggtttcgtcttggcaagggacatggtctcccagaggagctttgactggcttagagaaagggatcaacttcgagcggaaatgaaggcgggaaatgtgtttcagggaatgcgtgaaggcccaatcagatttcctccaacctacaagttccagagacaccagtcgggtctctcagggtatgattcaggcgagaagaagagaatacctgcttggtgcgacaggatactgtatcgagatagccgtcctgtaccaatagctgaatgctcattagagtgccctgtcgtcgctgcaatcacagcgtacgaatcttgcatggatgtcacagacagtgaccataaacccgtgagatgtacattcagcgtcgatattgcaagagtagacgagctgataaggaggcaagagtttggaaaaataatcgaatctaacaaaaaggttcgctctttgcttcgagagctccgttctgttccggacaccgtcgtcaacgcgaacaacattacattggaaaatcaccaagaagatgtcatcctccggataactaataactgtgaaaccagcaaggccgcttttgaaatcctgtgtgaaggccagacagtcagaaagcagggcggaacccaatctgaggagctgctcccaagggcgtcctttggcttcccactttggcttgaggtccaaccatcgatgggtctcatcggcccaggagaaacagcggaagtcgtcgtgcgccacgacgacttcctgacgcaggaagagtacgtcgacggagcacagcggaaccggtggcgcgaggccacccgagacctggaggtcgtgctctcggtgacagtcacgggcagctccagctcctcggccgaggccgtcgcgcacagggtcaccgtccggcactgctgcccggcgcctccggctcccctgcccgccaaccggcgctctgccgctgcctcgcctcgtgacgacgttgccgcgtcggataaccagtcgaaccacctgcaccgttccgatctcgccagcttcggtagctcggaggtgcgtgacctgtgcgggggcttgtgaaagcgagtttcgctgcctttgcttcatcgtcctgcattcctgctccttacatgtgcgtcgtcctgccgttctttgcgtgtcgaatcaaaaagcgagagagaaagaaagagagaggaaaaaaaaggaagaaagaagagagtgcaattgttgtaattacctgtagtaggtaaaattttcaagctaaccttttttttttgaccttcttaagttaagtagtagatgtggcattgaaattgtgttggtgcaaagtggagtgagtgtatggttgtatgtatagtaatggaggttgtatgcttgtatagtctattgattggacgatgctttgctcctactgcaatacagcgcaacgagaactgcagctgctcgc

SEQ ID NO: 204458 - DNA, 3709 bp, Zea Mays
gtctgttgcctcaccacccctctgtccctgcttccttctgctcccgcaacgggtggcctccgttccccgaccccgcccgactctcccacacatctccggcgctctcttcgagtcctcctgcagtcccgccgccttctcatcgctaccaaaattgcaaagccggactggaactcgcgtcgcgcgcaggggcatggacccggacgacgaaccagcggcgcagcggaaagccgtcgacttgcacctgccgcgcgacacggagcctgcctcctcgcccgcgtgcacccgccgcgccgcgccgcgcgtgctcagctactgtgacgtccctttcgcctccgcctcggcgcagcgctgcgcatcattcccgcagcgccacggagagctggcgcacgcccgctcggcctccttcgcagcctggatcgaaggcggctcggcgtcggcgccggcggcggcactcgagcgggccatgtcgcagtacggcggtgcggacggcgcgctgccagagttcgtcggcgccggcggtggcgagggcatcttccgcgtgccgctccgcgcggcgatgcacccggcgcgcccgccgccgctcgaggtgcggccccacccgctgcgggagacacaggcgggcgcctttctgaggacgctggcctgcgacccgcggcgacggcagctgtgggcgggcgccgagtccggggttcgagtgtggggcctccacgaggtgttccgtgggtggtggccgggcgccgggccgcggcgccgcggtgacgaggaggccgcgccgttcagagagtccgtgccggtcccgcccgcgctctgcgccgctgtcgacggcgctaacgggatggtgtggacggggcacagggacggcaggatcagggcgtggcgcatggaccacgccgcgcccgccggaggatactccgccggcagtgcgcccatgttcaaggaggccctctcgtggcaggcgtacagtcgcacgccggtgctcgccatcgtcgtcacgttgtacgggatgctaagactagggaacttttaaaagtatttggcatcgatggacaagtcgacttagctcgtcctgaggccccagtaatgcccgaacaattcatagaggaagagattaaagtaaaacccacaaaaagggagaggccgcaaggttctttcacattttttcagaaatctaggaatgccttgatgggcgcagctgatgctgtacgcagagttgcaacaaaagggacatttgtcgaagataatcggcgaactgaagcagtggctcaagcaatgaatgggacaatttggtctggttgcacagatggttcaattattgtttgggatggaaatgggaatagactgcgagaatttcattaccatagttcttctgttcgatgcataaagacactcggagacaaggtttgggtgggctatgcaagtggcactattcaagttgtcgatgtcgaaggtaaccttcaggcaggatggattggtcatagctgcccagtcatagacatggcaattagtgattcttacattttttctttggcacatcatggtggtattcgaggatggcctctaagttcccctagctccctagatgatattctatgctatgagttggctagcagggaactgttatacacaaggctagagaaccttaaaatactggttgggacttggaatgttgcacaagagaaagcttctcctgaagcactaaggtcatggttgggtggtgcattttttgatgttgggctggtggtggttggtttgcaagaggtcgagatgggtgctggagttcttgccatggcagctgccaaagaaagtgtagggcttgaaggcagtgccaatgggcagtggtggatagacagtattggcaaaacacttgatgagggaatatccttccacagagttggttcaaggcagttggcaggactacttattgctgcatgggcaacgaatgaccttaggccacatgttggtgatgttgatactgctgcagtgccatgtggctttgggcgtgctattggcaacaagggtggcgtcggattaagaataagagtctttggtcgcaggatatgttttgtaaacaatcattttgctgcacatcaagagaatgttagccgccgcaatgctgattttgaccgcatttatcggacaatgactttcaccaaacctcagggatctgcagcttctgctacagctgtccaattgcataaagcagctaatgaaaatcaagcagatgaaggtaggcctgatctggcagaagctgatatggttatcttccttggtgatttgaactaccgacttgatggcatcacctatgatgaagcaagggacatggtctcccagaggagctttgactggcttagagaaagggatcaacttcgagcggaaatgaaggcgggaaatgtgtttcagggaatgcgtgaaggcccaatcagatttcctccaacctacaagttccagagacaccagtcgggtctctcagggtatgattcaggcgagaagaagagaatacctgcttggtgcgacaggatactgtatcgagatagccgtcctgtaccaatagctgaatgctcattagagtgccctgtcgtcgctgcaatcacagcgtacgaatcttgcatggatgtcacagacagtgaccataaacccgtgagatgtacattcagcgtcgatattgcaagagtagacgagctgataaggaggcaagagtttggaaaaataatcgaatctaacaaaaaggttcgctctttgcttcgagagctccgttctgttccggacaccgtcgtcaacgcgaacaacattacattggaaaatcaccaagaagatgtcatcctccggataactaataactgtgaaaccagcaaggccgcttttgaaatcctgtgtgaaggccagacagtcagaaagcagggcggaacccaatctgaggagctgctcccaagggcgtcctttggcttcccactttggcttgaggtccaaccatcgatgggtctcatcggcccaggagaaacagcggaagtcgtcgtgcgccacgacgacttcctgacgcaggaagagtacgtcgacggagcacagcggaaccggtggcgcgaggccacccgagacctggaggtcgtgctctcggtgacagtcacgggcagctccagctcctcggccgaggccgtcgcgcacagggtcaccgtccggcactgctgcccggcgcctccggctcccctgcccgccaaccggcgctctgccgctgcctcgcctcgtgacgacgttgccgcgtcggataaccagtcgaaccacctgcaccgttccgatctcgccagcttcggtagctcggaggtgcgtgacctgtgcgggggcttgtgaaagcgagtttcgctgcctttgcttcatcgtcctgcattcctgctccttacatgtgcgtcgtcctgccgttctttgcgtgtcgaatcaaaaagcgagagagaaagaaagagagaggaaaaaaaaggaagaaagaagagagtgcaattgttgtaattacctgtagtaggtaaaattttcaagctaaccttttttttttgaccttcttaagttaagtagtagatgtggcattgaaattgtgttggtgcaaagtggagtgagtgtatggttgtatgtatagtaatggaggttgtatgcttgtatagtctattgattggacgatgctttgctcctactgcaatacagcgcaacgagaactgcagctgctcgc

SEQ ID NO: 204459 - DNA, 2185 bp, Zea Mays
gcaggtttcgctgcagcaagtcatcgccactgcaccaccacctctctctcgctcctccaacgttttgggcttttgggcagggccaccgcgcaccaccctagcgcgcgctctctcctctgcctctctctatatatacgcgcacattctctcgctccgctccgctcctctcaccggcccggacagcttctctctctctctggtactgctagagctacctagctagccagagccaggctctctctctgtagctggtcagtgatcaatactgccgccgcccacaaattccacctctcaagaacagcgctgcatggcggtgtcgttgtagctagcgtcgtcctcgcgtccatcgctatataattaagctagctgctaggagccatcgggagagagagagatcgggagagagaaggaagtttgatccggccggccggatcggatcggagctaggtgatcggtgcagctaactagctctagccatgggcaagagctgcgtgccccccgtcgccatggtgctcgtgcagctgggctttgccggcatgaatgtggtgtcaaagctggcgctggacgccggcatgagcccctacgtgctcatcgcctaccgcaacctcatcgccgccgccgtcatctcccccgtcgcctacttgcttgagagacgaagcggggcgacgatcacaaagaaggtgctcctccagatcttcgtctcctccatcttcggggcgacgctgaaccaggtgctgtacttcgtgggcctcaagtccaccagccccaccgtggcgtgcgcgctcaccaacacgctgccggcgctgacgttcgtgatggcggcggcgctgaagatggagtcggtgcggccgggcacgccggcggggcaggccaagctggtgggcacggcggtgtgcgtgggcggctccatggtcatacccttctacaagggccccgtgctggggctgtgggcgtccccgctccactggcgcttcgtcgcggaccacgcgccgtcgcccgccgccgccgccgcacactcgggagccgccgtgctcggggacgtcctcatcatcgccagctgcgtcgcctgggccgtctggttcatcctccacaccaagatgtccgagggcttctccgcgccctacaccagcaccgccatcatgtgcctcatggcgggcgtgcagtgcgcgggcgtcagcgccgccatggaccgcagcctcgacgtctggaagctcggctgcgacatcaggctctactccgtgctctacatcgtaaagcgtctgctcgatcatggcatcgttggctccggcatcgggttcacgctcatgtcgtggtgcatccaggtgcgcggcccgttgtacgtgtccatgttcagcccgctgctgctcgtcgtcgtcgccatcatcggctgggccatcctcggcgagaagatacgcgtgggaactgctgtcgggtccgtgctcatcgttgccgggctatacatggtgctctggggcaaagggagggagatggacaggccggacctcgacaacgacgacgacatagccgacgaggagaccgccgtgggccttgttggcttcagcggcaagggcggtggcgcggtcgccatcgcaagcagccgcgtcgaggccatcagcctgccggtgtcgttctccacaactagccccaagcggctgcaacacatccacgggtgaagggtgacgtggccgacgacgtgcgcgcgtgtcactttggacgcgccaagaaatctttcagggagccatggagagagtgagagtgtggtgaaaaaaaaaataaggcaaaatagctagtggacggaggcaagacgacggcggcgacgatcggattggagtggcacacataaagacttattgtatacggttggttgcattgccgttgcagcagcgtcacagcgtggtttgttacaaacaggaaacaaacaaacaggagtgtgtgatgatgtgactgtacctagtggaagctaaggattgcttgctagcttggatggccttcttgttctgtctgcccttcccttgcattggattggatgacctgatttagttcctccaaagagtctcattcatcatacagttctcttctgccgctgcttcttccatcaagtgcagtttttctttgtcctcagtttttgcatgccaaacgattaataattggtcgaaaagaggaacagaggggaaatggctttttt

SEQ ID NO: 204460 - DNA, 2113 bp, Zea Mays
gcaggtttcgctgcagcaagtcatcgccactgcaccaccacctctctctcgctcctccaacgttttgggcttttgggcagggccaccgcgcaccaccctagcgcgcgctctctcctctgcctctctctatatatacgcgcacattctctcgctccgctccgctcctctcaccggcccggacagcttctctctctctctggtactgctagagctacctagctagccagagccaggctctctctctgtagctggtcagtgatcaatactgccgccgcccacaaattccacctctcaagaacagcgctgcatggcggtgtcgttgtagctagcgtcgtcctcgcgtccatcgctatataattaagctagctgctaggagccatcgggagagagagagatcgggagagagaaggaagtttgatccggccggccggatcggatcggagctaggtgatcggtgcagctaactagctctagccatgggcaagagctgcgtgccccccgtcgccatggtgctcgtgcagctgggctttgccggcatgaatgtggtgtcaaagctggcgctggacgccggcatgagcccctacgtgctcatcgcctaccgcaacctcatcgccgccgccgtcatctcccccgtcgcctacttgcttgagagacgaagcggggcgacgatcacaaagaaggtgctcctccagatcttcgtctcctccatcttcggggcgacgctgaaccaggtgctgtacttcgtgggcctcaagtccaccagccccaccgtggcgtgcgcgctcaccaacacgctgccggcgctgacgttcgtgatggcggcggcgctgaagatggagtcggtgcggccgggcacgccggcggggcaggccaagctggtgggcacggcggtgtgcgtgggcggctccatggtcatacccttctacaagggccccgtgctggggctgtgggcgtccccgctccactggcgcttcgtcgcggaccacgcgccgtcgcccgccgccgccgccgcacactcgggagccgccgtgctcggggacgtcctcatcatcgccagctgcgtcgcctgggccgtctggttcatcctccacaccaagatgtccgagggcttctccgcgccctacaccagcaccgccatcatgtgcctcatggcgggcgtgcagtgcgcgggcgtcagcgccgccatggaccgcagcctcgacgtctggaagctcggctgcgacatcaggctctactccgtgctctacatcgtgcgcggcccgttgtacgtgtccatgttcagcccgctgctgctcgtcgtcgtcgccatcatcggctgggccatcctcggcgagaagatacgcgtgggaactgctgtcgggtccgtgctcatcgttgccgggctatacatggtgctctggggcaaagggagggagatggacaggccggacctcgacaacgacgacgacatagccgacgaggagaccgccgtgggccttgttggcttcagcggcaagggcggtggcgcggtcgccatcgcaagcagccgcgtcgaggccatcagcctgccggtgtcgttctccacaactagccccaagcggctgcaacacatccacgggtgaagggtgacgtggccgacgacgtgcgcgcgtgtcactttggacgcgccaagaaatctttcagggagccatggagagagtgagagtgtggtgaaaaaaaaaataaggcaaaatagctagtggacggaggcaagacgacggcggcgacgatcggattggagtggcacacataaagacttattgtatacggttggttgcattgccgttgcagcagcgtcacagcgtggtttgttacaaacaggaaacaaacaaacaggagtgtgtgatgatgtgactgtacctagtggaagctaaggattgcttgctagcttggatggccttcttgttctgtctgcccttcccttgcattggattggatgacctgatttagttcctccaaagagtctcattcatcatacagttctcttctgccgctgcttcttccatcaagtgcagtttttctttgtcctcagtttttgcatgccaaacgattaataattggtcgaaaagaggaacagaggggaaatggctttttt

SEQ ID NO: 204461 - DNA, 2212 bp, Zea Mays
gcaggtttcgctgcagcaagtcatcgccactgcaccaccacctctctctcgctcctccaacgttttgggcttttgggcagggccaccgcgcaccaccctagcgcgcgctctctcctctgcctctctctatatatacgcgcacattctctcgctccgctccgctcctctcaccggcccggacagcttctctctctctctggtactgctagagctacctagctagccagagccaggctctctctctgtagctggtcagtgatcaatactgccgccgcccacaaattccacctctcaagaacagcgctgcatggcggtgtcgttgtagctagcgtcgtcctcgcgtccatcgctatataattaagctagctgctaggagccatcgggagagagagagatcgggagagagaaggaagtttgatccggccggccggatcggatcggagctaggtgatcggtgcagctaactagctctagccatgggcaagagctgcgtgccccccgtcgccatggtgctcgtgcagctgggctttgccggcatgaatgtggtgtcaaagctggcgctggacgccggcatgagcccctacgtgctcatcgcctaccgcaacctcatcgccgccgccgtcatctcccccgtcgcctacttgcttgagagttcttggggaaacgcaacgaaactgacacaacagttgtgtgcgtgcagacgaagcggggcgacgatcacaaagaaggtgctcctccagatcttcgtctcctccatcttcggggcgacgctgaaccaggtgctgtacttcgtgggcctcaagtccaccagccccaccgtggcgtgcgcgctcaccaacacgctgccggcgctgacgttcgtgatggcggcggcgctgaagatggagtcggtgcggccgggcacgccggcggggcaggccaagctggtgggcacggcggtgtgcgtgggcggctccatggtcatacccttctacaagggccccgtgctggggctgtgggcgtccccgctccactggcgcttcgtcgcggaccacgcgccgtcgcccgccgccgccgccgcacactcgggagccgccgtgctcggggacgtcctcatcatcgccagctgcgtcgcctgggccgtctggttcatcctccacaccaagatgtccgagggcttctccgcgccctacaccagcaccgccatcatgtgcctcatggcgggcgtgcagtgcgcgggcgtcagcgccgccatggaccgcagcctcgacgtctggaagctcggctgcgacatcaggctctactccgtgctctacatcggcatcgttggctccggcatcgggttcacgctcatgtcgtggtgcatccaggtgcgcggcccgttgtacgtgtccatgttcagcccgctgctgctcgtcgtcgtcgccatcatcggctgggccatcctcggcgagaagatacgcgtgggaactgctgtcgggtccgtgctcatcgttgccgggctatacatggtgctctggggcaaagggagggagatggacaggccggacctcgacaacgacgacgacatagccgacgaggagaccgccgtgggccttgttggcttcagcggcaagggcggtggcgcggtcgccatcgcaagcagccgcgtcgaggccatcagcctgccggtgtcgttctccacaactagccccaagcggctgcaacacatccacgggtgaagggtgacgtggccgacgacgtgcgcgcgtgtcactttggacgcgccaagaaatctttcagggagccatggagagagtgagagtgtggtgaaaaaaaaaataaggcaaaatagctagtggacggaggcaagacgacggcggcgacgatcggattggagtggcacacataaagacttattgtatacggttggttgcattgccgttgcagcagcgtcacagcgtggtttgttacaaacaggaaacaaacaaacaggagtgtgtgatgatgtgactgtacctagtggaagctaaggattgcttgctagcttggatggccttcttgttctgtctgcccttcccttgcattggattggatgacctgatttagttcctccaaagagtctcattcatcatacagttctcttctgccgctgcttcttccatcaagtgcagtttttctttgtcctcagtttttgcatgccaaacgattaataattggtcgaaaagaggaacagaggggaaatggctttttt

SEQ ID NO: 204462 - DNA, 947 bp, Zea Mays
gcagcgtttgctgaccgtgtgacagactgacagtacatcaggctcctgtcttcctcacccgtacacgcacgggatcctgaacgccgtgagctggggcctcctgctgcccatgggcgccaccttcgctcggtacctcaagacgttcaggtccgccgacccggcctggttctacctccacgtggcgtgccagctggccgggtacggcgtcggggtgtccggctgggccaccggcatccacctcgggaacctgtccaaggggatcacctactcgctccaccggaacatcgggatcacggtcttcgccctcggcactctgcaggtctttgcgctgttcttgaggccgaagaaggagcacaagtaccgggtgtactggaacgcgtaccaccactcggtggggtacacggtgatcgtgctgggcgtcgtcaacgtcttcaagggcatggccatcctggacgtggagcggaggtggaggacgggctacgtcgccgccgtctccgtgctggccgccgtcgccgtggcgctggaggccgtcacgtggggcgtcgtgctgcggcgccggaagcaggaggaaaagacctccaacgccggccgcttgccgctgtctatgtaatatatatatatatacctcatcgtcgtcgtcgtcgggggcgtctcactatatatctatctgatctgatctgatcttcagagtagtaggccttacgatgggttgggttagctagctagtgtgtgtatcttcattgtatggtaggtgtctctgtgtgtgtgtgtatactgcacgttcgtatactggagatgagtgagtgtgataccggccggcggcattggtctttggctgttgcctttttgtttctgttcgttcgtgaatgctgatctgatcatgcacttgcgttctgggatcatgctattttggctgctgctccatctcgcaaagaggagaaaaaaaa

SEQ ID NO: 204463 - DNA, 1174 bp, Zea Mays
gttccttactacaatagcaagtactagcgatctagcgtgcatcgccagcccgtcccactatcgcctctcctctcattctctcgtgctctccacccgtttcccgcaaaaccctagctctgcgacatgcaccgcggcggcgatcgctccggcggcccctcgagcggcggagaccgctctggagcccggttccagcggggtccctcccgctggtctggcagcagcggcggcggattagggggtagcccgcccaatcgctactcctcccgcggcgcggcagatggaggtggtggagggggcggtggcagtggcggtggcgggaggttccacccttaccgtggttcttccgactattctagcggcggtggagggtacagaggcggtagtggcgttggtaacgacttcggcgaccagaggcaacgttacggcggcggcaacagaggcggaggccgtggggatttccaagatcatgatagtagaagtaactatgtcaaactttttgtcggatctgttccgaggacagcgactgaagaagacgttcgtcctttatttgaggaacatggagatgttcttgaagttgctctaattaaggataggaagaccggtgaacaacaaggtttctgagaggttataggagcaacaaggttgcatcttctctcagttagattggcggttgttgattttcatttcctgcgcttccattctgtccgtctcctgtggattcagtagaagactagaatggacgcgactaactgcccgctgattactggaacctaactagccacaacttcactgctacacaaggcagcaaatttggtaccaacagctgtgtttagatgatattgaccttctggatgtcctgtagttctagaacaatgagcttgtagtttcacctttgcatctgtgtgccttgattttgttgcaagaacttatataatcttataatgaattaatacaaaattctcatcctctgcctttcatggtttaagatttattatccatgtaatcatgaattgcatatgatgtgggattccttaatgtaagcgattgaatccctcgatatgagttattggatgatgcggtatagctgcatattgctgtcacgattgatggcaggtggtgtgtggtgttgatgaccttctactgtttggaaattgtatgttgcgcaccgtcaatc

SEQ ID NO: 204464 - DNA, 774 bp, Zea Mays
tgcatggcatgttataaaatagaaaactaaaatctaaagtagatgtctcttgtaattttcaatcttgtttgttaaatttgtattaatttgatacaatcaatttaaatttatctttaaatattgtacttctagcgggaacagattccccgcggggttccccacggggataaattccccgacggggacggggatgggagaaaaagctcccccgtgagcgttcgcgggaacggggacggggaatttttgtccccgcggggacggggatgggaagccattccccgacgggaaaatccccgttgccatccctaaccatgggtggtacgaaaatagaaatgcaaaattaccatagtaagaagaccggcgaccttcatgaccagaatcataccttactctagttctgctgcgcatttcttctggcctttttcgtgactcagcagcaagaacaacagctatttcccgaccaaagaaaacttggcgattcatgtgatactgggcttcagaggcatcgtaaggatcaacaaactctacaaaggcaaatcctcgaggctccccagagtaatagtcctttggaatgtaaacatcccgaacagggccaaacctttcaaaaggaactcgaagatcctccgctcttacaaagtttgagaagaaaattaaagtcaactactcaagtatcataggagtattcggttctttatttaaaacagtatgtcataaaatgaagatcaatttattcttttaaagatggaaggaaaaagtacactgttttgcatgcac

SEQ ID NO: 204465 - DNA, 1805 bp, Zea Mays
agaaaactaaaatctaaagtagatgtctcttgtaattttcaatcttgtttgttaaatttgtattaatttgatacaatcaatttaaatttatctttaaatattgtacttctagcgggaacagattccccgcggggttccccacggggataaattccccgacggggacggggatgggagaaaaagctcccccgtgagcgttcgcgggaacggggacggggaatttttgtccccgcggggacggggatgggaagccattccccgacgggaaaatccccgttgccatccctaaccatgggtggtacgaaaatagaaatgcaaaattaccatagtaagaagaccggcgaccttcatgaccagaatcataccttactctagttctgctgcgcatttcttctggcctttttcgtgactcagcagcaagaacaacagctatttcccgaccaaagaaaacttggcgattcatgtgatactgggcttcagaggcatcgtaaggatcaacaaactctacaaaggcaaatcctcgaggctcccatcaaattcaaatattcactgtgccctctatggttctcagcgaagcacagtcaacaacttacaaacattccatcagaagagaagcaagtgttgcaaaaagcagtaagatgcccaggctctagtgtccaagtttcttgtatacaactacgtaaggtgatcctcataaagagtatcttcataaaaatcgttcgcttcaagttccccaacatttgaaaaagtcacaaaagtacttgaaattgacttgactctcttttatcttctcatgtaccagccagtatatatgtctctcatcttctcttcatgaaattaattttctcaaagtatcaaatcttgtcttcatagaagaacttcattggacaagactctatcttgccaagcaaatgaattgttagtaatgttaaaaggcattctttgagaaacaaagagtatgcttatacttcaaactaacacaaccctgggaatcattaagaaaatataatccacatagtgcaatgatgaattggctatgggaaagcagagtacaagttcatactccatcatgttgttagatatcaattgatggtgcaagtcgattgcaaaaaaaataacatgagactcatcagagcttaagcgcaccaaacacattgcaaattagacattgcactgaaactgaagtatgcactagtgttcactttgttaaatataggatgtcagttctataattcatgcctctagaaaattagtttgacgattatgaccaagaggttgataggctagggacaacaccaattgaagaaaagcttgttcaacatcggttgagattgtttggacatgtccaacatcggttgagatcaaggctattaaggcgtccctaaagtgacgcttaagaggtaaggcgggcttggactcataaggcatcctgtcaccttgcccgcgagagtaaggtgtgagtgtgaggaggctctgcggcgcgcatggctccgggaaatgcacggcggcagcgcgggggagaggaggaggagagctgcgagagagggagagataggagagtggctgaggctagcagcgcgaagggctccggtagaagtgcggcggcggcgcaggggagagggagagaggacagctgcgctggcagctgagagtggagagcggctgaggctggcggtaggtttatcataaaactagtgtgttgggctggacagctggttgtgggcttttttctttttctgttttcctatttctctcttctactatgtcgaaatgggcctaatagactttacaattgtgctagattg

SEQ ID NO: 204466 - DNA, 3809 bp, Zea Mays
ctttaaaaaaaaaggagagagtgtcagtatcagtatatagctgtcggcaaaccactcgctctcacagtgagacggctgtactgtactgatcactcctggcctctgcgaaggaaagaagaggtgggggaggctggtttggtggcctgtaccgatttgcagcagctgatggcggcgcctctgctcccctcttccgtctccgtgctcctctcgctccacatcgcgctgctgctggtcctctgctccagccaggtaggagattcctgctcctcagtgcgggactgcggcacgggcctctactgcggcaactgccccgccgcaggcaggaccaagctctcctgcatcagggacctagccatccagcccacctccattgtgaaggggctacctttcaacaggtactcatggctcgtcacccacaattccttttccatcctcggggagccgtcgcgcactggggttgagagggtcacgttctacaaccaggaggactccgtcaccaaccaattgaggaatggtgtcaggggattgatgcttgatatgtatgacttcaacgatgatgtatggctctgccactccctgcaagggcaatgctataacttcactgctttcgtaccagcagttgacacactaaaagaggtggaagcatttctctccgagaatcccacagagatcataacaatatttattgaggattatgttcattcaccgatgggactgagcaaggtctttactgctgctgacttgatgaagtattggtatccaatctcggaaatgccaactagtggcaaggactggccaagtgtcacagatatggttgcaaaaaaccgcaggttgctggtgtttacttctgatgcttcaaaggaggctagtgaaggaatagcttaccaatggagctacttgctagagaatgaacctggagatccagggattgtgcctggttcttgtccaaacaggaaggaatcgcagccactgaactcaaggccggcatctctatttctgcaaaattacttccccacgatccccgtgcagaacgaagcatgtaaagagaattctgggctaccacaaatggcccaggcttgttatgccgcagctgggaataggatcccgaacttcatagctgtgaatttctacatgcgaagcgacggtggtggtgttttcgatgttcaagacagaatcaatggccgcaccttatgtgggtgtgacaccattgctgcttgccaggctggagcaccaatgggtgcatgcaaggacacgggggcaccaaatcagactacatcgccctctgtaaatggaaatgtctattcaggaactatagaattcaagacgcattccactagtgctgctagcaataacaacatccggagtagatctgtttttctgctaaggctgcagttgactttgctgctctttttctctttcaggctctagttttcatatatctggacctttttcccacctactgtatagctgaaagtaacatcagcttttgttgtgagcttgctttctctattgggatgacggttagtgccttgctagctttataatctatagttgggagggggtgtggatcaatgttaatgaaagaatgggtagagatcttcctctgttctccgaggaggagtaatacggctacaacctacaaagaaactgatgagtggaagttcatgctggttatgtgattactagatatatgcatgcgtgttgcacctagaccgaaattttgttcacatcaatggaaaccgcgtcttctctgtgccctctactgacgggtgggtcaccacgggtcccggactcggttggacacagggtccagcactccagcagccagccgtccaggcaccaggctcatccagtgttcgagtcctcgtcgacttcgctttcccgattcctaaccccgcaggccgcaggctcgcatcgccaagcatcttccgcgtctcttcggagacatctagtaaaagcatcttccgctactccgccctccgcctcccccgtctgcttcgcaatccgatccggcgaccggcggccatggatcctgcgccgcagacgcacccgatcctctcttacgtgctctcccgcatccccaacctctccatgaccaagacccccaccgccgagttcgacatcgagcagccgcctgtgcacaccccgtccccgcggacgccgtcctccgcgggagagttcgagctcgtcgagcgcatgccggggctgcgccacccgtccgtgctccgcgccatgacccgcgccgtcgccgacgtctccgccgcgcgctccgcgctgcaggtgctcggcccgcgccccgaccacgagctcgtcgactcctcccgcgccatagtggccgccgccgaggccggggattcgcggatccccgcgggcgacgtcgaggcgtgccgcgcggtggtgcgcctcgatgagacccacgacgcctacgaggccctgctgcacgaggccgagtccaggctcgagagggtgtaccgctccgcgatggaggggacggacctggatgacgaggcggcggagagcgtcaaggatcaagggccggtcgcggggcctgagggcggggacgcggcggtgggggaggaggtggtggcggtgctcaagcaggccgaggagggcaagccggtggacagcgtgcgcctcgtggatcgccagcttcgccatctgcccgaggcgttcgggaggatcctggggctccgtgtgctcgacgtctcccgcaaccagcttgaggttattccagatgctataggaggacttggtcatcttgaagagctttttcttactgccaatgatttggtatctctacctgataccattggactgctatccaatctgaagattttgaatgtatcaagtaataggcttagggcactgccagatagcatctccaagtgcagttgagcttaatgtgagctataatggtcttacttatctgccaaccaacattggttatgacttggtaaatctgcgaaaactctggattcatatgaacaaattgcgttctcttccatcatctgtctgtgagatgagatcgttgtatctcctggatgcccattttaatgaactatgcggtctaccatctctcttcgggaaacttagcggccttgaaattctcaaccttagcagcaacttcagtgatttgaaagagcttcctccctcgtttggtgacttgctaaatctgcgtgagcttgacctaagcaacaaccagattcatgctctccctgacacttttggtcggctggataaactggagaagcttaacctagagcagaaccctctagtcatgccaccagaggacattgtgaacaagggcgtggatgcagtaaaagagtacatgtcaaagaggtggctggacatattgctcgaggaagaacaaaggcgcattgcggcagagaccccagaaatgtcatcgactcctaaagcttggctgactcgcagcgtctcctgggtcacggacgtttctgagagtttggcagggtacctaggtgggaacaagtcagagaaagatgcatatctggaccagcagttttgatactttatgtttcttttgcctaatgtgcattcgccccatgtatacacaaataacgtttaccaaaaatcttcattacagatgtgttcctggtgagtataccgtacggttttgcttaggaaatggatgtgttcctaatgggtctgtcgtacggttttaccgtggtccattgaataatagtatctcacagcacttgagagtacactcaagataaacattgttcagagatcgacctgtcttctggtatttggctttcgcccttcgctgtgaatttttgttccatgta

SEQ ID NO: 204467 - DNA, 3476 bp, Zea Mays
gagacggctgtactgtactgatcactcctggcctctgcgaaggaaagaagaggtgggggaggctggtttggtggcctgtaccgatttgcagcagctgatggcggcgcctctgctcccctcttccgtctccgtgctcctctcgctccacatcgcgctgctgctggtcctctgctccagccaggtaggagattcctgctcctcagtgcgggactgcggcacgggcctctactgcggcaactgccccgccgcaggcaggaccaagctctcctgcatcagggacctagccatccagcccacctccattgtgaaggggctacctttcaacaggtactcatggctcgtcacccacaattccttttccatcctcggggagccgtcgcgcactggggttgagagggtcacgttctacaaccaggaggactccgtcaccaaccaattgaggaatggtgtcaggggattgatgcttgatatgtatgacttcaacgatgatgtatggctctgccactccctgcaagggcaatgctataacttcactgctttcgtaccagcagttgacacactaaaagaggtggaagcatttctctccgagaatcccacagagatcataacaatatttattgaggattatgttcattcaccgatgggactgagcaaggttgctggtgtttacttctgatgcttcaaaggaggctagtgaaggaatagcttaccaatggagctacttgctagagaatgaacctggagatccagggattgtgcctggttcttgtccaaacaggaaggaatcgcagccactgaactcaaggccggcatctctatttctgcaaaattacttccccacgatccccgtgcagaacgaagcatgtaaagagaattctgggctaccacaaatggcccaggcttgttatgccgcagctgggaataggatcccgaacttcatagctgtgaatttctacatgcgaagcgacggtggtggtgttttcgatgttcaagacagaatcaatggccgcaccttatgtgggtgtgacaccattgctgcttgccaggctggagcaccaatgggtgcatgcaaggacacgggggcaccaaatcagactacatcgccctctgtaaatggaaatgtctattcaggaactatagaattcaagacgcattccactagtgctgctagcaataacaacatccggagtagatctgtttttctgctaaggctgcagttgactttgctgctctttttctctttcaggctctagttttcatatatctggacctttttcccacctactgtatagctgaaagtaacatcagcttttgttgtgagcttgctttctctattgggatgacgatatatgcatgcgtgttgcacctagaccgaaattttgttcacatcaatggaaaccgcgtcttctctgtgccctctactgacgggtgggtcaccacgggtcccggactcggttggacacagggtccagcactccagcagccagccgtccaggcaccaggctcatccagtgttcgagtcctcgtcgacttcgctttcccgattcctaaccccgcaggccgcaggctcgcatcgccaagcatcttccgcgtctcttcggagacatctagtaaaagcatcttccgctactccgccctccgcctcccccgtctgcttcgcaatccgatccggcgaccggcggccatggatcctgcgccgcagacgcacccgatcctctcttacgtgctctcccgcatccccaacctctccatgaccaagacccccaccgccgagttcgacatcgagcagccgcctgtgcacaccccgtccccgcggacgccgtcctccgcgggagagttcgagctcgtcgagcgcatgccggggctgcgccacccgtccgtgctccgcgccatgacccgcgccgtcgccgacgtctccgccgcgcgctccgcgctgcaggtgctcggcccgcgccccgaccacgagctcgtcgactcctcccgcgccatagtggccgccgccgaggccggggattcgcggatccccgcgggcgacgtcgaggcgtgccgcgcggtggtgcgcctcgatgagacccacgacgcctacgaggccctgctgcacgaggccgagtccaggctcgagagggtgtaccgctccgcgatggaggggacggacctggatgacgaggcggcggagagcgtcaaggatcaagggccggtcgcggggcctgagggcggggacgcggcggtgggggaggaggtggtggcggtgctcaagcaggccgaggagggcaagccggtggacagcgtgcgcctcgtggatcgccagcttcgccatctgcccgaggcgttcgggaggatcctggggctccgtgtgctcgacgtctcccgcaaccagcttgaggttattccagatgctataggaggacttggtcatcttgaagagctttttcttactgccaatgatttggtatctctacctgataccattggactgctatccaatctgaagattttgaatgtatcaagtaataggcttagggcactgccagatagcatctccaagtgcaggtcgctagttgagcttaatgtgagctataatggtcttacttatctgccaaccaacattggttatgacttggtaaatctgcgaaaactctggattcatatgaacaaattgcgttctcttccatcatctgtctgtgagatgagatcgttgtatctcctggatgcccattttaatgaactatgcggtctaccatctctcttcgggaaacttagcggccttgaaattctcaaccttagcagcaacttcagtgatttgaaagagcttcctccctcgtttggtgacttgctaaatctgcgtgagcttgacctaagcaacaaccagattcatgctctccctgacacttttggtcggctggataaactggagaagcttaacctagagcagaaccctctagtcatgccaccagaggacattgtgaacaagggcgtggatgcagtaaaagagtacatgtcaaagaggtggctggacatattgctcgaggaagaacaaaggcgcattgcggcagagaccccagaaatgtcatcgactcctaaagcttggctgactcgcagcgtctcctgggtcacggacgtttctgagagtttggcagggtacctaggtgggaacaagtcagagaaagatgcatatctggaccagcagttttgatactttatgtttcttttgcctaatgtgcattcgccccatgtatacacaaataacgtttaccaaaaatcttcattacagatgtgttcctggtgagtataccgtacggttttgcttaggaaatggatgtgttcctaatgggtctgtcgtacggttttaccgtggtccattgaataatagtatctcacagcacttgagagtacactcaagataaacattgttcagagatcgacctgtcttctggtatttggctttcgcccttcgctgtgaatttttgttccatgta

SEQ ID NO: 204468 - DNA, 684 bp, Zea Mays
ctacatgttagtacctagttatcccttaattggggatgtggacccattggggacccgaaacccgaatggggatgagtatgagatgagttttgtacccatgatggatatggagatgagtatggagatggatcaaacatgatggggatggagatgagatgctataacccggtggggaattcccattgacatctctaaccacacctcttacctaaaataagaaagaaaactagaacctaaaaaccagcgacgccgagcggatctacagccaccttggtcaccggcggcgatggcgagttccaagtccggcatccctatcaaggcagaacaagattcggatggctcggcacaaagcacagctgatatgacggcttttgtgcaaaaccttcttatgcagatgcaaaccaggttccaagctatgtcggagaacatcatttcaaagatagatgaaatgggtgcgagaattgatgaattggaacagagcctcaatgacctcaaggctgagataggcggtgaaggcatgtcgacgccatctaagatgaaggaagagtcaagaccttcagacagctccgcatgagtgcagcagaagcagcatgactcgtttcagaggccgttgctgtgtcttgggcgttcatcactaacaaatacgtacctgttttaaggtaggagcaggtactcgaaccataa

SEQ ID NO: 204469 - DNA, 2118 bp, Zea Mays
agtcccttgaataatgacattctgttggactgacaaagcgtcgatattagacgagacgattgagtatctgaagtccctccaaatgcaagttcagatcatgtggatgacttctgggatggcgccaatgatgtttcctggtgttcaccaattcattccacagatggctctaggaatgaatccaggttgcatccctgcagcacagggcctaagtcagatgccaagattaccatacatgaaccacaccctgccaaaccatatccatctgaactcgtctccagctatgaatctaatgaatccactgaacgccgcgaaccaggtgcaaatcggtcacctcagggatgcaagtagccacttgcttcacctagatggcgggcgagcagcagtggtacctcaggtaccaggaccaggaccccatgttcatggacatcaaatagcacaagccgaagaacacaataagatactggaagtggcagctagtactgttataccaacttctaaggcagggcaaccaccaactttacatagagtttagagtgaccaaaatcatgccttgagctgtatatctgtacagaagtgtcagaagcatattctttgacatgtaagcttagttctagagttattatcaggagtcttgtataggttacaagataacagcctgtctaccgccgtattctatctacggaagaactcagctgcatactgctgtgcagactgcagtacagcgttcaagagagaattgaatgggatcaagaaagggtctttctttttctgggaaccgctgaaaatactgacgtgatgaggagcggatggcatctctgtagctgcgctgcgctgcagtgtatctacatcaatatggcaatgcttgtctggacacgaatgctacatctacatgtaaatgcagagttgcaggtagatagcaacccctctcccctgagatgccaactccgactcctgtcctactgtatgtactgatctgtacagcaagcaatattcaatcagcagtcaattcctaggatgtcgtaaggtactgtggaaacatttttccttcgaatactgttatactaatgaaaaaagggagtgtcgaaatgtttgttgtcaactgacgaaaatccagccagcaggcccgtcctacctgcagacagaatggataacaagcttatgaatccgaagtgcatatttatatcgcatatcatatattaatcaatcctgtctttctgcctgctcctatttgtaggtcacgacaatgatcctatctaagtacataagtcgctaacaccatttcctgcttgtggaaaggtttggtcttgcaggagatgagctcgccagacagtccatcacactgccggcttgattgcatcttcacaggacgtggacttgtgggcacatgctccacgggcaacggttcggcatcctcctggcgttcttgtggctggcagcagccgcgagaatctgtgtggagccctgggctgggctcgttgcaagatatgccagcctctcatcttcagactggaggaggaggggggggttccctctccaggctttttccatgatgttacaggcttacagcattcagagtgcatgttacactcacggccctatcagcacatgctgtgggcagccggtgatgataggatcagatgctcatatctcctgcggttttctgtctaccgcatttggattggatttggaccccccctgtactgtacttcctccttgctcccctgctgcttggcgctttgtccatgtgcctggttggaattgctactatacatttttggagggtaattgtttcaccggaacatgtagcgtggacgtgtggtaataacaattgaattgatgcctttactgtctgagtaataacaaagggaagcgatgagcagcacatggtaagcttccggtgccggttggaggcttcgatgtcgatgtctgcattgagtttatttgatgctgtgtgttctatagctagactaggctagagtttggatagagttcatgggacaatgttgtctgcatcttcatctcccctttagtttaggacttatctgagaggtacggttctttgcatgacagaacaaaactagcagcagcaaaaaaaaaaaaaaaaggaaacaacgacaa

SEQ ID NO: 204470 - DNA, 3026 bp, Zea Mays
gggacagcggctgcagccacccagtcttgcaaggcgccaaggacggacggaggcgacgactcgcaaggtagctctgctcgggcgaggcagcagcagcacgcagcagtactccgttcagaatcaggagagaagacgttgttctccgggcactcgagtcgaagtcctgacgagatggacggcaatgcgaggtcggcggcaacgaatcagaagaagcccgtcgtcgcggacgacgacctcgtggagctgctgtggcacaacgggagcgtcgtcgcgcagccccaggcgcaccagaggccggcgcccacctacgaccccgaccgcccgggcaccagcggcctcaccggcgaagagaccgccgcgtggttcccggacaccctcgacgacgcgctggagaaggacctgtacacgcagctctggtacagcaccatcgccgacgccgccccgcagcacgagggcacgctcccgggccctacctcgcagccttcgccttcgccgcccgttgggagcagcggcgtcgagtcgagctgggctggcgacatctgctcgaccttctgcggaagcaaccaggtgctcaggacgccggcaaggatcagggggaaggacgcggcattgcagtcggagttgccgagcaataccggcgcgcacgacggcacatcgtcatccggcgggtctggaagcaactatgggggattcgggctgcccagtgacagcgtccatgtacagaagaggaaggggaggtgtagagacgactcagatagtccgagtgaggatgccgagtgtgaggaggcaagtgaggaaacgaaaccatcaaggcgatatgggacgaaacgccggactcgtgcagctgaagttcacaatctttcagagaggagaagaagggaccggatcaatgaaaagatgcgcgcattgcaagagctcatcccgcattgcaacaagactgacaaagcgtcgatattagacgagacgattgagtatctgaagtccctccaaatgcaagttcagatcatgtggatgacttctgggatggcgccaatgatgtttcctggtgttcaccaattcattccacagatggctctaggaatgaatccaggttgcatccctgcagcacagggcctaagtcagatgccaagattaccatacatgaaccacaccctgccaaaccatatccatctgaactcgtctccagctatgaatctaatgaatccactgaacgccgcgaaccaggtgcaaatcggtcacctcagggatgcaagtagccacttgcttcacctagatggcgggcgagcagcagtggtacctcaggtaccaggaccaggaccccatgttcatggacatcaaatagcacaagccgaagaacacaataagatactggaagtggcagctagtactgttataccaacttctaaggcagggcaaccaccaactttacatagagtttagagtgaccaaaatcatgccttgagctgtatatctgtacagaagtgtcagaagcatattctttgacatgtaagcttagttctagagttattatcaggagtcttgtataggttacaagataacagcctgtctaccgccgtattctatctacggaagaactcagctgcatactgctgtgcagactgcagtacagcgttcaagagagaattgaatgggatcaagaaagggtctttctttttctgggaaccgctgaaaatactgacgtgatgaggagcggatggcatctctgtagctgcgctgcgctgcagtgtatctacatcaatatggcaatgcttgtctggacacgaatgctacatctacatgtaaatgcagagttgcaggtagatagcaacccctctcccctgagatgccaactccgactcctgtcctactgtatgtactgatctgtacagcaagcaatattcaatcagcagtcaattcctaggatgtcgtaaggtactgtggaaacatttttccttcgaatactgttatactaatgaaaaaagggagtgtcgaaatgtttgttgtcaactgacgaaaatccagccagcaggcccgtcctacctgcagacagaatggataacaagcttatgaatccgaagtgcatatttatatcgcatatcatatattaatcaatcctgtctttctgcctgctcctatttgtaggtcacgacaatgatcctatctaagtacataagtcgctaacaccatttcctgcttgtggaaaggtttggtcttgcaggagatgagctcgccagacagtccatcacactgccggcttgattgcatcttcacaggacgtggacttgtgggcacatgctccacgggcaacggttcggcatcctcctggcgttcttgtggctggcagcagccgcgagaatctgtgtggagccctgggctgggctcgttgcaagatatgccagcctctcatcttcagactggaggaggaggggggggttccctctccaggctttttccatgatgttacaggcttacagcattcagagtgcatgttacactcacggccctatcagcacatgctgtgggcagccggtgatgataggatcagatgctcatatctcctgcggttttctgtctaccgcatttggattggatttggaccccccctgtactgtacttcctccttgctcccctgctgcttggcgctttgtccatgtgcctggttggaattgctactatacatttttggagggtaattgtttcaccggaacatgtagcgtggacgtgtggtaataacaattgaattgatgcctttactgtctgagtaataacaaagggaagcgatgagcagcacatggtaagcttccggtgccggttggaggcttcgatgtcgatgtctgcattgagtttatttgatgctgtgtgttctatagctagactaggctagagtttggatagagttcatgggacaatgttgtctgcatcttcatctcccctttagtttaggacttatctgagaggtacggttctttgcatgacagaacaaaactagcagcagcaaaaaaaaaaaaaaaaggaaacaacgacaa

SEQ ID NO: 204471 - DNA, 1715 bp, Zea Mays
cgttccaacttgtttgttcacgtatgtggaaaggcatatttgccatctgtgagcctatgggtatgtgagtttaatcaggattctttaccctttgtattataatgatacaccactctcttgcatgttcatgaaaaaaatatttgaggaaaaaattgatgacatgtaataaggtatctgtatttaatcactagctgcaattacgtttgctttttgttatcgtagtcaatgtatttatttatttgtcctttacagtattgttctcaattctgcataaaatgctacaacatgatacttttactgatctggacagttggaggacatatatgcaagcttgtttcttgtgaaatgtgatacacttttgaacagagctaatcatcgtcagggagaaaaacaaacaaaaacgacgaaattctgcagtgggatatgcttattctttgtacttatttgtgttatttgggctcctatgttgatttatagtagtggtaaccctacaaatattgccaatcccattgttgatgtaagtgttaagattgatataaaggcacttggtgggagattaaacttgtttaagactactgcttgtgaaaaaataccttggaagtacttgaaggcctatgatgatgttgatcctctagattaccttggggcatacaatgtggatgacattcagctgatttgctgccagcctgatgcatcaacaatgtggttgatacctcctccagtccaaaacagattcatccagtcccttgaggagagagagatgctttttggaaagatggaacttattttaaattgggattttctcagagctagaccaaaagggaaggaattagtgcgatatgaatcccctattgaacactgcccgagtgtagatgatgttaaacgagtgcttaatggaactgcaaacagcttcagtataattgatgcttacccaaggtactttcgagttactggatcaggtgaagtccggcgattagaagcagcgatagattcagtaagtggcgaattgctattaaataatggcactccttggtggtcattctatgatacaaacccatcagatttggcaggctgtcaagggctgaatggtcccatggctatagttgtttctgaggagacacctcagggcattattggcgaaacactcagtaaatttagcatatggagtttatatattacttttgttctagctgttgcgagatttattaggcttcagtgctcagacttgagaatgagaataccatatgagaaccttccgtcatgtgacaggctacttgacatctgtgaaggaatatatgcagcaagagctgaaggagagttagaagtggaagaagttctgtattggacattggtaaacatctatagatcaccacatatgctgcttgaatacacaaagcctgactagggcacccgttctgctaaggaagccattctgcaaaaaaattccatgtaatgtagtaatgtacaagtagaacacttctttcctttgaggtcacaacgaagctaacttaatcctctcccccccttgtgtcaggacaaaaaacgtgcaaataggctttgtagttgtagttcgtttttgctaacatgtatacggttgaccattatttttggagaagtatacatcaaagtttcattgtgaaagttatctcatgctactaaaatgtgttaagaaagttgcgaatgaagatgtaatccatgtcatcctaatcaaaatg

SEQ ID NO: 204472 - DNA, 2806 bp, Zea Mays
  misc_feature (1)..(2): n is a, c, g, or t
nnactccaatgagcatcatgcagaaagtgacatctatgatgttgttgaaagtcagagggaaacacaagatgggcagcttccaagaacacattcagttccagataccacatggactaaagcgaaatcaagcatgccaattggtgtgatttttcagtatatatggtatcagatgcgaagtaattatgattatgtttgctattgctgttttattctggttttcatgtggaattttagtttgttatccatggcctaccttggggcacttttcttatatgctctttgcgtgaactatggcccaagttacttgttttgggtcatcattctgatctacaccgagagctcgatcactgccaaagatggtgaatgggttccggtaacagaattcagctttcttagtgcaaggaacaacattgaagagaaacactgtgtagcttacagttggagagagaagctaaaaagtttgcccttgcctgtttttgatctcataaggatgattgttagaggcttatctagatactggatgtcattaacacatggagctgaatctcctccatattttgtgcaagttacaatggaggtaagccattggccagaagatggaatccagccagagaggatagagtctgccataaatagggtgcttgctattgctcatgaagaaagatgtcaggcaaacttgccttcctcttgccactgttgtagtaaagtccggattcaaagtattgaaaaaagcaaagaaaattgtaatatggctcttgctgtactagaagttgtttatgctgctcctgtagagtgccaatctaagggatggcacaaatctctcactccagcagctgatgtagaaagagagattcatgaatcacagaaagcaggattttttgaagaaataaattttccttacccgatcgtctcggtgattggtgggggtaaaagagagatcgatctttatgcatattattttggcgccgacttggcagttttcttccttgttgcaatgttctatcaatctatcctaaaaaataagagtgaattcttggaagtttaccagctggaggatcagttcccaaaagaatttgttttcatccttatggttctctttttcttgatagtggttgaccgcattatatatctttggtcctttgctaccggcaaagttgttttctatctttttaaccttgtgcttttcacgtattctgtcactgaatatgcttggggaacggagctagctcacagggatattggaggacttgtactacgtgcaatctaccttacaaaatcaatttccctagcactgcaagctttacagatcagatatggtattcctaacaaaagcaacctatataggcagttcttgactagcaaagttactcaagtgaattacttgggcttccgtctgtatcgtgctttaccattcttgtatgaattgcggtgtgtacttgattggtcttgcacaaccacatctttaacaatgtatgattggctgaagttggaggacatatatgcaagcttgtttcttgtgaaatgtgatacacttttgaacagagctaatcatcgtcagggagaaaaacaaacaaaaacgacgaaattctgcagtgggatatgcttattctttgtacttatttgtgttatttgggctcctatgttgatttatagtagtggtaaccctacaaatattgccaatcccattgttgatgtaagtgttaagattgatataaaggcacttggtgggagattaaacttgtttaagactactgcttgtgaaaaaataccttggaagtacttgaaggcctatgatgatgttgatcctctagattaccttggggcatacaatgtggatgacattcagctgatttgctgccagcctgatgcatcaacaatgtggttgatacctcctccagtccaaaacagattcatccagtcccttgaggagagagagatgctttttggaaagatggaacttattttaaattgggattttctcagagctagaccaaaagggaaggaattagtgcgatatgaatcccctattgaacactgcccgagtgtagatgatgttaaacgagtgcttaatggaactgcaaacagcttcagtataattgatgcttacccaaggtactttcgagttactggatcaggtgaagtccggcgattagaagcagcgatagattcagtaagtggcgaattgctattaaataatggcactccttggtggtcattctatgatacaaacccatcagatttggcaggctgtcaagggctgaatggtcccatggctatagttgtttctgaggagacacctcagggcattattggcgaaacactcagtaaatttagcatatggagtttatatattacttttgttctagctgttgcgagatttattaggcttcagtgctcagacttgagaatgagaataccatatgagaaccttccgtcatgtgacaggctacttgacatctgtgaaggaatatatgcagcaagagctgaaggagagttagaagtggaagaagttctgtattggacattggtaaacatctatagatcaccacatatgctgcttgaatacacaaagcctgactagggcacccgttctgctaaggaagccattctgcaaaaaaattccatgacaaaaaacgtgcaaataggctttgtagttgtagttcgtttttgctaacatgtatacggttgaccattatttttggagaagtatacatcaaagtttcattgtgaaagttatctcatgctactaaaatgtgttaagaaagttgcgaatgaagatgtaatccatgtcatcctaatcaaaatg

SEQ ID NO: 204473 - DNA, 3027 bp, Zea Mays
  misc_feature (1)..(2): n is a, c, g, or t
nnactccaatgagcatcatgcagaaagtgacatctatgatgttgttgaaagtcagagggaaacacaagatgggcagcttccaagaacacattcagttccagataccacatggactaaagcgaaatcaagcatgccaattggtgtgatttttcagtatatatggtatcagatgcgaagtaattatgattatgtttgctattgctgttttattctggttttcatgtggaattttagtttgttatccatggcctaccttggggcacttttcttatatgctctttgcgtgaactatggcccaagttacttgttttgggtcatcattctgatctacaccgaggtcaacattctgtcacagtatatatatcagattatcattcaacactgtggtttgaatatacatttacctcttcttcagagattaggtttccctgacaataaaataaaagcatcatttgtcgtcagcatattgcctctctttttagtctatatatccactctcttgcagagctcgatcactgccaaagatggtgaatgggttccggtaacagaattcagctttcttagtgcaaggaacaacattgaagagaaacactgtgtagcttacagttggagagagaagctaaaaagtttgcccttgcctgtttttgatctcataaggatgattgttagaggcttatctagatactggatgtcattaacacatggagctgaatctcctccatattttgtgcaagttacaatggaggtaagccattggccagaagatggaatccagccagagaggatagagtctgccataaatagggtgcttgctattgctcatgaagaaagatgtcaggcaaacttgccttcctcttgccactgttgtagtaaagtccggattcaaagtattgaaaaaagcaaagaaaattgtaatatggctcttgctgtactagaagttgtttatgctgctcctgtagagtgccaatctaagggatggcacaaatctctcactccagcagctgatgtagaaagagagattcatgaatcacagaaagcaggattttttgaagaaataaattttccttacccgatcgtctcggtgattggtgggggtaaaagagagatcgatctttatgcatattattttggcgccgacttggcagttttcttccttgttgcaatgttctatcaatctatcctaaaaaataagagtgaattcttggaagtttaccagctggaggatcagttcccaaaagaatttgttttcatccttatggttctctttttcttgatagtggttgaccgcattatatatctttggtcctttgctaccggcaaagttgttttctatctttttaaccttgtgcttttcacgtattctgtcactgaatatgcttggggaacggagctagctcacagggatattggaggacttgtactacgtgcaatctaccttacaaaatcaatttccctagcactgcaagctttacagatcagatatggtattcctaacaaaagcaacctatataggcagttcttgactagcaaagttactcaagtgaattacttgggcttccgtctgtatcgtgctttaccattcttgtatgaattgcggtgtgtacttgattggtcttgcacaaccacatctttaacaatgtatgattggctgaagttggaggacatatatgcaagcttgtttcttgtgaaatgtgatacacttttgaacagagctaatcatcgtcagggagaaaaacaaacaaaaacgacgaaattctgcagtgggatatgcttattctttgtacttatttgtgttatttgggctcctatgttgatttatagtagtggtaaccctacaaatattgccaatcccattgttgatgtaagtgttaagattgatataaaggcacttggtgggagattaaacttgtttaagactactgcttgtgaaaaaataccttggaagtacttgaaggcctatgatgatgttgatcctctagattaccttggggcatacaatgtggatgacattcagctgatttgctgccagcctgatgcatcaacaatgtggttgatacctcctccagtccaaaacagattcatccagtcccttgaggagagagagatgctttttggaaagatggaacttattttaaattgggattttctcagagctagaccaaaagggaaggaattagtgcgatatgaatcccctattgaacactgcccgagtgtagatgatgttaaacgagtgcttaatggaactgcaaacagcttcagtataattgatgcttacccaaggtactttcgagttactggatcaggtgaagtccggcgattagaagcagcgatagattcagtaagtggcgaattgctattaaataatggcactccttggtggtcattctatgatacaaacccatcagatttggcaggctgtcaagggctgaatggtcccatggctatagttgtttctgaggagacacctcagggcattattggcgaaacactcagtaaatttagcatatggagtttatatattacttttgttctagctgttgcgagatttattaggcttcagtgctcagacttgagaatgagaataccatatgagaaccttccgtcatgtgacagcaagagctgaaggagagttagaagtggaagaagttctgtattggacattggtaaacatctatagatcaccacatatgctgcttgaatacacaaagcctgactagggcacccgttctgctaaggaagccattctgcaaaaaaattccatgtaatgtagtaatgtacaagtagaacacttctttcctttgaggtcacaacgaagctaacttaatcctctcccccccttgtgtcaggacaaaaaacgtgcaaataggctttgtagttgtagttcgtttttgctaacatgtatacggttgaccattatttttggagaagtatacatcaaagtttcattgtgaaagttatctcatgctactaaaatgtgttaagaaagttgcgaatgaagatgtaatccatgtcatcctaatcaaaatg

SEQ ID NO: 204474 - DNA, 2057 bp, Zea Mays
agcctcacacggctctgccaggccaaataaaactgacacatgggggagcgcacggatccaccaatcagacgccgtgcgcttttgcgccaaagcacatctcgcaaagcaaagcgttccgccttggattttagccgtttcgcccgtcccgtggggcggttggcctgttgctaccttgctataaggggaagccagccagggcggtgtgcaggacggggtgcacgggcgcggccctcatccagcagggtggtactggactgtacactgtactgtggagtgagtgcatcagcggtctcgagccacactgtgagccactgattatataccaggccactgattgttacgctgacacgcatgcatcccgcatccctgctccaagagagatgggtctcgccggcggcattgtccggagggtcttctccaagagcccttgctcgtccgccggcagccgtggccacagtactgacgcttgcatgagcacggccgattcgcaggagaaggggtctgctgaacacaggaggagatggggctcgctacggctgtacctctgcggcgaggagatgaacgcggccgcagaggaggaggaggacggggacggcgacacggtgtccgtcaagagcttcgagacctgctgcgtgatgccggaggaggcgcacgtcgtcgtcccggtgcatcatcgtctgatgagcgccgcacacgatggcaacgaccagagcagggtccctggtggtgccgatgaagagggagcggcgacgctcatccagtccgcgttcagagggttcatgtcgaggaggcagctgcaggaggcgagggcgaggacgaggacgaggacgcgcggccgagagccagaaccggacggcgccaaggaccaagagcccagcagccccacctgggggccgtccgtcgcgacgtcggtgctggtccagcagcggtccagcagccagaggtcgtcgtcgcgcccgccgccagcgttccgagtcaaggaggagtgggacgacagcacggtgagctccaacgtgtccaggatgaggatccagaacaggatcgaggccaccacgcggcgcgagcgagcgctcgcctacgcgttctcgcagcagcttcggagctgcggcggcggcaccagcaagaagcggtcgtcggcgcgcgcggaggggcagggggagttcaacgtggggtggagctggctggagcggtggatggcgacgcggcaggcggagcccgcggacgactgcgcgagccgcaacgcggacacgggctccgccacggggcggcgggtggtggtcgtcaggaggcggagcgacctcgccgtcgaggagaaggagagctgcgcctccaacgacgtctcggtcgtcagcttcgacgcctcctccggcctcgcctgccataggcccacgggcaacaagagccggctcaagggcggccggagcttgccgcgccggaagcaggtggcggcgtcggcgtcggcgtcggaccaccgcttccaggaaagatcacacaaggtgagcaagaagggacaccagcgagtggagcaggagccgcacaaggaccgattcgacgccgtcgccgccctggacgacgacgcttgccagcctcccacggattactgagacgacctgctctgtacatagatttggaaggatttgcagcgctagctgacgatttgtttcggcttgcactagtctgaaagactgcacggttactgtctgctgagtgactgtacgtgtcgtgtcggtcatgtaaaagttcctcgctacacgtacgtcgtatcaaacgtcactcactgtaaaacgtcacggccacatacacgatgacgagttccggttccctagacacggcaaggagaagcaatcagtgacagtatttgtgatatcatatccatccaggcatccagctccgtttgttttgcgttagcacctaaagtacgactgcactgtaccgccacaacagtttacttatggtgtgtttcgttttaagtcaatgtatgatgagacaggaggacaccgttctctcgattttttgtatcacgtcgctatcaaaagttacttcgttgttcacctcgt

SEQ ID NO: 204475 - DNA, 2574 bp, Zea Mays
gacgattcctctgttaaaagttcaacgagttagccgcttcggcaggcaagtaggacgaggagcagcagctcagatttcggatcctggcactggcaactggcatgggctcgtttgggatggacatggactggaaccagaaggcctccgtgctgctgtgggactgggagaacctgccgcccgcagccgcaaacgggagcgagagccacaggacgaccgctgccgcgcctcagttcgcgggccttgaggccacagggcatgaaccggcgccttcttccgtatcctcgtcaatccattctctgcccagtgccaaggggaacaagaacaagaacaacatggagctcatcagtttcgcacctgccaaagcgcccgacaaggacactggttcggtgctcagcagcggagagccggtggtgctaggcctgaagcttggcaagagaacgtatttcgaagatggttgtggactagggcagagcggcaagagttcggcggcgttaggcactgccagtgcagcgacccctccgggtcctgcgaagaaggcgaaggcggcggcggcggctccaaccgcgcagcagcagaaatcgtactgccaggttgaaggctgcaggaccgatctgtcctctgctaaagactatcatcgcaagcacagagtctgcgagccccattccaaggcgcccaaggtggtcgtcgctggcctggagcggcgcttctgccagcagtgcagccggttccatggactggccgagttcgaccagaagaagaagagctgccgcaggcgactcaacgaccacaacgcgcgcaggcggaagccccagcccgaagcgctccctttcggctcatcgaggctgtcggcgatgttctatgacacgaggcgccaggcgagcctcctgtttggtgaaggtccctacggtcagatgagaagctgtgcgagttcttggtgggatagcccaggagcaggaggaggaggcttcaaattcgcggagacgagaggagctccttggttgaagccggcgagagctgctgctgatgggctgctgcctttgtcaggtcagcagcagcagcaggtgtggaatgactcgattccgcatgttgcccatcaggaggatttcgatgggttcacggtcacggcgttcaaaggaatcagtccaaagacccttgatcatcaaggtaataaaaatgcgccattttccgacgaacatgatgacattcagagatgatatcgaaaaaaagatgcatcttttcaggcgcaggcgttgaagcctgtgcggccgtctccagcccggacggcgccccggaccttcagcgtgctctctctcttctgtcaaacagtccggccggtggcggcggcaccaacaccaaccacccgccgccgccgccggcggctgagctgcaccaccaccgcgctgccccgagcagctgcctcgccgccggctccgtctccgtgctgcaggaggcctcgtcgccggggctgtggcaggacggcggcggcagcgcggccctgggccaccacgcgcacgcgcggctccaggctctcgacgccgccatggcgacggcgcaggagctcctccagctccccaggccgccgccatcgtacggcggctcctcgtcccactacgacctgatgcgctgatgcttccttccttgtggattgtggtggagaactggagatggagcgggagcgccgccgtgcccccggttggcgcgtggaaatcagtcagacgtggcttctgtggcgtcgtctctgcaacgcgggagcgggattttgcttgtgttctgaacgaacagaaaataataaaaaagaagaaggccttgtcgccatgggaactcgtggaggtcgccggtagagctgcgcgcgcttgaataatccacggttttgtgacgctagcagttgaagttctattgatttgtgcaatgtaataacttggttgcttcggaagagttctattgtcatctttaatggcaccattagttcaatctaacatttattctgcttccaatatacgtagtacattattagaactaggagcgcaaccctaaaaaaaagcatagctgcattattccaaccaccgcacatagctagctactcacaaaaaagctgattgattcatgagacagctaggcggccggcaagacagccctcggcgtgccaagatagaacaccaagaacaccaagacaacaaagcgcctttcagtcaagttgacggggccaggccgggtcactaccgcttgccagctcccaggactcggcaccggtactctcccagagcccagatcgggaaggtgttcctgtactgggagtaactgatcatgcagttcttgttgaacactcctatgatctcctgcgttgggcggcggacacaatagttagttagttacgaatggaaaggcaacaccacaacatgccaggcgaccaacgattaaccctggctaataagacaaaactgttatgcctaaaataataagatgtttagatatcaagaccaatttacccttttgctccttgagcaaagtttttaaagtgagactgtgtttgatgtaagcaagattaagggtagtatctctgtggaccggctgttg

SEQ ID NO: 204476 - DNA, 1627 bp, Zea Mays
tcagatttgctctgttgataaactaagaaagcatatctgcttcaacaaacttcctggcaaaataatgttagaatgagtggcttagtggaacagatttggggccccctctctagcattcgtgctcttgcaaagatgttatcctttcacacaaagagaagtgagatcccctatgatattattgaagatatgctcacccaaggtgatcacatgaaagatgctctgcaacaaattcaagatgctgtatatctgactaaggcaaacatagttagaagcaatgaggagactttaaagacaattcagagatcaccacatccttcaagaactttatcagattataaatcagtacctgggaatgattcacagaagttggatccagttttagccctgagttctgatgggtatgacatggtgatgcctatgccacctctatggctggcacctcttcaacaccaatatgataggcagaccatgtgatctctgtgatgtgctgaaggatttagttgcaggagcattaccacttgcttataagcagcagcgcacattagatttaacagaaatttcacatccacttcatgttgctgttgaggaatctgctttaagaaaagccttgagtaatctgattgagggagcgctcctacgtacacagcatggtggagtagttcaaatatgtgcagtcgaagcacctgcaggaggcgctctcgtggtcatcgatgatgatgggcctgatatgcaatacatgactcagatgcgctccctggccccatttggatcagaccttgcagatggtatgctcgaagataacatgacgtggaacttcatcgcgggattaacggtcgcacgtgagctacttgaggaatatggatgcgtcctgcgtgtgatatcacctcgaaggactgatgcggttataggcaccggagggagtcgtgttgagatatggttgccatcttttcagacacaagcagccaagactagtcaagaagtgtagtttacatctgaggaagcgaggcatgcttcgttttcccgtacgttttgaaatctgtagatattggcttaccggaatgttactgtaccagtaacatctcatatgttgaatttgcaaaattacaggacgtgcgcaaatgattgtgatggtgatgttgcattgctgatgctccttttgctacttcatttctacttccattgtctcattgctgatgctccttttacaatataaatggtcgaatatgtgtgtgtgttttcttcatcctgcattcctgctgatccaaaccaactgacacctcaccattgcaaacccaccatcagaagctatcaacaaacaaaaacgccatcatctgaccattagcagccaaatccccattcagcaaaaccatgtcttggtcgtttcttggcgtcagacgctttgttcccttgtcagctgcgttcaccgtccgacgtggacgctctgctcggtgggtgatccaggagagaagggcacgaacacgtgaccgccaaacataggccgcatcagcgcgtcatcgaccttgcgccagtagtagtgcaccgtgtgagtcggcttgctgaggaggctggacggcctcacaatatgtgccatggttcgagcctgcatgcttgtcaggaaaggtgagag

SEQ ID NO: 204477 - DNA, 3160 bp, Zea Mays
attttcgttcgatttcctaaagcctatgtgatccgttcatggcgattatttctccctcctctccggcgttcgtccctatgcctctctctccattcgcaagttcgccaaagaaaatcctcttgagcttgaccttccagcgatcaagctcggtgagcacgaagacgtaaccgaggaagccgtgtctactactttgagaagggcaatcagccgtctttctactctccaggcacatgatggacactggcctggggattatggtggccctatgttccttatgccaggcttgatcataacattgtatgtgactggagcactaaacactgtcttgtcatcagaacaccagaaggagatccgtcggtatctttataatcatcagaatgaagatggtggctggggcttgcacattgagggtccaagcaccatgtttggctcagcactgacctacgttactttgagattgcttggagagggaccagatagtggagatggagcaatggagaaaggccgaaactggatcttagaccatggcggagcaacatatataacatcctgggggaagttttggctctcggtacttggtgtatttgaatggtctggtaacaacccggtaccaccagaagtatggctactgccatatctcctgccatttcacccagggaggatgtggtgtcattgtcgaatggtgtatttgccaatgtgctacatctatgggaagaggtttgttggtcgaatcacaccactcgtgttggaattaagaaaggaacttttcaaagacccttacagcaagattgattgggacaaggcccgcaatctatgtgctaaggaagatctgtactatccacatccatttgttcaagatgtcttatgggccactctccataaatttgttgaaccagttatgatgagttggcctggcagtaaattgagggagaaagctctggagacagccatgcaacatgttcactatgaggatgagaacactcggtacatttgcattggtcctgtaaacaaggtattaaatatgcttgcttgctggattgaagatccaaactcagaggccttcaaactccacatcccacgagtctatgactacttgtggcttgctgaagatggcatgaagatgcagggttataatggtagccaactttgggatacagctttcatagttcaagccattgtggctaccaaccttaccgaagagtttggtcccacccttaaactagcacacaactatatcaagaaatcacaggttcttgacgactgccctggtgatctgaatgactggtaccgccacacatctaaaggcgcatggccattctccaccgcggatcatggttggcctatatctgattgcactgctgaaggactaaaggcttcattattgttatcaaagatttctcctgaaattgttggtggaccgatagaagctaatagattttatgatgctgtcagttgtctgatgtcttatatgaatgataatggtggttttgcgacttatgaactcacaagatcctatgcctggctggagctgatcaatcctgctgagacctttggggatattgtgattgattacccgtatgttgaatgtacatcagcagcaatccaggccctgacatcattcagaaaactataccctgggcaccgcaggaaagaggtggacagctgtatcagcaaagctgctaatttcattgagagcattcagaaaagtgacggttcatggtatggctcttgggctgtttgtttcacgtacggcacttggtttggtgtgaagggactaattgctgctggtagaacatttgagagcagtcctgcaatcagaaaggcatgcggctttctgttatcaaaagagcttccttccggtggctggggagaaagctatttatcgtctcaagaccaggtttacaccaatctcaaaggcaaccgagctcatgcagcgaacactggttgggccatgctggcgctgattgatgcaggacaggcccagagagatcccgcgcctctacaccgagcagcaaaggttttgatcaacttgcagtcagaggacggagaatttccccagcaagagatcataggagtgttcaacaagaactgcatgatcagttactcccagtacaggaacaccttcccgatctgggctctgggagagtaccggtgccgagtcctgggagctggcaagcggtagtgacccggcctggccccgtcaacttgactgaaaggcgctttgttgtcttggtgttcttggtgttctatcttggcacgccgagggctgtcttgccggccgcctagctgtctcatgaatcaatcagcttttttgtgagtagctagctatgtgcggtggttggaataatgcagctatgcttttttttagggttgcgctcctagttctaataatgtactacgtatattggaagcagaataaatgttagattgaactaatggtgccattaaagatgacaatagaactcttccgaagcaaccaagttattacattgcacaaatcaatagaacttcaactgctagcgtcacaaaaccgtggattattcaagcgcgcgcagctctaccggcgacctccacgagttcccatggcgacaaggccttcttcttttttattattttctgttcgttcagaacacaagcaaaatcccgctcccgcgttgcagagacgacgccacagaagccacgtctgactgatttccacgcgccaaccgggggcacggcggcgctcccgctccatctccagttctccaccacaatccacaaggaaggaagcatcagcgcatcaggtcgtagtgggacgaggagccgccgtacgatggcggcggcctggggagctggaggagctcctgcgccgtcgccatggcggcgtcgagagcctggagccgcgcgtgcgcgtggtggcccagggccgcgctgccgccgccgtcctgccacagccccggcgacgaggcctcctgcagcacggagacggagccggcggcgaggcagctgctcggggcagcgcggtggtggtgcagctcagccgccggcggcggcggcgggtggttggtgttggtgccgccgccaccggccggactgtttgacagaagagagagagcacgctgaaggtccggggcgccgtccgggctggagacggccgcacaggcttcaacgcctgcgcctg

SEQ ID NO: 204478 - DNA, 3004 bp, Zea Mays
gtccctatgcctctctctccattcgcaagttcgccaaagaaaatcctcttgagcttgaccttccagcgatcaagctcggtgagcacgaagacgtaaccgaggaagccgtgtctactactttgagaagggcaatcagccgtctttctactctccaggcacatgatggacactggcctggggattatggtggccctatgttccttatgccaggcttgatcataacattgtatgtgactggagcactaaacactgtcttgtcatcagaacaccagaaggagatccgtcggtatctttataatcatcagaatgaagatggtggctggggcttgcacattgagggtccaagcaccatgtttggctcagcactgacctacgttactttgagattgcttggagagggaccagatagtggagatggagcaatggagaaaggccgaaactggatcttagaccatggcggagcaacatatataacatcctgggggaagttttggctctcgggaggatgtggtgtcattgtcgaatggtgtatttgccaatgtgctacatctatgggaagaggtttgttggtcgaatcacaccactcgtgttggaattaagaaaggaacttttcaaagacccttacagcaagattgattgggacaaggcccgcaatctatgtgctaaggaagatctgtactatccacatccatttgttcaagatgtcttatgggccactctccataaatttgttgaaccagttatgatgagttggcctggcagtaaattgagggagaaagctctggagacagccatgcaacatgttcactatgaggatgagaacactcggtacatttgcattggtcctgtaaacaaggtattaaatatgcttgcttgctggattgaagatccaaactcagaggccttcaaactccacatcccacgagtctatgactacttgtggcttgctgaagatggcatgaagatgcagggttataatggtagccaactttgggatacagctttcatagttcaagccattgtggctaccaaccttaccgaagagtttggtcccacccttaaactagcacacaactatatcaagaaatcacaggttcttgacgactgccctggtgatctgaatgactggtaccgccacacatctaaaggcgcatggccattctccaccgcggatcatggttggcctatatctgattgcactgctgaaggactaaaggcttcattattgttatcaaagatttctcctgaaattgttggtggaccgatagaagctaatagattttatgatgctgtcagttgtctgatgtcttatatgaatgataatggtggttttgcgacttatgaactcacaagatcctatgcctggctggagctgatcaatcctgctgagacctttggggatattgtgattgattacccgtatgttgaatgtacatcagcagcaatccaggccctgacatcattcagaaaactataccctgggcaccgcaggaaagaggtggacagctgtatcagcaaagctgctaatttcattgagagcattcagaaaagtgacggttcatggtatggctcttgggctgtttgtttcacgtacggcacttggtttggtgtgaagggactaattgctgctggtagaacatttgagagcagtcctgcaatcagaaaggcatgcggctttctgttatcaaaagagcttccttccggtggctggggagaaagctatttatcgtctcaagaccaggtttacaccaatctcaaaggcaaccgagctcatgcagcgaacactggttgggccatgctggcgctgattgatgcaggacaggcccagagagatcccgcgcctctacaccgagcagcaaaggttttgatcaacttgcagtcagaggacggagaatttccccagcaagagatcataggagtgttcaacaagaactgcatgatcagttactcccagtacaggaacaccttcccgatctgggctctgggagagtaccggtgccgagtcctgggagctggcaagcggtagtgacccggcctggccccgtcaacttgactgaaaggcgctttgttgtcttggtgttcttggtgttctatcttggcacgccgagggctgtcttgccggccgcctagctgtctcatgaatcaatcagcttttttgtgagtagctagctatgtgcggtggttggaataatgcagctatgcttttttttagggttgcgctcctagttctaataatgtactacgtatattggaagcagaataaatgttagattgaactaatggtgccattaaagatgacaatagaactcttccgaagcaaccaagttattacattgcacaaatcaatagaacttcaactgctagcgtcacaaaaccgtggattattcaagcgcgcgcagctctaccggcgacctccacgagttcccatggcgacaaggccttcttcttttttattattttctgttcgttcagaacacaagcaaaatcccgctcccgcgttgcagagacgacgccacagaagccacgtctgactgatttccacgcgccaaccgggggcacggcggcgctcccgctccatctccagttctccaccacaatccacaaggaaggaagcatcagcgcatcaggtcgtagtgggacgaggagccgccgtacgatggcggcggcctggggagctggaggagctcctgcgccgtcgccatggcggcgtcgagagcctggagccgcgcgtgcgcgtggtggcccagggccgcgctgccgccgccgtcctgccacagccccggcgacgaggcctcctgcagcacggagacggagccggcggcgaggcagctgctcggggcagcgcggtggtggtgcagctcagccgccggcggcggcggcgggtggttggtgttggtgccgccgccaccggccggactgtttgacagaagagagagagcacgctgaaggtccggggcgccgtccgggctggagacggccgcacaggcttcaacgcctgcgcctg

SEQ ID NO: 204479 - DNA, 3096 bp, Zea Mays
atcgcttctcatgctctgcatcttctgtcggacgagttcgccaaagaaaatcctcttgagcttgaccttccagcgatcaagctcggtgagcacgaagacgtaaccgaggaagccgtgtctactactttgagaagggcaatcagccgtctttctactctccaggcacatgatggacactggcctggggattatggtggccctatgttccttatgccaggcttgatcataacattgtatgtgactggagcactaaacactgtcttgtcatcagaacaccagaaggagatccgtcggtatctttataatcatcagaatgaagatggtggctggggcttgcacattgagggtccaagcaccatgtttggctcagcactgacctacgttactttgagattgcttggagagggaccagatagtggagatggagcaatggagaaaggccgaaactggatcttagaccatggcggagcaacatatataacatcctgggggaagttttggctctcggtacttggtgtatttgaatggtctggtaacaacccggtaccaccagaagtatggctactgccatatctcctgccatttcacccagggaggatgtggtgtcattgtcgaatggtgtatttgccaatgtgctacatctatgggaagaggtttgttggtcgaatcacaccactcgtgttggaattaagaaaggaacttttcaaagacccttacagcaagattgattgggacaaggcccgcaatctatgtgctaaggaagatctgtactatccacatccatttgttcaagatgtcttatgggccactctccataaatttgttgaaccagttatgatgagttggcctggcagtaaattgagggagaaagctctggagacagccatgcaacatgttcactatgaggatgagaacactcggtacatttgcattggtcctgtaaacaaggtattaaatatgcttgcttgctggattgaagatccaaactcagaggccttcaaactccacatcccacgagtctatgactacttgtggcttgctgaagatggcatgaagatgcagggttataatggtagccaactttgggatacagctttcatagttcaagccattgtggctaccaaccttaccgaagagtttggtcccacccttaaactagcacacaactatatcaagaaatcacaggttcttgacgactgccctggtgatctgaatgactggtaccgccacacatctaaaggcgcatggccattctccaccgcggatcatggttggcctatatctgattgcactgctgaaggactaaaggcttcattattgttatcaaagatttctcctgaaattgttggtggaccgatagaagctaatagattttatgatgctgtcagttgtctgatgtcttatatgaatgataatggtggttttgcgacttatgaactcacaagatcctatgcctggctggagctgatcaatcctgctgagacctttggggatattgtgattgattacccgtatgttgaatgtacatcagcagcaatccaggccctgacatcattcagaaaactataccctgggcaccgcaggaaagaggtggacagctgtatcagcaaagctgctaatttcattgagagcattcagaaaagtgacggttcatggtatggctcttgggctgtttgtttcacgtacggcacttggtttggtgtgaagggactaattgctgctggtagaacatttgagagcagtcctgcaatcagaaaggcatgcggctttctgttatcaaaagagcttccttccggtggctggggagaaagctatttatcgtctcaagaccaggtttacaccaatctcaaaggcaaccgagctcatgcagcgaacactggttgggccatgctggcgctgattgatgcaggacaggcccagagagatcccgcgcctctacaccgagcagcaaaggttttgatcaacttgcagtcagaggacggagaatttccccagcaagagatcataggagtgttcaacaagaactgcatgatcagttactcccagtacaggaacaccttcccgatctgggctctgggagagtaccggtgccgagtcctgggagctggcaagcggtagtgacccggcctggccccgtcaacttgactgaaaggcgctttgttgtcttggtgttcttggtgttctatcttggcacgccgagggctgtcttgccggccgcctagctgtctcatgaatcaatcagcttttttgtgagtagctagctatgtgcggtggttggaataatgcagctatgcttttttttagggttgcgctcctagttctaataatgtactacgtatattggaagcagaataaatgttagattgaactaatggtgccattaaagatgacaatagaactcttccgaagcaaccaagttattacattgcacaaatcaatagaacttcaactgctagcgtcacaaaaccgtggattattcaagcgcgcgcagctctaccggcgacctccacgagttcccatggcgacaaggccttcttcttttttattattttctgttcgttcagaacacaagcaaaatcccgctcccgcgttgcagagacgacgccacagaagccacgtctgactgatttccacgcgccaaccgggggcacggcggcgctcccgctccatctccagttctccaccacaatccacaaggaaggaagcatcagcgcatcaggtcgtagtgggacgaggagccgccgtacgatggcggcggcctggggagctggaggagctcctgcgccgtcgccatggcggcgtcgagagcctggagccgcgcgtgcgcgtggtggcccagggccgcgctgccgccgccgtcctgccacagccccggcgacgaggcctcctgcagcacggagacggagccggcggcgaggcagctgctcggggcagcgcggtggtggtgcagctcagccgccggcggcggcggcgggtggttggtgttggtgccgccgccaccggccggactgtttgacagaagagagagagcacgctgaaggtccggggcgccgtccgggctggagacggccgcacaggcttcaacgcctgcgcctg

SEQ ID NO: 204480 - DNA, 3372 bp, Zea Mays
ctaccacgaggcgctggcagagggagactggccgactggcccagtggccctatagaagaaacgggatcccgccaggcctcccgggaccgggagccacgccacgcaggcacgcacgcggaggggagcgccggccgtccgcggcggattgggatctccctcgcccgcccgtccactcgagactcgacggcacccgccgcatttgagctgagctgaggaggcgtgggggacggcgcggggatgtggcgcctgcggatcgcggaggggggcggggacccctggctccgcacgaagaacgcccacgtcggccgccagttcgccaaagaaaatcctcttgagcttgaccttccagcgatcaagctcggtgagcacgaagacgtaaccgaggaagccgtgtctactactttgagaagggcaatcagccgtctttctactctccaggcacatgatggacactggcctggggattatggtggccctatgttccttatgccaggcttgatcataacattgtatgtgactggagcactaaacactgtcttgtcatcagaacaccagaaggagatccgtcggtatctttataatcatcagaatgaagatggtggctggggcttgcacattgagggtccaagcaccatgtttggctcagcactgacctacgttactttgagattgcttggagagggaccagatagtggagatggagcaatggagaaaggccgaaactggatcttagaccatggcggagcaacatatataacatcctgggggaagttttggctctcggtacttggtgtatttgaatggtctggtaacaacccggtaccaccagaagtatggctactgccatatctcctgccatttcacccagggaggatgtggtgtcattgtcgaatggtgtatttgccaatgtgctacatctatgggaagaggtttgttggtcgaatcacaccactcgtgttggaattaagaaaggaacttttcaaagacccttacagcaagattgattgggacaaggcccgcaatctatgtgctaaggaagatctgtactatccacatccatttgttcaagatgtcttatgggccactctccataaatttgttgaaccagttatgatgagttggcctggcagtaaattgagggagaaagctctggagacagccatgcaacatgttcactatgaggatgagaacactcggtacatttgcattggtcctgtaaacaaggtattaaatatgcttgcttgctggattgaagatccaaactcagaggccttcaaactccacatcccacgagtctatgactacttgtggcttgctgaagatggcatgaagatgcagggttataatggtagccaactttgggatacagctttcatagttcaagccattgtggctaccaaccttaccgaagagtttggtcccacccttaaactagcacacaactatatcaagaaatcacaggttcttgacgactgccctggtgatctgaatgactggtaccgccacacatctaaaggcgcatggccattctccaccgcggatcatggttggcctatatctgattgcactgctgaaggactaaaggcttcattattgttatcaaagatttctcctgaaattgttggtggaccgatagaagctaatagattttatgatgctgtcagttgtctgatgtcttatatgaatgataatggtggttttgcgacttatgaactcacaagatcctatgcctggctggagctgatcaatcctgctgagacctttggggatattgtgattgattacccgtatgttgaatgtacatcagcagcaatccaggccctgacatcattcagaaaactataccctgggcaccgcaggaaagaggtggacagctgtatcagcaaagctgctaatttcattgagagcattcagaaaagtgacggttcatggtatggctcttgggctgtttgtttcacgtacggcacttggtttggtgtgaagggactaattgctgctggtagaacatttgagagcagtcctgcaatcagaaaggcatgcggctttctgttatcaaaagagcttccttccggtggctggggagaaagctatttatcgtctcaagaccaggtttacaccaatctcaaaggcaaccgagctcatgcagcgaacactggttgggccatgctggcgctgattgatgcaggacaggcccagagagatcccgcgcctctacaccgagcagcaaaggttttgatcaacttgcagtcagaggacggagaatttccccagcaagagatcataggagtgttcaacaagaactgcatgatcagttactcccagtacaggaacaccttcccgatctgggctctgggagagtaccggtgccgagtcctgggagctggcaagcggtagtgacccggcctggccccgtcaacttgactgaaaggcgctttgttgtcttggtgttcttggtgttctatcttggcacgccgagggctgtcttgccggccgcctagctgtctcatgaatcaatcagcttttttgtgagtagctagctatgtgcggtggttggaataatgcagctatgcttttttttagggttgcgctcctagttctaataatgtactacgtatattggaagcagaataaatgttagattgaactaatggtgccattaaagatgacaatagaactcttccgaagcaaccaagttattacattgcacaaatcaatagaacttcaactgctagcgtcacaaaaccgtggattattcaagcgcgcgcagctctaccggcgacctccacgagttcccatggcgacaaggccttcttcttttttattattttctgttcgttcagaacacaagcaaaatcccgctcccgcgttgcagagacgacgccacagaagccacgtctgactgatttccacgcgccaaccgggggcacggcggcgctcccgctccatctccagttctccaccacaatccacaaggaaggaagcatcagcgcatcaggtcgtagtgggacgaggagccgccgtacgatggcggcggcctggggagctggaggagctcctgcgccgtcgccatggcggcgtcgagagcctggagccgcgcgtgcgcgtggtggcccagggccgcgctgccgccgccgtcctgccacagccccggcgacgaggcctcctgcagcacggagacggagccggcggcgaggcagctgctcggggcagcgcggtggtggtgcagctcagccgccggcggcggcggcgggtggttggtgttggtgccgccgccaccggccggactgtttgacagaagagagagagcacgctgaaggtccggggcgccgtccgggctggagacggccgcacaggcttcaacgcctgcgcctg

SEQ ID NO: 204481 - DNA, 3181 bp, Zea Mays
ctctttcactgttagtgccacttttttccagaaaagaaaacatttcactgtccatggaaatacagtacctacggccacagaatggttgaaagtggacacagattttctcaactccattcaattcgccaaagaaaatcctcttgagcttgaccttccagcgatcaagctcggtgagcacgaagacgtaaccgaggaagccgtgtctactactttgagaagggcaatcagccgtctttctactctccaggcacatgatggacactggcctggggattatggtggccctatgttccttatgccaggcttgatcataacattgtatgtgactggagcactaaacactgtcttgtcatcagaacaccagaaggagatccgtcggtatctttataatcatcagaatgaagatggtggctggggcttgcacattgagggtccaagcaccatgtttggctcagcactgacctacgttactttgagattgcttggagagggaccagatagtggagatggagcaatggagaaaggccgaaactggatcttagaccatggcggagcaacatatataacatcctgggggaagttttggctctcggtacttggtgtatttgaatggtctggtaacaacccggtaccaccagaagtatggctactgccatatctcctgccatttcacccagggaggatgtggtgtcattgtcgaatggtgtatttgccaatgtgctacatctatgggaagaggtttgttggtcgaatcacaccactcgtgttggaattaagaaaggaacttttcaaagacccttacagcaagattgattgggacaaggcccgcaatctatgtgctaaggaagatctgtactatccacatccatttgttcaagatgtcttatgggccactctccataaatttgttgaaccagttatgatgagttggcctggcagtaaattgagggagaaagctctggagacagccatgcaacatgttcactatgaggatgagaacactcggtacatttgcattggtcctgtaaacaaggtattaaatatgcttgcttgctggattgaagatccaaactcagaggccttcaaactccacatcccacgagtctatgactacttgtggcttgctgaagatggcatgaagatgcagggttataatggtagccaactttgggatacagctttcatagttcaagccattgtggctaccaaccttaccgaagagtttggtcccacccttaaactagcacacaactatatcaagaaatcacaggttcttgacgactgccctggtgatctgaatgactggtaccgccacacatctaaaggcgcatggccattctccaccgcggatcatggttggcctatatctgattgcactgctgaaggactaaaggcttcattattgttatcaaagatttctcctgaaattgttggtggaccgatagaagctaatagattttatgatgctgtcagttgtctgatgtcttatatgaatgataatggtggttttgcgacttatgaactcacaagatcctatgcctggctggagctgatcaatcctgctgagacctttggggatattgtgattgattacccgtatgttgaatgtacatcagcagcaatccaggccctgacatcattcagaaaactataccctgggcaccgcaggaaagaggtggacagctgtatcagcaaagctgctaatttcattgagagcattcagaaaagtgacggttcatggtatggctcttgggctgtttgtttcacgtacggcacttggtttggtgtgaagggactaattgctgctggtagaacatttgagagcagtcctgcaatcagaaaggcatgcggctttctgttatcaaaagagcttccttccggtggctggggagaaagctatttatcgtctcaagaccaggtttacaccaatctcaaaggcaaccgagctcatgcagcgaacactggttgggccatgctggcgctgattgatgcaggacaggcccagagagatcccgcgcctctacaccgagcagcaaaggttttgatcaacttgcagtcagaggacggagaatttccccagcaagagatcataggagtgttcaacaagaactgcatgatcagttactcccagtacaggaacaccttcccgatctgggctctgggagagtaccggtgccgagtcctgggagctggcaagcggtagtgacccggcctggccccgtcaacttgactgaaaggcgctttgttgtcttggtgttcttggtgttctatcttggcacgccgagggctgtcttgccggccgcctagctgtctcatgaatcaatcagcttttttgtgagtagctagctatgtgcggtggttggaataatgcagctatgcttttttttagggttgcgctcctagttctaataatgtactacgtatattggaagcagaataaatgttagattgaactaatggtgccattaaagatgacaatagaactcttccgaagcaaccaagttattacattgcacaaatcaatagaacttcaactgctagcgtcacaaaaccgtggattattcaagcgcgcgcagctctaccggcgacctccacgagttcccatggcgacaaggccttcttcttttttattattttctgttcgttcagaacacaagcaaaatcccgctcccgcgttgcagagacgacgccacagaagccacgtctgactgatttccacgcgccaaccgggggcacggcggcgctcccgctccatctccagttctccaccacaatccacaaggaaggaagcatcagcgcatcaggtcgtagtgggacgaggagccgccgtacgatggcggcggcctggggagctggaggagctcctgcgccgtcgccatggcggcgtcgagagcctggagccgcgcgtgcgcgtggtggcccagggccgcgctgccgccgccgtcctgccacagccccggcgacgaggcctcctgcagcacggagacggagccggcggcgaggcagctgctcggggcagcgcggtggtggtgcagctcagccgccggcggcggcggcgggtggttggtgttggtgccgccgccaccggccggactgtttgacagaagagagagagcacgctgaaggtccggggcgccgtccgggctggagacggccgcacaggcttcaacgcctgcgcctg

SEQ ID NO: 204482 - DNA, 1414 bp, Zea Mays
gtcccttttgttcacttggcttatctgggttcaaactggcttgatgtgccctgcatcgtccttcagcatgttacccctcggctaaaggagcttatgacattcaagtctcaagaggaggctaaagttgaggcttaccctaacctcaatgataattctaatgcaaatgattcctctcagaaaagaaaaccaagtaacaataaacagcagccccctgctaagaaaagaaaagagaatccaccaaaaagtaccatgccatcagatgaccaaggatcaaatgtgcaaagtgggcacagtggtgctgttactgatgtagaagtcggaggggccagcagggagaaggtcatggcatctatcgagatgaaagtggacagtgacagccgaacagggaaatcaagttcaaatgaaccaaagccatccttttataatgacaactgtacagtttttgtgtcaaatattgacttgaaagcaaatgaggatgatctcaggcgattcttctctgatattggtggtgccacagcaataagattgctgagggacagattcaccaaaaaatcaagggggttggcctatgtggactttttagacaacaagcatcttgaggcagctattaagaaaaacaagcagaagctgcttggaaagaaagtgagtatcgcgcgatcagatccaagcaagggtaagaagagccgtgaagcaggtcaaacaagccaggataatttacctccgagtggtggtgatgatgcaaaagcaacaggatccagtggaccagacaatgaagtacccaagggtgatgcaaaaaccatagggaagaataccctttttgcaccacgagctctggttaaacctcttggatggacaaacaaggatgagaagaaaccagatgttgcaggggagttgaaatcaaatgaggagttccgaaatctgttactaaagaagtgatatcagttggcaggtgtggatctccatgccccaatccagtgccaagatttgtggtgccttcatctctatgttagaatgatggacctgtagtagcagcttgaactggggatctacaaccgttatgtcttaccccgatgtagacatgaatatttctttctgctagggagattatacaagccatgccgaattgcagggtggtgaaggtgaaaacgggacgttgcgttcgagcagaaaaaccctgcccatgtgaaaagaaaacactgaccttataatatgtgctcactttctttttgaaccatacgtacgcattgctggtgaaacatcactgcatctcaaaaatgtgtaatctactctacgcggcttgattggagatgcagatttatttgattgtacgttgggaccttttggaccttgcaactgcatatgttgagaggctaacatcttttcagagcggcagcccaacgacactttgcataca

SEQ ID NO: 204483 - DNA, 2182 bp, Zea Mays
gccctttgtgttgtgaataacacaataagtacatcaaatttgaggaggcttctggtgaccctgctcgtgttcaagttctgtatgagcgagctgtttcagagcttcctgtttcaagtgatatatggatgggatatacaagttacctggatagaaccctgaaggtgccttctgtagtcagaagtgtttattacagagccacaagaaattgtacatgggttggtgagttatgggtccattatttgttgtctttggagcgtattcgtgcttctgaagaagagctgcagcatgtatttgaacgggcaatacaatgtaccttttcaaccatacaagagtatttcaatatttatcttactcgagttcatggtttaagacggaggatttctgatggcttggattttcaactgattaggcagacattaacggtacattattcctatcacctcatcatctacaaatttcttagttcttactataattaataatgagatataatatcaggatgctgcagaatttctctcatctcaactgagtaccaaggagttactgcgcttatatgcttattgggccaaactagagcttagtctcggcaaagatctttctgcagctcgtggagtttgggaaaacgcgatcaagaaaagtgggtctgtttttgaagtttgggagcagtacattttaatggagataaaaatggaccatgtacatgaggcgagatccctttataagcgttgttatagcaaaagatttgctgggtctggatcagaggagatatgctactcatggataagatttgaagaggagaatggcaccttggatgattatgatcttgctgtaaagaaggttacccctcggctaaaggagcttatgacattcaagtctcaagaggaggctaaagttgaggcttaccctaacctcaatgataattctaatgcaaatgattcctctcagaaaagaaaaccaagtaacaataaacagcagccccctgctaagaaaagaaaagagaatccaccaaaaagtaccatgccatcagatgaccaaggatcaaatgtgcaaagtgggcacagtggtgctgttactgatgtagaagtcggaggggccagcagggagaaggtcatggcatctatcgagatgaaagtggacagtgacagccgaacagggaaatcaagttcaaatgaaccaaagccatccttttataatgacaactgtacagtttttgtgtcaaatattgacttgaaagcaaatgaggatgatctcaggcgattcttctctgatattggtggtgccacagcaataagattgctgagggacagattcaccaaaaaatcaagggggttggcctatgtggactttttagacaacaagcatcttgaggcagctattaagaaaaacaagcagaagctgcttggaaagaaagtgagtatcgcgcgatcagatccaagcaagggtaagaagagccgtgaagcaggtcaaacaagccaggataatttacctccgagtggtggtgatgatgcaaaagcaacaggatccagtggaccagacaatgaagtacccaagggtgatgcaaaaaccatagggaagaataccctttttgcaccacgagctctggttaaacctcttggatggacaaacaaggatgagaagaaaccagatgttgcaggggagttgaaatcaaatgaggagttccgaaatctgttactaaagaagtgatatcagttggcaggtgtggatctccatgccccaatccagtgccaagatttgtggtgccttcatctctatgttagaatgatggacctgtagtagcagcttgaactggggatctacaaccgttatgtcttaccccgatgtagacatgaatatttctttctgctagggagattatacaagccatgccgaattgcagggtggtgaaggtgaaaacgggacgttgcgttcgagcagaaaaaccctgcccatgtgaaaagaaaacactgaccttataatatgtgctcactttctttttgaaccatacgtacgcattgctggtgaaacatcactgcatctcaaaaatgtgtaatctactctacgcggcttgattggagatgcagatttatttgattgtacgttgggaccttttggaccttgcaactgcatatgttgagaggctaacatcttttcagagcggcagcccaacgacactttgcataca

SEQ ID NO: 204484 - DNA, 2989 bp, Zea Mays
atggcgacggaagaggagctgccggaggcggcggccgcgcctgcgccagcaggtggaggaggcggggacgacgcggagatgcccgatgccgccgtgccgtcgggctcccactcggactcgtccgactccgactccgacgacgaagccgccactgccgccgccgagctccgcatccaggccctagagaaaaccctacaggagcagccactggactacgagacccacgtgcagtatatccagtgcctgaggaaggcaggcaacattgagaagcttcgcgtggcaagggaagagatgaacaagtactttcctctaaccccgaagatgtggcaggagtgggccaaggacgagatctcattgagctcgagtgaggaatcttttggtgacattgaaaagatctacgggcatggggtgcaggaatacctgtccatcaagttatggcgggattaccttgattatgttgaagagcatgatcattcagtgtctcagtgtacaccttctggcctctccaagatgagaaatttgtttgaaagtgctattaccgcaggtgggctccatgttactgagggcagcaagctatgggcagcctatagagaatatgagatggccattttgatcaccatcgctgatgccaatgatgaggagagggaaaagcaagttcagcgtatacgcatgctattccaccgccagttatctgttcctttggctgatatggaatctacacttgctgagtataagagctgggaggctgagcaggggaatgcaaatgatcctggtgcagattttgatggtgtcccctcaaatgttgtatctgcttacaaaaaggccaatgatatgtacaatgaaaggaagcaatacgaggatcaactaagcaatgcaggcacatttgaaggtgacaaactgcagcaatttatgaagtacatcaaatttgaggaggcttctggtgaccctgctcgtgttcaagttctgtatgagcgagctgtttcagagcttcctgtttcaagtgatatatggatgggatatacaagttacctggatagaaccctgaaggtgccttctgtagtcagaagtgtttattacagagccacaagaaattgtacatgggttggtgagttatgggtccattatttgttgtctttggagcgtattcgtgcttctgaagaagagctgcagcatgtatttgaacgggcaatacaatgtaccttttcaaccatacaagagtatttcaatatttatcttactcgagttcatggtttaagacggaggatttctgatggcttggattttcaactgattaggcagacattaacggatgctgcagaatttctctcatctcaactgagtaccaaggagttactgcgcttatatgcttattgggccaaactagagcttagtctcggcaaagatctttctgcagctcgtggagtttgggaaaacgcgatcaagaaaagtgggtctgtttttgaagtttgggagcagtacattttaatggagataaaaatggaccatgtacatgaggcgagatccctttataagcgttgttatagcaaaagatttgctgggtctggatcagagatatgctactcatggataagatttgaagaggagaatggcaccttggatgattatgatcttgctgtaaagaaggttacccctcggctaaaggagcttatgacattcaagtctcaagaggaggctaaagttgaggcttaccctaacctcaatgataattctaatgcaaatgattcctctcagaaaagaaaaccaagtaacaataaacagcagccccctgctaagaaaagaaaagagaatccaccaaaaagtaccatgccatcagatgaccaaggatcaaatgtgcaaagtgggcacagtggtgctgttactgatgtagaagtcggaggggccagcagggagaaggtcatggcatctatcgagatgaaagtggacagtgacagccgaacagggaaatcaagttcaaatgaaccaaagccatccttttataatgacaactgtacagtttttgtgtcaaatattgacttgaaagcaaatgaggatgatctcaggcgattcttctctgatattggtggtgccacagcaataagattgctgagggacagattcaccaaaaaatcaagggggttggcctatgtggactttttagacaacaagcatcttgaggcagctattaagaaaaacaagcagaagctgcttggaaagaaagtgagtatcgcgcgatcagatccaagcaagggtaagaagagccgtgaagcaggtcaaacaagccaggataatttacctccgagtggtggtgatgatgcaaaagcaacaggatccagtggaccagacaatgaagtacccaagggtgatgcaaaaaccatagggaagaataccctttttgcaccacgagctctggttaaacctcttggatggacaaacaaggatgagaagaaaccagatgttgcaggggagttgaaatcaaatgaggagttccgaaatctgttactaaagaagtgatatcagttggcaggtgtggatctccatgccccaatccagtgccaagatttgtggtgccttcatctctatgttagaatgatggacctgtagtagcagcttgaactggggatctacaaccgttatgtcttaccccgatgtagacatgaatatttctttctgctagggagattatacaagccatgccgaattgcagggtggtgaaggtgaaaacgggacgttgcgttcgagcagaaaaaccctgcccatgtgaaaagaaaacactgaccttataatatgtgctcactttctttttgaaccatacgtacgcattgctggtgaaacatcactgcatctcaaaaatgtgtaatctactctacgcggcttgattggagatgcagatttatttgattgtacgttgggaccttttggaccttgcaactgcatatgttgagaggctaacatcttttcagagcggcagcccaacgacactttgcataca

SEQ ID NO: 204485 - DNA, 3046 bp, Zea Mays
gggaaaacgaatcgacctccacctgagattgcacagttgcgcaaattggcacacgggcacgcacgagagacatggcgacggaagaggagctgccggaggcggcggccgcgcctgcgccagcaggtggaggaggcggggacgacgcggagatgcccgatgccgccgtgccgtcgggctcccactcggactcgtccgactccgactccgacgacgaagccgccactgccgccgccgagctccgcatccaggccctagagaaaaccctacaggagcagccactggactacgagacccacgtgcagtatatccagtgcctgaggaaggcaggcaacattgagaagcttcgcgtggcaagggaagagatgaacaagtactttcctctaaccccgaagatgtggcaggagtgggccaaggacgagatctcattgagctcgagtgaggaatcttttggtgacattgaaaagatctacgggcatggggtgcaggaatacctgtccatcaagttatggcgggattaccttgattatgttgaagagcatgatcattcagtgtctcagtgtacaccttctggcctctccaagatgagaaatttgtttgaaagtgctattaccgcaggtgggctccatgttactgagggcagcaagctatgggcagcctatagagaatatgagatggccattttgatcaccatcgctgatgccaatgatgaggagagggaaaagcaagttcagcgtatacgcatgctattccaccgccagttatctgttcctttggctgatatggaatctacacttgctgagtataagagctgggaggctgagcaggggaatgcaaatgatcctggtgcagattttgatggtgtcccctcaaatgttgtatctgcttacaaaaaggccaatgatatgtacaatgaaaggaagcaatacgaggatcaactaagcaatgcaggcacatttgaaggtgacaaactgcagcaatttatgaagtacatcaaatttgaggaggcttctggtgaccctgctcgtgttcaagttctgtatgagcgagctgtttcagagcttcctgtttcaagtgatatatggatgggatatacaagttacctggatagaaccctgaaggtgccttctgtagtcagaagtgtttattacagagccacaagaaattgtacatgggttggtgagttatgggtccattatttgttgtctttggagcgtattcgtgcttctgaagaagagctgcagcatgtatttgaacgggcaatacaatgtaccttttcaaccatacaagagtatttcaatatttatcttactcgagttcatggtttaagacggaggatttctgatggcttggattttcaactgattaggcagacattaacggatgctgcagaatttctctcatctcaactgagtaccaaggagttactgcgcttatatgcttattgggccaaactagagcttagtctcggcaaagatctttctgcagctcgtggagtttgggaaaacgcgatcaagaaaagtttgggagcagtacattttaatggagataaaaatggaccatgtacatgaggcgagatccctttataagcgttgttatagcaaaagatttgctgggtctggatcagaggagatatgctactcatggataagatttgaagaggagaatggcaccttggatgattatgatcttgctgtaaagaaggttacccctcggctaaaggagcttatgacattcaagtctcaagaggaggctaaagttgaggcttaccctaacctcaatgataattctaatgcaaatgattcctctcagaaaagaaaaccaagtaacaataaacagcagccccctgctaagaaaagaaaagagaatccaccaaaaagtaccatgccatcagatgaccaaggatcaaatgtgcaaagtgggcacagtggtgctgttactgatgtagaagtcggaggggccagcagggagaaggtcatggcatctatcgagatgaaagtggacagtgacagccgaacagggaaatcaagttcaaatgaaccaaagccatccttttataatgacaactgtacagtttttgtgtcaaatattgacttgaaagcaaatgaggatgatctcaggcgattcttctctgatattggtggtgccacagcaataagattgctgagggacagattcaccaaaaaatcaagggggttggcctatgtggactttttagacaacaagcatcttgaggcagctattaagaaaaacaagcagaagctgcttggaaagaaagtgagtatcgcgcgatcagatccaagcaagggtaagaagagccgtgaagcaggtcaaacaagccaggataatttacctccgagtggtggtgatgatgcaaaagcaacaggatccagtggaccagacaatgaagtacccaagggtgatgcaaaaaccatagggaagaataccctttttgcaccacgagctctggttaaacctcttggatggacaaacaaggatgagaagaaaccagatgttgcaggggagttgaaatcaaatgaggagttccgaaatctgttactaaagaagtgatatcagttggcaggtgtggatctccatgccccaatccagtgccaagatttgtggtgccttcatctctatgttagaatgatggacctgtagtagcagcttgaactggggatctacaaccgttatgtcttaccccgatgtagacatgaatatttctttctgctagggagattatacaagccatgccgaattgcagggtggtgaaggtgaaaacgggacgttgcgttcgagcagaaaaaccctgcccatgtgaaaagaaaacactgaccttataatatgtgctcactttctttttgaaccatacgtacgcattgctggtgaaacatcactgcatctcaaaaatgtgtaatctactctacgcggcttgattggagatgcagatttatttgattgtacgttgggaccttttggaccttgcaactgcatatgttgagaggctaacatcttttcagagcggcagcccaacgacactttgcataca

SEQ ID NO: 204486 - DNA, 3093 bp, Zea Mays
caaggttccttttgaaaagaaatcgaattcctgagacgcccttgtccgaaaattctagaaatggggaaaacgaatcgacctccacctgagattgcacagttgcgcaaattggcacacgggcacgcacgagagacatggcgacggaagaggagctgccggaggcggcggccgcgcctgcgccagcaggtggaggaggcggggacgacgcggagatgcccgatgccgccgtgccgtcgggctcccactcggactcgtccgactccgactccgacgacgaagccgccactgccgccgccgagctccgcatccaggccctagagaaaaccctacaggagcagccactggactacgagacccacgtgcagtatatccagtgcctgaggaaggcaggcaacattgagaagcttcgcgtggcaagggaagagatgaacaagtactttcctctaaccccgaagatgtggcaggagtgggccaaggacgagatctcattgagctcgagtgaggaatcttttggtgacattgaaaagatctacgggcatggggtgcaggaatacctgtccatcaagttatggcgggattaccttgattatgttgaagagcatgatcattcagtgtctcagtgtacaccttctggcctctccaagatgagaaatttgtttgaaagtgctattaccgcaggtgggctccatgttactgagggcagcaagctatgggcagcctatagagaatatgagatggccattttgatcaccatcgctgatgccaatgatgaggagagggaaaagcaagttcagcgtatacgcatgctattccaccgccagttatctgttcctttggctgatatggaatctacacttgctgagtataagagctgggaggctgagcaggggaatgcaaatgatcctggtgcagattttgatggtgtcccctcaaatgttgtatctgcttacaaaaaggccaatgatatgtacaatgaaaggaagcaatacgaggatcaactaagcaatgcaggcacatttgaagaagtacatcaaatttgaggaggcttctggtgaccctgctcgtgttcaagttctgtatgagcgagctgtttcagagcttcctgtttcaagtgatatatggatgggatatacaagttacctggatagaaccctgaaggtgccttctgtagtcagaagtgtttattacagagccacaagaaattgtacatgggttggtgagttatgggtccattatttgttgtctttggagcgtattcgtgcttctgaagaagagctgcagcatgtatttgaacgggcaatacaatgtaccttttcaaccatacaagagtatttcaatatttatcttactcgagttcatggtttaagacggaggatttctgatggcttggattttcaactgattaggcagacattaacgaatttctctcatctcaactgagtaccaaggagttactgcgcttatatgcttattgggccaaactagagcttagtctcggcaaagatctttctgcagctcgtggagtttgggaaaacgcgatcaagaaaagtgggtctgtttttgaagtttgggagcagtacattttaatggagataaaaatggaccatgtacatgaggcgagatccctttataagcgttgttatagcaaaagatttgctgggtctggatcagaggagatatgctactcatggataagatttgaagaggagaatggcaccttggatgattatgatcttgctgtaaagaaggttacccctcggctaaaggagcttatgacattcaagtctcaagaggaggctaaagttgaggcttaccctaacctcaatgataattctaatgcaaatgattcctctcagaaaagaaaaccaagtaacaataaacagcagccccctgctaagaaaagaaaagagaatccaccaaaaagtaccatgccatcagatgaccaaggatcaaatgtgcaaagtgggcacagtggtgctgttactgatgtagaagtcggaggggccagcagggagaaggtcatggcatctatcgagatgaaagtggacagtgacagccgaacagggaaatcaagttcaaatgaaccaaagccatccttttataatgacaactgtacagtttttgtgtcaaatattgacttgaaagcaaatgaggatgatctcaggcgattcttctctgatattggtggtgccacagcaataagattgctgagggacagattcaccaaaaaatcaagggggttggcctatgtggactttttagacaacaagcatcttgaggcagctattaagaaaaacaagcagaagctgcttggaaagaaagtgagtatcgcgcgatcagatccaagcaagggtaagaagagccgtgaagcaggtcaaacaagccaggataatttacctccgagtggtggtgatgatgcaaaagcaacaggatccagtggaccagacaatgaagtacccaagggtgatgcaaaaaccatagggaagaataccctttttgcaccacgagctctggttaaacctcttggatggacaaacaaggatgagaagaaaccagatgttgcaggggagttgaaatcaaatgaggagttccgaaatctgttactaaagaagtgatatcagttggcaggtgtggatctccatgccccaatccagtgccaagatttgtggtgccttcatctctatgttagaatgatggacctgtagtagcagcttgaactggggatctacaaccgttatgtcttaccccgatgtagacatgaatatttctttctgctagggagattatacaagccatgccgaattgcagggtggtgaaggtgaaaacgggacgttgcgttcgagcagaaaaaccctgcccatgtgaaaagaaaacactgaccttataatatgtgctcactttctttttgaaccatacgtacgcattgctggtgaaacatcactgcatctcaaaaatgtgtaatctactctacgcggcttgattggagatgcagatttatttgattgtacgttgggaccttttggaccttgcaactgcatatgttgagaggctaacatcttttcagagcggcagcccaacgacactttgcataca

SEQ ID NO: 204487 - DNA, 3116 bp, Zea Mays
caaggttccttttgaaaagaaatcgaattcctgagacgcccttgtccgaaaattctagaaatggggaaaacgaatcgacctccacctgagattgcacagttgcgcaaattggcacacgggcacgcacgagagacatggcgacggaagaggagctgccggaggcggcggccgcgcctgcgccagcaggtggaggaggcggggacgacgcggagatgcccgatgccgccgtgccgtcgggctcccactcggactcgtccgactccgactccgacgacgaagccgccactgccgccgccgagctccgcatccaggccctagagaaaaccctacaggagcagccactggactacgagacccacgtgcagtatatccagtgcctgaggaaggcaggcaacattgagaagcttcgcgtggcaagggaagagatgaacaagtactttcctctaaccccgaagatgtggcaggagtgggccaaggacgagatctcattgagctcgagtgaggaatcttttggtgacattgaaaagatctacgggcatggggtgcaggaatacctgtccatcaagttatggcgggattaccttgattatgttgaagagcatgatcattcagtgtctcagtgtacaccttctggcctctccaagatgagaaatttgtttgaaagtgctattaccgcaggtgggctccatgttactgagggcagcaagctatgggcagcctatagagaatatgagatggccattttgatcaccatcgctgatgccaatgatgaggagagggaaaagcaagttcagcgtatacgcatgctattccaccgccagttatctgttcctttggctgatatggaatctacacttgctgagtataagagctgggaggctgagcaggggaatgcaaatgatcctggtgcagattttgatggtgtcccctcaaatgttgtatctgcttacaaaaaggccaatgatatgtacaatgaaaggaagcaatacgaggatcaactaagcaatgcaggcacatttgaaggtgacaaactgcagcaatttatgaagtacatcaaatttgaggaggcttctggtgaccctgctcgtgttcaagttctgtatgagcgagctgtttcagagcttcctgtttcaagtgatatatggatgggatatacaagttacctggatagaaccctgaaggtgccttctgtagtcagaagtgtttattacagagccacaagaaattgtacatgggttggtgagttatgggtccattatttgttgtctttggagcgtattcgtgcttctgaagaagagctgcagcatgtatttgaacgggcaatacaatgtaccttttcaaccatacaagagtatttcaatatttatcttactcgagttcatggtttaagacggaggatttctgatggcttggattttcaactgattaggcagacattaacgaatttctctcatctcaactgagtaccaaggagttactgcgcttatatgcttattgggccaaactagagcttagtctcggcaaagatctttctgcagctcgtggagtttgggaaaacgcgatcaagaaaagtgggtctgtttttgaagtttgggagcagtacattttaatggagataaaaatggaccatgtacatgaggcgagatccctttataagcgttgttatagcaaaagatttgctgggtctggatcagaggagatatgctactcatggataagatttgaagaggagaatggcaccttggatgattatgatcttgctgtaaagaaggttacccctcggctaaaggagcttatgacattcaagtctcaagaggaggctaaagttgaggcttaccctaacctcaatgataattctaatgcaaatgattcctctcagaaaagaaaaccaagtaacaataaacagcagccccctgctaagaaaagaaaagagaatccaccaaaaagtaccatgccatcagatgaccaaggatcaaatgtgcaaagtgggcacagtggtgctgttactgatgtagaagtcggaggggccagcagggagaaggtcatggcatctatcgagatgaaagtggacagtgacagccgaacagggaaatcaagttcaaatgaaccaaagccatccttttataatgacaactgtacagtttttgtgtcaaatattgacttgaaagcaaatgaggatgatctcaggcgattcttctctgatattggtggtgccacagcaataagattgctgagggacagattcaccaaaaaatcaagggggttggcctatgtggactttttagacaacaagcatcttgaggcagctattaagaaaaacaagcagaagctgcttggaaagaaagtgagtatcgcgcgatcagatccaagcaagggtaagaagagccgtgaagcaggtcaaacaagccaggataatttacctccgagtggtggtgatgatgcaaaagcaacaggatccagtggaccagacaatgaagtacccaagggtgatgcaaaaaccatagggaagaataccctttttgcaccacgagctctggttaaacctcttggatggacaaacaaggatgagaagaaaccagatgttgcaggggagttgaaatcaaatgaggagttccgaaatctgttactaaagaagtgatatcagttggcaggtgtggatctccatgccccaatccagtgccaagatttgtggtgccttcatctctatgttagaatgatggacctgtagtagcagcttgaactggggatctacaaccgttatgtcttaccccgatgtagacatgaatatttctttctgctagggagattatacaagccatgccgaattgcagggtggtgaaggtgaaaacgggacgttgcgttcgagcagaaaaaccctgcccatgtgaaaagaaaacactgaccttataatatgtgctcactttctttttgaaccatacgtacgcattgctggtgaaacatcactgcatctcaaaaatgtgtaatctactctacgcggcttgattggagatgcagatttatttgattgtacgttgggaccttttggaccttgcaactgcatatgttgagaggctaacatcttttcagagcggcagcccaacgacactttgcataca

SEQ ID NO: 204488 - DNA, 2299 bp, Zea Mays
actgccccatggcccattgcttacgcataactgcggcggggacacgcgacgctaccgacttcgccgccgcctccttccttccgcccgtcgagtcgaccgaccgattgttcgcgggtcgcggcctccctcctagtcagatccactcaatcccaagaggccaagtccaaaccctacccaccacccttctcaaccagcgatgatggcagcggagccctcgccgtcggttccctccaccgccgctgacgccctggaaaccctcgccctcgactcatcctcgtcgtccgccgccgctaccgcctccacttccaccgaccccctcctccggccacctacctccccgaccgccgccgcgagcgacgacccattcgtcatcgacgacttcgacgaggacgacttctccaccgccccggcgcccaacgtcgcccgccagccgcgcgctgcgcgtggtgatgcggcgtccccagtgttcgccaaaatcaccgtatcggatcccaagaagcacgcggagcccagcggcgggggtgccgccggtgtgatcccggggtccggtagctacttctcttacctcatcaccacccgtcttgcgggcggcggcggggaggtccgcgtgcggcggcgcttccgcgacgtggtgaccctcgcggaccgccttgccgcagcccaccgtggcctcttcgtcccggcccgacccgacaagagcgtcctcgaggggcaggtcatgcagcgccacgacttcgtgagccagcggtgcgctgcgctccagcgctacctccgccgccttgccgtgcaccccatcgtcggccacagccctgacctccgcacgttcctcacggagcctggtgccgtccctgcctttcagggtgagcccccgcggtactggactaccacgctgaatgctgctgctccgctggtgccaacgaaagctaggagggacttgtttgggatgtttaagggtctcaagcagacggtggtgaatggactggttgcaacaaagcctccacctgtggagcaggagacagacacagagttcctggcgcacaaggccaggtttgatgacttacagcagcagcttaccataacatcacagcaggcggaagcgcttgttaaagcccaagatgatcttagagaaactacaggtcacttgggaatgacattgattaagctggcaaaatttgaaagagagcaggcaacatgtaattccctaagaagacgtgctggtgaaatccataattttgcaaattctgttttaaagatgagcaggtcacagataaaattaaactctgaaatggtgaaacacctgggcagtatccatgaatacttggagatgatgatatcagttcatcatgcattcacagatcgctctaatgctttatattacgtgcaaagtctgtcagcagatttgttttccttgcacaccagggcagggggacttgaatcttcatcagcaagagatatggggcatgagtggtcaacatatcagaaggtagaggggttgaaagaagcaataagatctgcggaagcagccaaaagtgatgccgttagagaatatgaaagcattaaggaaaacaacatgattgaaataaaaagatttgacaaggaaagacgtcatgatttcattgagatgctgaaaggttttgtggtaactcaggtgtcttattcagaccattttgctaatatgtggacaaagtttgattatctttgtaggagggtattgttcaacaatctgctcaaggagagggagagagggcggagaaagcataggattcgaggttgtcacgctcgacggtagaactggacccctttcctcacgcaaggtttctaggtgagcgacaacatgaaccccagtgacttggtgaagctgattgagattctggacccttcaaacaaacctggaaggatcaccataattacaaggatgggggaagagaacatgagagtgaagttgcctcatctcatccgtgttgttcgcaatgctggattgattgtcacatggattactgatcctatgcatggaaacaccatcaaggccccttgtggcctgaagactcgtccattcgactcaattctggctgaagtgcgcgcattcttcgacgtgcatgatcaagaaggaagtcacccaggaggcatccaccttgaaatgactgggcagaacgtgaccgagtgcattggtggatcaaggactgtgaccttcgatgacctgagcgaccgctaccacacccactgtgacccaaggctgaacgcctcccagtccctggagctcgcctttgaagcgtcccggtcctctaggactcaaatgtga

SEQ ID NO: 204489 - DNA, 1638 bp, Zea Mays
tcagggaaagactgaattactttatggtgtgatggagaaaacacttagcttgcttcagatgggctttaccgaggaagagaccagagagcaactgttcaggagctggctgactcaattttggcaaggcgaatagccaatagcattgagcagaaagagataaaagttgaatctgacttcctagacgaggcagaaactgattattcttcataccagccctcatactctgatgtaagctattatgacgatgacaacaacaatacacgggttaaaagggctaagcatatatttatagatgacataggggcctccagtagtcaccttggcgatccatggtctatggggcagcgtgcagggacaaatgatatgtctgttaaggtagaactggaggcaatgacaccaggtcgccgtgcaaatgtacaaggtgaccttgctaaacccccatttttcctatatggaaatgtggttgaggttccaaaagacacatggcatcaactcaaacaattcttatataatgtggagcctgagtttgtgaacagtcagtccttctccgctctaactcgaagggaaggttacattcacaaccttccagtggagaaaagaagtgtcgtggttccaaagtctccaatgactattgaagaagcacttccattcactcgacagtggtggccatcatgggatacaagaaaacatatcagtgttattactacagaggctgcagggattgagcagacatgtgaaagattggggggcatggttagagagtcaagaggagtgctttcacaagcaagacaaatgcagattatacaccagtgcagggtttcaaaccttatttgggtcggtcgggacaggttaggccctttggagcctcgtcaagtggaaaagatactaggttacccttataaccacacaaatttgtttgaattaaaccaacctgatcgacttgctgccatgaaatatgcattccagactgatacattgtcatatcttttatcagtcctgaaaggtaagtatcaagatggaataagagtgttatccatctacagtggcattggaggtgcagaagtagcacttcatcgtctaggcatccctttgaaatgtgtgatatctgttgaggaatctgaggtgaatagaaaaattctaagaaggtggtggttgaaaactgaacaaactggagtactaaggcaacatgcaggaatttggaagctcaaaacacatgtgattgaagacttggtgaaagagtttggtggttttgatctgattatcggtgggaattatacttcttgcaaaggtggtactacagtaaatacgacaatgggcatggattcgaaccgcttctatgagtataaccgtgttgtcaaaagggtaaggactgcagttggactcagttgaagagtccatctttaatgaagatcgcacgtcttcataaaactagcctgtaggaggatatagaatcatctgatccgtaaatgtaggatgctacaagtaaactttacaagtcttgggacttgattattgcaagcaattgacttatcctttattttggtttgtgtttgttggtcacttctaatgtttgataatcattctgcgttactcctttcaaagttgtgggttaaaatctttcattgctgcctgtttgct

SEQ ID NO: 204490 - DNA, 1992 bp, Zea Mays
catcggtacatgatagagttgagactgcggggagggggtgttagactccttgttagacatctgtacatgatacctgatgacccatattgtaatgggcttggctcatctaacttctctatataataatactcccaaccctggattagggttagggtttcccacattctaactacgcaaactgacatatttgttatttttctgctgtttctccttcagttggctgacatcaccattcccccaattgactactctcgaaacatttccagttactatagctgatcaatgaatgttacgtgcttcccttgattttcggtactcagggacaaatgactgggaaagactgaattactttatggtgtgatggagaaaacacttagcttgcttcagatgggctttaccgaggaagaggtatcatcagctattgacaattttgaccagagagcaactgttcaggagctggctgactcaattttggcaaggcgaatagccaatagcattgagcagaaagagataaaagttgaatctgacttcctagacgaggcagaaactgattattcttcataccagccctcatactctgatgtaagctattatgacgatgacaacaacaatacacgggttaaaagggctaagcatatatttatagatgacataggggcctccagtagtcaccttggcgatccatggtctatggggcagcgtgcagggacaaatgatatgtctgttaaggtagaactggaggcaatgacaccaggtcgccgtgcaaatgtacaaggtgaccttgctaaacccccatttttcctatatggaaatgtggttgaggttccaaaagacacatggcatcaactcaaacaattcttatataatgtggagcctgagtttgtgaacagtcagtccttctccgctctaactcgaagggaaggttacattcacaaccttccagtggagaaaagaagtgtcgtggttccaaagtctccaatgactattgaagaagcacttccattcactcgacagtggtggccatcatgggatacaagaaaacatatcagtgttattactacagaggctgcagggattgagcagacatgtgaaagattggggggcatggttagagagtcaagaggagtgctttcacaagcaagacaaatgcagattatacaccagtgcagggtttcaaaccttatttgggtcggtcgggacaggttaggccctttggagcctcgtcaagtggaaaagatactaggttacccttataaccacacaaatttgtttgaattaaaccaacctgatcgacttgctgccatgaaatatgcattccagactgatacattgtcatatcttttatcagtcctgaaaggtaagtatcaagatggaataagagtgttatccatctacagtggcattggaggtgcagaagtagcacttcatcgtctaggcatccctttgaaatgtgtgatatctgttgaggaatctgaggtgaatagaaaaattctaagaaggtggtggttgaaaactgaacaaactggagtactaaggcaacatgcaggaatttggaagctcaaaacacatgtgattgaagacttggtgaaagagtttggtggttttgatctgattatcggtgggaattatacttcttgcaaaggtggtactacagtaaatacgacaatgggcatggattcgaaccgcttctatgagtataaccgtgttgtcaaaagggtaaggactgcagttggactcagttgaagagtccatctttaatgaagatcgcacgtcttcataaaactagcctgtaggaggatatagaatcatctgatccgtaaatgtaggatgctacaagtaaactttacaagtcttgggacttgattattgcaagcaattgacttatcctttattttggtttgtgtttgttggtcacttctaatgtttgataatcattctgcgttactcctttcaaagttgtgggttaaaatctttcattgctgcctgtttgct

SEQ ID NO: 204491 - DNA, 2565 bp, Zea Mays
tccgactccgactccgactccgagggcggtgcgagtgaccttgcccttgtttggattggacgacgactgggtccgcgagctgccagcgcggtctcccaccactatccctctctcccctctccgtttgtctccatcctttctacctcggctgctgcgttgcgtgtggcgctgtgcttgggcagacgtgggcaccatgcctgggtgacttggtgtagcactgtagctgtggcatggagctgaggaagacgacgacgggggagagaagaatgctccccgggtgctaacttggccgccgctgctcaggggacgagtcgagggggagaagaggaaagtccagtttcttcagcttcttggttggatgcagagctttcgaagtcagagttgctgttggagaacattggatcaactgctgggagcatactgatcctcaccacgatgaagtttaatagctcatctgatcctattgctgccgagaaggctggagaagtcctcgagaacctggagaaatgccccaagaatatcaagtacatggctgaaagtggctacttggatcctctgcaaaggcacctagttgaaggaccagaagatgtgcagatggagatggtgagctacctcggcgagctggtccagaagcaggagatgaccatcaatatagcagggagtgcatcagagatcctcatcaaaatggtgtgcagtggtaatacggcaattcgaaaggcgaccctcgatgtcctggttcagatctcgtcccaccaccccaacgccaagacgcttgtggatgctggtgccgtccctgtcatggtagaggagctcttcatacgaaagattgatgatgagcccatgggctctaagacagaggctgccgcggtgctcgccaacatcgtcgagtctggcttggatccagaggccatcaccgtgaacaaggaaggccacgtcatcacgtccaagtactcggtatacaacttcgctcacatgctcaagtgctccatgcctgacaccctcaacctaagcattgtgcgcgtgctgctcgcgctgaccgctctccccaagcctctcgccacggtggtctcggtcatgaaggagcaagacagtggacagacggtgattgagctgatgggctcgctgacagagtcgcttgtcatcgccgcaatgaggctgcttattgcgttgtccccgcagatggggcacaccattgccgagaagctgtgcaaggccccggggcagccagggaggcttgtcaagagcattggcctgcacgggcggatcatggagcggcacgccatgtcagctactctcctggcgaagctgccgtaccagcacatcgctctgaacctggcgctgatcaaccagggcgcgatggttaccgtgctagccaagatagaggagatgcagcgcggcgagacgcgggcaagccgccatgcgaaggcgtatatggagggcctcatgggtgtgctggtccggctaacgacgacgctgtatgacccggacgtgctcttggcggccatggatcacaacctcacgtcggtgctcacagatctcgtgcggtccgcaggcagcgacgaggtccagcggctcgccgcgattggtctcgagaacctcagcagccagtcgcccaacctttcccagcccccgaccgaggagcggcgcccgaagaagaagaacatcctccggcgcctgcgcgaggcgcacgcggggcgggtgcacgacaaccggaggccgccggcgcacagccgggtttgcccggtgcaccgtggggtgtgttccccgtccaccacgttctgcctggtggaggctggcgcggtggagggcctcttgtgcgtcctggagagcagcgagaacgggcgcgtggtggaggccgcgctcggtgcgctgtgcacgctcatggacgacgcggtggacgtgacgagcggcgtggccgtgctcgcggagcacgacgcggcgcggcacgtgcttcgcgcgctgcggcagcaccgtgacgacgggcggagagggggcggcggcgctgccgcaggcgagacggtcactcggaggtgtttctgggcggtggagaggttcctggctcacggcagcgagcggtgcgtgagggaggtcaccagcgatcgggcgctgccgagcctgctggtgggcgccttccacaagggcgacgccgccaccaagcaggtggccgagagcgtgctccggtgcctgcaccgcatgccggattactccgcgacctacgaatccgtcgaactgtaaccaacacatgacgcgcacgactgcgcatgtcttgcctctcttttatcaagcttcgtctcttggttatgtttgtaaaattggtttttgtgtgtaacatgggttgatgtattgtttggtgtagctaaaggaaaatagaaaaggaaaaactgaagatgcagttatgtatgcaagtataaccaaagtttatagcaagggaagatactagtcttttgattcttcttactatttttttgtgtgtgtgttcagtagttcttttttagggaccgtgttcaattcagtaggttttgacaagagtgcctcctaaaatcagtctccagataatttgttttg

SEQ ID NO: 204492 - DNA, 3778 bp, Zea Mays
tccgactccgactccgactccgagggcggtgcgagtgaccttgcccttgtttggattggacgacgactgggtccgcgagctgccagcgcggtctcccaccactatccctctctcccctctccgtttgtctccatcctttctacctcggctgctgcgttgcgtgtggcgctgtgcttgggcagacgtgggcaccatgcctgggtgacttggtgtagcactgtagctgtggcatggagctgaggaagacgacgacgggggagagaagaatgctccccgggtgctaacttggccgccgctgctcaggggacgagtcgagggggagaagaggaaagtccagtttcttcagcttcttggttggatgcagcgaagtgaggcgcaggccaggaaggcatcactcgccgagtctgttctagcagccatctccgagctgatgccttcagcggcagccgccgtcgatgctgagcacgagagcttcatggatgtcggcagccacctccaccatggagccctgcccacagtgtcagtggaggcgcagaaggtgcagggttccccagccaacgcgctgcacgtgatggagtatctggctgccaatgttgacctcgccaaggacctcgtcacaaggtgcagcgccatcgcgcagcagctcatggacgacgacctcctgggcataaccgaggacttggacaaggtcatcaagaacataagcaatgagctcaacaagatgccagcagcgacgttcgagagcagcaggtttgcggaaccagcggtcagtggacaccttcaggttgtcaggaaccagcatgatctgttcgagcagcaatcctttgatggctactcggagggagatatgccaatggtcgtggcaatcgagaggccacccaagagaagaacgctgcacaacagtgacatgccgaggctggtggacttcctgcagggaatgtaccaggagtcacatgagatcggtggtcagtcatttggttcactccctgaagtcgcggaatatgtggagccattgtatgattctttcttctgccctctcacaaacaaggttatggttgatccagtgacaacggagagtggcatcacttatgacaggaaagctatagaggattactttgacaagtttacagatggctctgaacctgtgatatgtcctgttacaaagatggccatgcagagcaagacactgaggagtaatcttccgttgaagagcacaattgcagagtggattacaaggaatgaagcgacacgggtcaggatcgcacgcaccgcgctctctatggcgaccacagaggctatggtgcttgaggccatacatgagctgaaggtgctggctaggctgaggagaaagaacagggatcagatgcacaagattggcatcaccaagttcctagcacggcttctggaccacaaggatgcacttattcgctgtgactccctcgacctcctctgcttgttggttgaggatgatacaggaaaggaaatcatagcgaaaaccagagccgtctcaaggacaataaagctgctatccagcagtagtactgatgagaggcatgcatctatatctttcttgctagagctttcgaagtcagagttgctgttggagaacattggatcaactgctgggagcatactgatcctcaccacgatgaagtttaatagctcatctgatcctattgctgccgagaaggctggagaagtcctcgagaacctggagaaatgccccaagaatatcaagtacatggctgaaagtggctacttggatcctctgcaaaggcacctagttgaaggaccagaagatgtgcagatggagatggtgagctacctcggcgagctggtccagaagcaggagatgaccatcaatatagcagggagtgcatcagagatcctcatcaaaatggtgtgcagtggtaatacggcaattcgaaaggcgaccctcgatgtcctggttcagatctcgtcccaccaccccaacgccaagacgcttgtggatgctggtgccgtccctgtcatggtagaggagctcttcatacgaaagattgatgatgagcccatgggctctaagacagaggctgccgcggtgctcgccaacatcgtcgagtctggcttggatccagaggccatcaccgtgaacaaggaaggccacgtcatcacgtccaagtactcggtatacaacttcgctcacatgctcaagtgctccatgcctgacaccctcaacctaagcattgtgcgcgtgctgctcgcgctgaccgctctccccaagcctctcgccacggtggtctcggtcatgaaggagcaagacagtggacagacggtgattgagctgatgggctcgctgacagagtcgcttgtcatcgccgcaatgaggctgcttattgcgttgtccccgcagatggggcacaccattgccgagaagctgtgcaaggccccggggcagccagggaggcttgtcaagagcattggcctgcacgggcggatcatggagcggcacgccatgtcagctactctcctggcgaagctgccgtaccagcacatcgctctgaacctggcgctgatcaaccagggcgcgatggttaccgtgctagccaagatagaggagatgcagcgcggcgagacgcgggcaagccgccatgcgaaggcgtatatggagggcctcatgggtgtgctggtccggctaacgacgacgctgtatgacccggacgtgctcttggcggccatggatcacaacctcacgtcggtgctcacagatctcgtgcggtccgcaggcagcgacgaggtccagcggctcgccgcgattggtctcgagaacctcagcagccagtcgcccaacctttcccagcccccgaccgaggagcggcgcccgaagaagaagaacatcctccggcgcctgcgcgaggcgcacgcggggcgggtgcacgacaaccggaggccgccggcgcacagccgggtttgcccggtgcaccgtggggtgtgttccccgtccaccacgttctgcctggtggaggctggcgcggtggagggcctcttgtgcgtcctggagagcagcgagaacgggcgcgtggtggaggccgcgctcggtgcgctgtgcacgctcatggacgacgcggtggacgtgacgagcggcgtggccgtgctcgcggagcacgacgcggcgcggcacgtgcttcgcgcgctgcggcagcaccgtgacgacgggcggagagggggcggcggcgctgccgcaggcgagacggtcactcggaggtgtttctgggcggtggagaggttcctggctcacggcagcgagcggtgcgtgagggaggtcaccagcgatcgggcgctgccgagcctgctggtgggcgccttccacaagggcgacgccgccaccaagcaggtggccgagagcgtgctccggtgcctgcaccgcatgccggattactccgcgacctacgaatccgtcgaactgtaaccaacacatgacgcgcacgactgcgcatgtcttgcctctcttttatcaagcttcgtctcttggttatgtttgtaaaattggtttttgtgtgtaacatgggttgatgtattgtttggtgtagctaaaggaaaatagaaaaggaaaaactgaagatgcagttatgtatgcaagtataaccaaagtttatagcaagggaagatactagtcttttgattcttcttactatttttttgtgtgtgtgttcagtagttcttttttagggaccgtgttcaattcagtaggttttgacaagagtgcctcctaaaatcagtctccagataatttgttttg

SEQ ID NO: 204493 - DNA, 2662 bp, Zea Mays
tccgactccgactccgactccgagggcggtgcgagtgaccttgcccttgtttggattggacgacgactgggtccgcgagctgccagcgcggtctcccaccactatccctctctcccctctccgtttgtctccatcctttctacctcggctgctgcgttgcgtgtggcgctgtgcttgggcagacgtgggcaccatgcctgggtgacttggtgtagcactgtagctgtggcatggagctgaggaagacgacgacgggggagagaagaatgctccccgggtgctaacttggccgccgctgctcaggggacgagtcgagggggagaagaggaaagtccagtttcttcagcttcttggttggatgcaggaaatcatagcgaaaaccagagccgtctcaaggacaataaagctgctatccagcagtagtactgatgagaggcatgcatctatatctttcttgctagagctttcgaagtcagagttgctgttggagaacattggatcaactgctgggagcatactgatcctcaccacgatgaagtttaatagctcatctgatcctattgctgccgagaaggctggagaagtcctcgagaacctggagaaatgccccaagaatatcaagtacatggctgaaagtggctacttggatcctctgcaaaggcacctagttgaaggaccagaagatgtgcagatggagatggtgagctacctcggcgagctggtccagaagcaggagatgaccatcaatatagcagggagtgcatcagagatcctcatcaaaatggtgtgcagtggtaatacggcaattcgaaaggcgaccctcgatgtcctggttcagatctcgtcccaccaccccaacgccaagacgcttgtggatgctggtgccgtccctgtcatggtagaggagctcttcatacgaaagattgatgatgagcccatgggctctaagacagaggctgccgcggtgctcgccaacatcgtcgagtctggcttggatccagaggccatcaccgtgaacaaggaaggccacgtcatcacgtccaagtactcggtatacaacttcgctcacatgctcaagtgctccatgcctgacaccctcaacctaagcattgtgcgcgtgctgctcgcgctgaccgctctccccaagcctctcgccacggtggtctcggtcatgaaggagcaagacagtggacagacggtgattgagctgatgggctcgctgacagagtcgcttgtcatcgccgcaatgaggctgcttattgcgttgtccccgcagatggggcacaccattgccgagaagctgtgcaaggccccggggcagccagggaggcttgtcaagagcattggcctgcacgggcggatcatggagcggcacgccatgtcagctactctcctggcgaagctgccgtaccagcacatcgctctgaacctggcgctgatcaaccagggcgcgatggttaccgtgctagccaagatagaggagatgcagcgcggcgagacgcgggcaagccgccatgcgaaggcgtatatggagggcctcatgggtgtgctggtccggctaacgacgacgctgtatgacccggacgtgctcttggcggccatggatcacaacctcacgtcggtgctcacagatctcgtgcggtccgcaggcagcgacgaggtccagcggctcgccgcgattggtctcgagaacctcagcagccagtcgcccaacctttcccagcccccgaccgaggagcggcgcccgaagaagaagaacatcctccggcgcctgcgcgaggcgcacgcggggcgggtgcacgacaaccggaggccgccggcgcacagccgggtttgcccggtgcaccgtggggtgtgttccccgtccaccacgttctgcctggtggaggctggcgcggtggagggcctcttgtgcgtcctggagagcagcgagaacgggcgcgtggtggaggccgcgctcggtgcgctgtgcacgctcatggacgacgcggtggacgtgacgagcggcgtggccgtgctcgcggagcacgacgcggcgcggcacgtgcttcgcgcgctgcggcagcaccgtgacgacgggcggagagggggcggcggcgctgccgcaggcgagacggtcactcggaggtgtttctgggcggtggagaggttcctggctcacggcagcgagcggtgcgtgagggaggtcaccagcgatcgggcgctgccgagcctgctggtgggcgccttccacaagggcgacgccgccaccaagcaggtggccgagagcgtgctccggtgcctgcaccgcatgccggattactccgcgacctacgaatccgtcgaactgtaaccaacacatgacgcgcacgactgcgcatgtcttgcctctcttttatcaagcttcgtctcttggttatgtttgtaaaattggtttttgtgtgtaacatgggttgatgtattgtttggtgtagctaaaggaaaatagaaaaggaaaaactgaagatgcagttatgtatgcaagtataaccaaagtttatagcaagggaagatactagtcttttgattcttcttactatttttttgtgtgtgtgttcagtagttcttttttagggaccgtgttcaattcagtaggttttgacaagagtgcctcctaaaatcagtctccagataatttgttttg

SEQ ID NO: 204494 - DNA, 3773 bp, Zea Mays
tccgactccgactccgactccgagggcggtgcgagtgaccttgcccttgtttggattggacgacgactgggtccgcgagctgccagcgcggtctcccaccactatccctctctcccctctccgtttgtctccatcctttctacctcggctgctgcgttgcgtgtggcgctgtgcttgggcagacgtgggcaccatgcctgggtgacttggtgtagcactgtagctgtggcatggagctgaggaagacgacgacgggggagagaagaatgctccccgggtgctaacttggccgccgctgctcaggggacgagtcgagggggagaagaggaaagtccagtttcttcagcttcttggttggatgcagtgaggcgcaggccaggaaggcatcactcgccgagtctgttctagcagccatctccgagctgatgccttcagcggcagccgccgtcgatgctgagcacgagagcttcatggatgtcggcagccacctccaccatggagccctgcccacagtgtcagtggaggcgcagaaggtgcagggttccccagccaacgcgctgcacgtgatggagtatctggctgccaatgttgacctcgccaaggacctcgtcacaaggtgcagcgccatcgcgcagcagctcatggacgacgacctcctgggcataaccgaggacttggacaaggtcatcaagaacataagcaatgagctcaacaagatgccagcagcgacgttcgagagcagcaggtttgcggaaccagcggtcagtggacaccttcaggttgtcaggaaccagcatgatctgttcgagcagcaatcctttgatggctactcggagggagatatgccaatggtcgtggcaatcgagaggccacccaagagaagaacgctgcacaacagtgacatgccgaggctggtggacttcctgcagggaatgtaccaggagtcacatgagatcggtggtcagtcatttggttcactccctgaagtcgcggaatatgtggagccattgtatgattctttcttctgccctctcacaaacaaggttatggttgatccagtgacaacggagagtggcatcacttatgacaggaaagctatagaggattactttgacaagtttacagatggctctgaacctgtgatatgtcctgttacaaagatggccatgcagagcaagacactgaggagtaatcttccgttgaagagcacaattgcagagtggattacaaggaatgaagcgacacgggtcaggatcgcacgcaccgcgctctctatggcgaccacagaggctatggtgcttgaggccatacatgagctgaaggtgctggctaggctgaggagaaagaacagggatcagatgcacaagattggcatcaccaagttcctagcacggcttctggaccacaaggatgcacttattcgctgtgactccctcgacctcctctgcttgttggttgaggatgatacaggaaaggaaatcatagcgaaaaccagagccgtctcaaggacaataaagctgctatccagcagtagtactgatgagaggcatgcatctatatctttcttgctagagctttcgaagtcagagttgctgttggagaacattggatcaactgctgggagcatactgatcctcaccacgatgaagtttaatagctcatctgatcctattgctgccgagaaggctggagaagtcctcgagaacctggagaaatgccccaagaatatcaagtacatggctgaaagtggctacttggatcctctgcaaaggcacctagttgaaggaccagaagatgtgcagatggagatggtgagctacctcggcgagctggtccagaagcaggagatgaccatcaatatagcagggagtgcatcagagatcctcatcaaaatggtgtgcagtggtaatacggcaattcgaaaggcgaccctcgatgtcctggttcagatctcgtcccaccaccccaacgccaagacgcttgtggatgctggtgccgtccctgtcatggtagaggagctcttcatacgaaagattgatgatgagcccatgggctctaagacagaggctgccgcggtgctcgccaacatcgtcgagtctggcttggatccagaggccatcaccgtgaacaaggaaggccacgtcatcacgtccaagtactcggtatacaacttcgctcacatgctcaagtgctccatgcctgacaccctcaacctaagcattgtgcgcgtgctgctcgcgctgaccgctctccccaagcctctcgccacggtggtctcggtcatgaaggagcaagacagtggacagacggtgattgagctgatgggctcgctgacagagtcgcttgtcatcgccgcaatgaggctgcttattgcgttgtccccgcagatggggcacaccattgccgagaagctgtgcaaggccccggggcagccagggaggcttgtcaagagcattggcctgcacgggcggatcatggagcggcacgccatgtcagctactctcctggcgaagctgccgtaccagcacatcgctctgaacctggcgctgatcaaccagggcgcgatggttaccgtgctagccaagatagaggagatgcagcgcggcgagacgcgggcaagccgccatgcgaaggcgtatatggagggcctcatgggtgtgctggtccggctaacgacgacgctgtatgacccggacgtgctcttggcggccatggatcacaacctcacgtcggtgctcacagatctcgtgcggtccgcaggcagcgacgaggtccagcggctcgccgcgattggtctcgagaacctcagcagccagtcgcccaacctttcccagcccccgaccgaggagcggcgcccgaagaagaagaacatcctccggcgcctgcgcgaggcgcacgcggggcgggtgcacgacaaccggaggccgccggcgcacagccgggtttgcccggtgcaccgtggggtgtgttccccgtccaccacgttctgcctggtggaggctggcgcggtggagggcctcttgtgcgtcctggagagcagcgagaacgggcgcgtggtggaggccgcgctcggtgcgctgtgcacgctcatggacgacgcggtggacgtgacgagcggcgtggccgtgctcgcggagcacgacgcggcgcggcacgtgcttcgcgcgctgcggcagcaccgtgacgacgggcggagagggggcggcggcgctgccgcaggcgagacggtcactcggaggtgtttctgggcggtggagaggttcctggctcacggcagcgagcggtgcgtgagggaggtcaccagcgatcgggcgctgccgagcctgctggtgggcgccttccacaagggcgacgccgccaccaagcaggtggccgagagcgtgctccggtgcctgcaccgcatgccggattactccgcgacctacgaatccgtcgaactgtaaccaacacatgacgcgcacgactgcgcatgtcttgcctctcttttatcaagcttcgtctcttggttatgtttgtaaaattggtttttgtgtgtaacatgggttgatgtattgtttggtgtagctaaaggaaaatagaaaaggaaaaactgaagatgcagttatgtatgcaagtataaccaaagtttatagcaagggaagatactagtcttttgattcttcttactatttttttgtgtgtgtgttcagtagttcttttttagggaccgtgttcaattcagtaggttttgacaagagtgcctcctaaaatcagtctccagataatttgttttg

SEQ ID NO: 204495 - DNA, 1584 bp, Zea Mays
gaccctggggcctgggccctgggccctggcacaatacaacgcgcccgttgactgactttgctgtgctccgtgctcagctgtgttcggttcggagttcggacaatctcctggaaattctgatcgaacctcctgcttggagcttcgcagcaacaccgtcctcacccgcgctgaaaaagcacccatcttcctattgcgcctttcttgtagagtcaagtcagctcacttttctcgtttcgatccagatcccgtattcccgttggattcgtttatcccgcgtcccgcaagcaatatcagatccttagcttctgtggttctgcacttattcagcgtctctccagcttggaccccttaaagtgttctccagctacttgaatcgtcagaaatggccactgacgccagcggaggtgaaaactgggtcaaggtggatttggaactgtttacaagggattcctgcaagacgggcaagccattgctgtgaagaagctctcagataattccccagtggcaaccgaaaaacagttcaagaatgaggttgggaaccttatggccatccagcatgagaacatagtgaggttgtatggctactgtcatgaactgcagaagaaagtgatagaacacaatggaagatacattcttgtggatgtggttcagagcatgctctgctacgaatacgcccccaaggggagccttgacaagtgtatttttgatatatcttctaggcctaattgggccacatgcttcaaaataattaagggcatttgccagggtttatatttcctacataaggggatggataggcctattgttcatctggatcttcagcctgccaacatactattggatgacaacatggtaccaaaaattgcggattttggcctgtcaaggctctttggtgaagaacaaacccgaataaacacaataaatgttgtgggagccaaagggtatatggctccagaatatctgtacagaggggagatctcaacccggtctgacatatacagcttaggcgtactaatcatggagatcacaactgggcagaagaactctccgaatgacaaagacatgtgtgcaaggaactttataaatcaggtttgccaaacatggacagacgaacacatggcatccaagtactcatcactagatgcagacagcctccagcaagtaaaagcatgcattgaaactgggctaaaatgtgtggatatcgatcagaagaagaggccctctatagttgaaattgttgacaagctcgatggaaggcttgctctctgaatggtagtgtatgctgcgcaaggtaaaactgtgatgcagagttaattctgcctatggtgatatgctctagatgcaatcacggaaacaataattgtatcacttactaatttatgtacttatgaaaaatatgttgcttgtgtaatgcatgtgttttggttagcatctagtacaccttccagccagttttttgtgtaacttcagctgtgaacaaaagatgtcataatgtgacatacctgtgatctcaatgttcatgttatgattttactctaaactatgtctataatcttgtatcatttgcatgttcatatattttta

SEQ ID NO: 204496 - DNA, 1465 bp, Zea Mays
gttggagactttgctggaggtatttcgagatcccgtattcccgttggattcgtttatcccgcgtcccgcaagcaatatcagatccttagcttctgtggttctgcacttattcagcgtctctccagcttggaccccttaaagtgttctccaggtacagctacttgaatcgtcagaaatggccactgacgccagcggaggtggtaagcctagtcttcttctgagtactttaccgaagcaactaccatcggattttctgaaagagattacggatgggttctctgctgacagaaaactgggtcaaggtggatttggaactgtttacaagggattcctgcaagacgggcaagccattgctgtgaagaagctctcagataattccccagtggcaaccgaaaaacagttcaagaatgaggttgggaaccttatggccatccagcatgagaacatagtgaggttgtatggctactgtcatgaactgcagaagaaagtgatagaacacaatggaagatacattcttgtggatgtggttcagagcatgctctgctacgaatacgcccccaaggggagccttgacaagtgtatttttgatatatcttctaggcctaattgggccacatgcttcaaaataattaagggcatttgccagggtttatatttcctacataaggggatggataggcctattgttcatctggatcttcagcctgccaacatactattggatgacaacatggtaccaaaaattgcggattttggcctgtcaaggctctttggtgaagaacaaacccgaataaacacaataaatgttgtgggagccaaagggtatatggctccagaatatctgtacagaggggagatctcaacccggtctgacatatacagcttaggcgtactaatcatggagatcacaactgggcagaagaactctccgaatgacaaagacatgtgtgcaaggaactttataaatcaggtttgccaaacatggacagacgaacacatggcatccaagtactcatcactagatgcagacagcctccagcaagtaaaagcatgcattgaaactgggctaaaatgtgtggatatcgatcagaagaagaggccctctatagttgaaattgttgacaagctcgatggaaggcttgctctctgaatggtagtgtatgctgcgcaaggtaaaactgtgatgcagagttaattctgcctatggtgatatgctctagatgcaatcacggaaacaataattgtatcacttactaatttatgtacttatgaaaaatatgttgcttgtgtaatgcatgtgttttggttagcatctagtacaccttccagccagttttttgtgtaacttcagctgtgaacaaaagatgtcataatgtgacatacctgtgatctcaatgttcatgttatgattttactctaaactatgtctataatcttgtatcatttgcatgttcatatattttta

SEQ ID NO: 204497 - DNA, 1518 bp, Zea Mays
cctaaagcaggggccgggcaaaccgtattgttggctccgcctagggttttagcacctgccgccgcaacctcccttctacttctactgccgccgcaacctccccatccttcgaatcccatccgacctaaccccgcaacccgccggacgacgagtggcgaggcccccggccgagatggaccggtaccagagggtggagcggccgcggaacgagtcaaccatcgaggagaacgagatccgcatcaccgcgcagggcctcatccgcaactatgtctcctacgctacctccctcctccaggaaaggagaattaaagagattgttctaaaagccatgggacaggcaatcagtaaatctgtagctgttgcagagattatcaagattggagatgactcggcatgtttcgatgatttcaattactttgtcccccagagagctggacaagcacactcctgggtaccaagctccagtgtacattgaacaaccaaggcaacagcaggtgccaccaccacagcgccaaccacgcagaccaccagcacaattccagcagctggagtatgaagattcttatgcacggggtcgaggaagagggcgtgggcgtggaaggggctggggtagaggtggctacggtggctatggtggatatggaaacaaccaaggtggctatcatcagggtggtgggtattatgacaatcaaggtggatataatggctatgataatcaaggtggatatagtggctatgataatcaaggtgggtatggtggtggatatggctataaccaaggcagatatgggaactatcaagaaaatggtggatataaccgaggaagaggaagtggtatgcgaggaagaggcaattggggttaccgaggaggttatgaaggtggcaggggcggtggctatggaggtggcaggggcggtggatacgaaggaggcaggggaggcggctatgaaggaggcaggggaggcggctatgaaggtggcagggtctatgaaggtggcaggggagggggctatgaaggaggcaggggaggcggctatgaaggtggcaggggagggggctatgaaggaggcaggggtggcagtgctcagggtggaaggggttacggtggccgtggaaggggtagaatgggtggtcgcggacgagggaactagtgcagttctggcgtttccttcaaaatgcatgcctcacctataccaggggaaacgacaagttatctgagcattttatgtttgaagccatgtgactgtgaggtctgttattttttcccctgagcgcgaggtttggttgtgagcataatgcatttgcaaagttttatcttgtacgtcatccttcaacgtttcaaattttatcatgtacgtcatccttcaatgtttctgctgccagaggttttcccagtgatcgttgagtgctgagcatgttgtccaatgttcatgcctgcagtattaacagatggccactcttttcctgtgaaattgttaattgcatttgagcaacaccaaaaataccaaaaaaggaaat

SEQ ID NO: 204498 - DNA, 1354 bp, Zea Mays
aaaccgtattgttggctccgcctagggttttagcacctgccgccgcaacctcccttctacttctactgccgccgcaacctccccatccttcgaatcccatccgacctaaccccgcaacccgccggacgacgagtggcgaggcccccggccgagatggaccggtaccagagggtggagcggccgcggaacgagtcaaccatcgaggagaacgagatccgcatcaccgcgcagggcctcatccgcaactatgtctcctacgctacctccctcctccaggaaaggagaattaaagagattgttctaaaagccatgggacaggcaatcagtaaatctgtagctgttgcagagattatcaagaaaaggatccctgggttacaccaggataccaacatcagttctgttagcatcactgatgtctgggaacccatagaagaaggccttgtcccattggagatgactcggcatgtttcgatgatttcaattactttgtcccccagagagctggacaagcacactcctgggtaccaagctccagtgtacattgaacaaccaaggcaacagcaggtgccaccaccacagcgccaaccacgcagaccaccagcacaattccagcagctggagtatgaagattcttatgcacggggtcgaggaagagggcgtgggcgtggaaggggctggggtagaggtggctacggtggctatggtggatatggaaacaaccaaggtggctatcatcagggtggtgggtattatgacaatcaaggtggatataatggctatgataatcaaggtggatatagcggctatgaaggtggcagggtctatgaaggtggcaggggagggggctatgaaggaggcaggggaggcggctatgaaggtggcaggggagggggctatgaaggaggcaggggtggcagtgctcagggtggaaggggttacggtggccgtggaaggggtagaatgggtggtcgcggacgagggaactagtgcagttctggcgtttccttcaaaatgcatgcctcacctataccaggggaaacgacaagttatctgagcattttatgtttgaagccatgtgactgtgaggtctgttattttttcccctgagcgcgaggtttggttgtgagcataatgcatttgcaaagttttatcttgtacgtcatccttcaacgtttcaaattttatcatgtacgtcatccttcaatgtttctgctgccagaggttttcccagtgatcgttgagtgctgagcatgttgtccaatgttcatgcctgcagtattaacagatggccactcttttcctgtgaaattgttaattgcatttgagcaacaccaaaaataccaaaaaaggaaat

SEQ ID NO: 204499 - DNA, 903 bp, Zea Mays
ctccacatcggcgccccagctgctagacctggcctccatgccaggattgttagcccctgctcccgtcgatacctcggtccttcgccatgggggagcccgctcccgccggtgcccgggtcggtcgccaagatccccgccctttgccctgcccgtcccttagctccagcccccgctcttgctagcaatagccctcgccccaaagccccactcgcttgcagtcacggaatggagagtattttcatcatgtccaagcatacgttttccagagcagcctcattggtgagatcatcagttgttttgagaagaagggcttcaatctcaagattctagtgttgctggtccatggaccatagtccatttctccaacacaacagccattgtctcagatagataaccttctacagacatcttatgatcaaggggacaaatgagatcatgccaactctactccatgtactgctggtgtcacaggattaatatacaatgaagatgttgattcttcttggagttgcacgaatgaaccttgtgattgtgattagttacttcaaagcatttttttggtcttaatgcatggatgggagagtgtcggatgcttcttcagatactatttcttggtccgtcaaatctgcttgacccaaatgaaagtttttctcaaatgtggcaaaaataattgtctcatcaattgtcagcgcgcctgcttccagcaaagtttcagagaagatggaatgtaacacaatttttggtggccgcataagtgtggagacttgattcatatatacttagttaggctcatattagtgcaaacagctgatacagttttcattagtatttagtatggcttagagtacacttatgtatgagttatttgacatgtttattatgagaatattgatggtacttatt

SEQ ID NO: 204500 - DNA, 981 bp, Zea Mays
caccctccacatcggcgccccagctgctagacctggcctccatgccaggattgttagcccctgctcccgtcgatacctcggtccttcgccatgggggagcccgctcccgccggtgcccgggtcggtcgccaagatccccgccctttgccctgcccgtcccttagctccagcccccgctcttgctagcaatagccctcgccccaaagccccactcgcttgcagtcacggaatggagagtattttcatcatgtccaagcatacgttttccagagcagcctcattggtgagatcatcagttgttttgagaagaagggcttcaatctcaagattcttttaggtgtttcttctgtgctttccaaaactagttcctgacagagggttgcgttcttttctccaaggaaaacagagtgttgctggtccatggaccatagtccatttctccaacacaacagccattgtctcagatagataaccttctacagacatcttatgatcaaggggacaaatgagatcatgccaactctactccatgtactgctggtgtcacaggattaatatacaatgaagatgttgattcttcttggagttgcacgaatgaaccttgtgattgtgattagttacttcaaagcatttttttggtcttaatgcatggatgggagagtgtcggatgcttcttcagatactatttcttggtccgtcaaatctgcttgacccaaatgaaagtttttctcaaatgtggcaaaaataattgtctcatcaattgtcagcgcgcctgcttccagcaaagtttcagagaagatggaatgtaacacaatttttggtggccgcataagtgtggagacttgattcatatatacttagttaggctcatattagtgcaaacagctgatacagttttcattagtatttagtatggcttagagtacacttatgtatgagttatttgacatgtttattatgagaatattgatggtacttatt

SEQ ID NO: 204501 - DNA, 530 bp, Zea Mays
gttcttccacttcgtttcagttgtctaggtccaagtagttcgtttcgtgagttatccaaagttgcgccgcaaagatgagtactgctaatcgctaccaacacatcaagtcaactaagcctgttgtaggcaaagcaagaaaattgaaggatctcatgataaaaagtgataataggatatgtgctgactgtggtgcacctgatcccaaatgggcatctgctaatattggagtgtttctttgcttaaaatgtggagatgttcataaggcacttggacctgacatctcaaaggttttatctgtaactttggatgattggtctgatagtgatatcgactccatggttgagatgacaacgacaatatctattgaggatgtgcgcagagaggtgaaaattttgaaggcattatctggacattccaatcttgtcaagttttatgatgcttgtgaggacgcccttaatgtctacataatgatggagctttgtgaaggtggagaactattggatagaatgcgccgtattacattttcttga

SEQ ID NO: 204502 - DNA, 1080 bp, Zea Mays
ttcatatgtttgcaactttcttttggtaaagttcatggatcggagtacagttttggagcacatgatcacccatcgagtggagtttttgaggtggaaccaaagagctgcccagggttcatatacagatgtacggttttcataggccacacaactctgaattccttggaatttcgagaattcattcagaggatggcctcagaataccatggagatacctaccacctcatttccaagaactgtaaccactttacagatgatcttagcaccagattaacaggaaaatcaattcctggttgggtcaatcgacttgcaaggctaggcgccttttgcaattgccttctaccagaaggcttgcggcttgagtcaactgaaacaaagcatcttggagactgtcgtttctcagatggttccaataccaccagcaacgataactctgacgaagatgaattggaagataaacacctgcttccgactacttctgttggtgaagacacaattgtaaaagaaattcacagatgaatttctggtgaagccttgcagtgatttctctatgtattctaaaatgtaatgggtttcaatactcattgtgcagcttgtcgttcattatgtatattgtcattgtattttaaaatgtcatgtgctctttctgttgtgctctgaaattttgtgtacatttggtgggtagtctgtatttatggttgagttcatttcacttgttgaatgattgaataggtggatgaatgagagaataaaaattcttatgtagaagcactcttgacttgattttcaaattttaacccaaagacatcaaaagctctaaaaggggtcaaatcaagaatacttcaatcaaatgtcgtttggttgttccaaacaaattcttggggagattatgatctatcaggccaaaataaacttgatttggactttggaaagtacgaggaaaaaacaaacgggaggcacaagagtagagcggtggcgccactcaaatgttttggcattgttgggacgcgacagatctccccatccaggtaccaagtaaggcttgagtattttctctataattctgatctctaaagtggg

SEQ ID NO: 204503 - DNA, 2478 bp, Zea Mays
gactaaacagtgtctcattggctttctcctccccctctctgctatcctccattgcaagttgtttggagcttaagcgaacagcatatcccggtgagtttggggcagatcctggcgaccgagcatcgattttcgatgagaacccgacgaatctcatcggtcgcagccgctgcgcgctaggtgggaactcgagcaaggcgagatcgaggcgggatccagaggctaagctacggtttccgacgcggatccggcggttctcggtcgctgcgcgccagatgagaatcgccgttgttgctcggtaaccgtcgtgttgtgtgtagaatctggttgtttgtcgacgagaacctctaccgcagtgaagagagaaaggttgttttaggcattgttgtgtgatgtaatagcatatttataagtttattttgtgtgctatatattttagttagatgcttttttgacagcactgtttagtgaagaaggtttgttatgttagtgaggcatgcatggtttattccgtgtgcatatatgattacacagtatcgtacgagtaatctagtgtatgataaatggtttattgtgtcagtgaactaggcatggatggttaagcaacgagtagatcgagcaaggttatatgttttttttgttagttacaagtttctggttgatatatttctttgctggtacttcttggttgttagttcaaagcttgaaactaattgttacatgaccgagaaacttaatagttggtattattgtcgtaggtgctatcgttacattacatggacaattgatactttttagttgatatttttaatgtagtttataattatttgcattgttgtaggtaaaatgtcgggcctaatgtgggagcatgggagaagatgctataactattttatggtgtcacaaacttcgattcatgtgcttctgcagccttcccgttgtgttccatttgcttcatcattaaatatttatttattgctcatattatctagttaattttattttataactgtataggaatatgtatatggaatggacccacaccacatctagatgcttcgaacttgtctggatattatgactccggctgaatatatgtattattagtgtccggcacttgaagcgacaaccactacgaccagatcaaagtcctgaggatttgcaacgttggaagccggctcccggacgcgcaactgcgcggacttttcctgcaagcttcttctgcaaccgaagcaactcttcaatccagaagtggctgctccagggcggcatggcgccaaaagtctccagcccgttcctcctcggcctaccctgggtcgtcgcgcacgttggatccatcaaatcttccaatgcacgctgcgccggcccgggtcgtcacgcaagagagctcccttcttgctagcgagtagcgactagcgagaggtcgccggcgcggcaaaaatccgaaaggcgagccgagatggcggggtcgcagtcgcaggcgatgctggagaagatggagctgcggcagagctaccgcaacgtctggcacaccgacctcaccaacgccgtcgccgcggacctcccgtggtgctgcctgtctctgtggtgcggcccgtgcgtgtcctacatgctgcgcagacgcgcgctctacaatgacatgtcaaggtacgtgtgctgcgccgggtacatgccgtgcagcggcaagtgcggcgagagccagtgcccggaagtatgccttgcaaccgaggtgttctgctgcttcggcaactcggtagcttcaacccggttcctgctgcaggacgagttcaacatccagacaacgcagtgcgacaactgcatcatcgccttcatgttcttcctgcagcagctggcctgcatctgctccctggtcgcctgcatcgtcggcaacagcgagctctcggaggccgcgcacgtcatctcctgcatgtcgaatctggtctactggacggtttgctcgtgcatgcagacgcagcacaaggtggagatggacaagagggacggcacgttgaacaccatgtctgcgcctccgatgcagcagatgtcgcgttggtaggtgcgagtgagattatgtgccgacctcgatacggaggagggtagctgctggagctggaggctatcagcaatctcctactctggttaggacggtccatttttcagatttgggtgagataccatggctagtgtgtaaaccatgtcccgtttgtttgggcaaattttcgtgtttaatgagttgtgcatttttcacaacttctgttatacctcttacggctagatgccgaaattagatatcctaataatttattttaattgactacaatagtatgtgcacttgtattttatttagaaatgagacgagagcaacgagtgtagaggctcaacttatcctccgggtgctttgtgcctattgagtatcaaatttggcactttccctactattttttttatctcttcggctctacatcgtttgaaagcgttttg

SEQ ID NO: 204504 - DNA, 2344 bp, Zea Mays
gactaaacagtgtctcattggctttctcctccccctctctgctatcctccattgcaagttgtttggagcttaagcgaacagcatatcccggtgggaactcgagcaaggcgagatcgaggcgggatccagaggctaagctacggtttccgacgcggatccggcggttctcggtcgctgcgcgccagatgagaatcgccgttgttgctcggtaaaatgtcgggcctaatgtgggagcatgggagaagatgctataactattttatggtgtcacaaacttcgattcatgaatatgtatatggaatggacccacaccacatctagatgcttcgaacttgtctggatattatgactccggctgaatatatggtacatacatgatttccggtttgtgtgaagaattatgttatgaaaatctttacatgcaggggcggagggctccatgtggcgaggtatggcccaagccataccttggcccagcccattagcatctaggtaagtcgaagacctacgtctgtgtcaagcatctgtgcatctgtttcttcaccgccgctcgcaaggcagtccgcacgccgctcatcttctctacgtagctgcgctcaccggctcgcatgctcgcctcgccatcgctcgcctcgagtccgcctctgcgcacacgccatcgttcgactctacacgctcgccgtcgctcggctcgcgcgcacacgctcgaatccgcctctgcgcgctgctctgtgcgccgagtgcctacgcggccgctgccacgactccatagacggcagtattattagtgtccggcacttgaagcgacaaccactacgaccagatcaaagtcctgaggatttgcaacgttggaagccggctcccggacgcgcaactgcgcggacttttcctgcaagcttcttctgcaaccgaagcaactcttcaatccagaagtggctgctccagggcggcatggcgccaaaagtctccagcccgttcctcctcggcctaccctgggtcgtcgcgcacgttggatccatcaaatcttccaatgcacgctgcgccggcccgggtcgtcacgcaagaggtaatgcgacgccgacgcgcacccattaaaagcaacccgtcacttagcgtctgagcgtgcgtgccagagcagagctcccttcttgctagcgagtagcgactagcgagaggtcgccggcgcggcaaaaatccgaaaggcgagccgagatggcggggtcgcagtcgcaggcgatgctggagaagatggagctgcggcagagctaccgcaacgtctggcacaccgacctcaccaacgccgtcgccgcggacctcccgtgtgctgcctgtctctgtggtgcggcccgtgcgtgtcctacatgctgcgcagacgcgcgctctacaatgacatgtcaaggtacgtgtgctgcgccgggtacatgccgtgcagcggcaagtgcggcgagagccagtgcccggaagtatgccttgcaaccgaggtgttctgctgcttcggcaactcggtagcttcaacccggttcctgctgcaggacgagttcaacatccagacaacgcagtgcgacaactgcatcatcgtgcgtagtcgcggccggccacgcgcgcctcgatccgtctcctgatgacttgatctgatcttccgaatcagctgactcgactgacgctactcatcttcctcgtcgttgcaggccttcatgttcttcctgcagcagctggcctgcatctgctccctggtcgcctgcatcgtcggcaacagcgagctctcggaggccgcgcacgtcatctcctgcatgtcgaatctggtctactggacggtttgctcgtgcatgcagacgcagcacaaggtggagatggacaagagggacggcacgttgaacaccatgtctgcgcctccgatgcagcagatgtcgcgttggtaggtgcgagtgagattatgtgccgacctcgatacggaggagggtagctgctggagctggaggctatcagcaatctcctactctggttaggacggtccatttttcagatttgggtgagataccatggctagtgtgtaaaccatgtcccgtttgtttgggcaaattttcgtgtttaatgagttgtgcatttttcacaacttctgttatacctcttacggctagatgccgaaattagatatcctaataatttattttaattgactacaatagtatgtgcacttgtattttatttagaaatgagacgagagcaacgagtgtagaggctcaacttatcctccgggtgctttgtgcctattgagtatcaaatttggcactttccctactattttttttatctcttcggctctacatcgtttgaaagcgttttg

SEQ ID NO: 204505 - DNA, 1561 bp, Zea Mays
gtggaaatggccagtggcggagcccttcggcagcccattggcccaggtctgctctgagcctctgagtgaccccgaacctaggcgacggccgacgaggcttccgcggtctgctcgggactccgcacccgtccgcgccgcatctgcctccaggcgattcggctcccggcctccgcgtccgcacagatcgcgccgcctcgccacgccgccgcctcccgactgcccatctgccgcggccgcgcccaccgcccgactgcccgtctgccgcagccgcgcccaccgcccatcgccctctgctcccggccacacctgagcggccgagcccgacaagcggccgcgacattgccacactcctccgcgacaaacagtaggacaccgcacgcatcacgacatcagggctggctccaccactggaaatggcggcactggtgccggagtgggctaccaaggagccctgcctcatggggatcgatgaggctggccgtggccctgtcctcggtcctatggtgtatggatgtgtgtactgcgcgtgctcttacaataacactcttgcgactctcaaattcgcagattcaaagacgttgaaggaagaacaaagagaggagctatttgaaagtttaaaggccaatagctctattgggtgggaagtggatgtcatatgcccaaaggatctatctgctaaaatgttaaaaaggtcgaaagttaatctgaatgaaatatcacataactctgccatgggtcttgttagaaaagttcttgacatgggagttctactggcagaagtatatgtagatacagtgggagatcctgaaaagtacagaaccaagctgacagaaaagtttccaggggtcaaatttgtggttgccaaaaaagctgatagcctttaccctgttgttagtggagcaagtatagctgcaaaggtcactagggacagagcgttgcgaaactgggtgtttgatgaaacagctctgagtctgcacatgagaactggatcaggatatccaggagaccctgatactaagcaatggttagaagatcacaagcatccggtatttggcttcccaactttggttcgtttcagttggggaacttgtaagcccttcttcaaggacgcagttgatgttacatgggagtctgatgaagttgatgaagaagggactgacaatggaggtgccaagcgacaagtcaagctttcaagcctaggcttcactggtttcaaaaggaaaaccgaggatatcgaatcaagcggaaaaggtcgttgcaaattcttccaggctcgcaaacttgagttggtcaggaagtttcagtgatgtgtcctaatttggtagtacgtacttatatttgtggtagctggagtgtttggtttagtttgttgtagagcctaatttgaaactggtctaaattggatgttgagattggaatgggaagataatgattttccccacattgctacttctgccatttcctacgtgccgcagtagttactggatgctactgcgagtttatttgctaaactcgctttactgtttctttgcaatattgacggacgtttatttggaggata

SEQ ID NO: 204506 - DNA, 1587 bp, Zea Mays
  misc_feature (1587)..(1587): n is a, c, g, or t
cgcccaaccacatggtagtttaatcccctactagtctcggagagtcgctccgaggaatgggagtcgtgccccaccggcggcagcagcaccggtgacgccggcacgcctaaatgcgtcgtcccctcgcctctgcggccctccgcctccgcttcttctcttccacctcccctgcccgccttctctcgccctgcccattccttctatcccgccgtgacgacgacggcggccgcgaggcctcctcgtcgccgctgcccccgctcccgccttctggctcggctttctccccacgcccgctcctcttctctgcatcagctgccgcgggcctcttcagcctccatggcgggtggtggaggcaggctcttcctcctgcagcgtcgcggcccctcggctccgtctctgacgcagctcccgtccggctcaccatctcccgcagttattctctgcgtgtggccaagggcaagaagaaagcacattttgacgatgaacacagccatcgagcggttaacatggcactatgctcaagacgtgctccagatgctctacacccctatggttattctaaggaaagatttgtatggtctctcatatctgcagttggaatattttgcttgggttccggtgctacaattgtgcatggagttcaaaatttatggaattctcatcctccagagaatattcactgggctgcattagtgattggtgggtccttcctaattgaaggtgcttcactgcttgttgctataaaggctgttaggaaaggtgcagaagcagagggaatgagtatctgggactatatctggcgtggtcatgatccaacttccgttgctgttatgactgaagatggtgctgctgttacaggccttgctattgctgcagcatctttggtagctgttcaaatgacaggaaatgctatgtatgatccaattggctcaatcattgttggcaatttactggggatggttgctatttttctcattcagaggaataggcatgctttaattggccgggccattgatgatcatgacatgcaacgagtccttgaatttctgaagtctgatccggttgtagatgctctttatgattgcaaaagtgaggtgattgggccaggtttttttagattcaaggctgaaattgatttcaatggagttgttctggtacaaaattatttggaaaggactggacgtgggagttgggcaaaacagttccgggaagctgcaatgtccaaggatgatacggaattgctaagggtcatggccaactacggggaggatgtagttgaagctctgggatatgaagtggatcggctggagtctgagatccaaaagcttgtgcctgggattaaacatgttgacatcgaggcacacaatcccgaaggacttgctcttagagcagaagttttgtagattacctgtgtacattgcatttgattaacactgttgctggtcgctgccagtttgatttgggtccaccaccattcgataagattgtcttccattggcaatgtaagaatcagatggctgttgttgcgtagcgaggcggtttttttatttggaagaagacgtggtcgcgcctgacatggaaggcttn

SEQ ID NO: 204507 - DNA, 1361 bp, Zea Mays
cgccgcccaaccacatggtagtttaatcccctactagtctcggagagtcgctccgaggaatgggagtcgtgccccaccggcggcagcagcaccggtgacgccggcacgcctaaatgcgtcgtcccctcgcctctgcggccctccgcctccgcttcttctcttccacctcccctgcccgccttctctcgccctgcccattccttctatcccgccgtgacgacgacggcggccgcgaggcctcctcgtcgccgctgcccccgctcccgccttctggctcggctttctccccacgcccgctcctcttctctgcatcagctgccgcgggcctcttcagcctccatggcgggtggtggaggcaggctcttcctcctgcagcgtcgcggcccctcggctccgtctctgacgcagctcccgtccggctcaccatctcccgcagttattctctgcgtgtggccaagggcaagaagaaagcacattttgacgatgaacacagccatcgagcggttaacatggcactatggtgcaacttcctcgttttctccctaaagtttggagtgtggatttcaacttcaagtcatgttatgctagctgagcttgtgcattctgttgcagactttgctaaccaggctcttcttgcttatggtttgagcagctcaagacgtgctccagatgctctacacccctatggttattctaaggaaagatttgtatggtctctcatatctgcagttggaatattttgcttgggttccggtgctacaattgtgcatggagttcaaaatttatggaattctcatcctccagagaatattcactgggctgcattagtgattggtgggtccttcctaattgaaggtgcttcactgcttgttgctataaaggctgttaggaaaggtgcagaagcagagggaatgagtatctgggactatatctggcgtggtcatgatccaacttccgttgctgttatgactgaagatggtgctgctgttacaggccttgctattgctgcagcatctttggtagctgttcaaatgacaggaaatgctatgtatgatccaattggctcaatcattgttggcaatttactggggatggttgctatttttctcattcagaggaataggcatgctttaattggccgggccattgatgatcatgacatgcaacgagtccttgaatttctgaagtctgatccggttgtagatgctctttatgattgcaaaagtgaggtgattgggccaggtttttttagattcaaggctgaaattgatttcaatggagttgttctggtacaaaattatttggaaaggactggacgtgggagttgggcaaaacaggccctcaatccccttacaaacaag

SEQ ID NO: 204508 - DNA, 1822 bp, Zea Mays
ctgactccacagtccacaccaccaccacacccaggcttccacttgccgccgcgcccgcgcctccccctcattttctccccctccactgctttgcgcctacgcatcgccgccccgcctctagtcctctgtcctcctcttcctactgtaaaccacctcgtccctatccgcggcaaccgttcaccgcgccgcgaggcctgctgatccgaccgaccttccaccgtcatggctcccctgcgccgcgcgtctcgcctccttcgatcagccgtctgccggctgaggtctccagcgccggctcgggccttctccagcgccgcggcgaccgagacgggtgccgtgatcgccgccgctgccgtggcggtggccagctccgggctcgggctgtggctgaaaccgccgtcgcttgccgactccggcgaggcgcccggcgaccagatctcggtcgcctgtgccggcgccacggaggcgcgggaggagaaggggtggttcctgttcgcagactcatttcgtagaagggtcttcttcaactacgagaagaggatacggcttctcagtcctcctgagaagatttttgagtactttgcgtctgtgaggaatcgagaaggggaagtttacatgttgcctgctgacttgatgagagcagtagtccctgtttttcctccatcagagtccacggtagttcgtgaaggaagattaaggggggagcggagccctggagaattgcactgtgctccatcagagttctttatgcagttcgacacaaataatgatggcctcatctcctttgctgaggtgatagacagagaagagtttaagaaaataatggcactgatgcggtcctttaacagacaagggtcgactcataaggatggtttacgtattggacttaaagttggcaagcctgtggaaaatggtggggtggtcgagtacttctttgggagtgatgggaatgaacctctacactttgacaagttttctaaaattttgaaggaattgcatgatgagattattcaactggagttcagtcattatgatgtcaaatcgtctaaaacaataccagcaaaggattttgcattgtccatggttgcttctgctgacatgaaccatatcaacaagctgcttgatagagttgatagtttggtcaaggagccagatctgaaggacatacgcatcacctttgaggagtttaaggcatttgctgatttgcgacgaagattggagccactgtcgatggctatctttgcttacggtaaattgaatgggttattgacgaaggaggatctaaaacgtgcagcgcaacatgtttgcggggtcgacttaacagatagagtagtagacatcattttccatgtgttcgacacaaatcaggatgggaacttgagcccagaagagttcttaagagcgttacaaagaagagaaactgatattcgtgaaccaacaataccaggtccattggggttcttgtcttgctggttcagtggtaggaagtgttcttcactaaaacatgtggttatctgattgagcccctatttgatcctcacggcgcagaaggtaatcaccaagcagtgcattgctgatcgttacaacggacttcactgtatgtcgtcttggtggccgaagcttgactagcagtaacagctctaattgtaaatcgtgtcttctgtagccctaggactgagtgatatacatcgttattctcacgtgtaaattaaaccccatatggccatatggcttcaatatatgaaacattgtcatttagctttatttttagttgaaaacgtgactcacttttgccggaaccgtagcgttagagtgccaaacagac

SEQ ID NO: 204509 - DNA, 1932 bp, Zea Mays
ctgactccacagtccacaccaccaccacacccaggcttccacttgccgccgcgcccgcgcctccccctcattttctccccctccactgctttgcgcctacgcatcgccgccccgcctctagtcctctgtcctcctcttcctactgtaaaccacctcgtccctatccgcggcaaccgttcaccgcgccgcgaggcctgctgatccgaccgaccttccaccgtcatggctcccctgcgccgcgcgtctcgcctccttcgatcagccgtctgccggctgaggtctccagcgccggctcgggccttctccagcgccgcggcgaccgagacgggtgccgtgatcgccgccgctgccgtggcggtggccagctccgggctcgggctgtggctgaaaccgccgtcgcttgccgactccggcgaggcgcccggcgaccagatctcggtcgcctgtgccggcgccacggaggcgcgggaggagaaggggtggttcctgttcgcagactcatttcgtagaagggtcttcttcaactacgagaagaggatacggcttctcagtcctcctgagaagatttttgagtactttgcgtctgtgaggaatcgagaaggggaagtttacatgttgcctgctgacttgatgagagcagtagtccctgtttttcctccatcagagtccacggtagttcgtgaaggaagattaaggggggagcggagccctggagaattgcactgtgctccatcagagttctttatgcagttcgacacaaataatgatggcctcatctcctttgctgagtacattttttttgtgacattgctcagcattcatgagtcaaatttcactgtggccttcaaaatgttcgacattgaccacagtggttaatttatctcgccaagaaaaaagacctgctcgttatgagcatgttcaatcatctgacttgtttgttgatggtaaaagaaggacaagggtcgactcataaggatggtttacgtattggacttaaagttggcaagcctgtggaaaatggtggggtggtcgagtacttctttgggagtgatgggaatgaacctctacactttgacaagttttctaaaattttgaaggaattgcatgatgagattattcaactggagttcagtcattatgatgtcaaatcgtctaaaacaataccagcaaaggattttgcattgtccatggttgcttctgctgacatgaaccatatcaacaagctgcttgatagagttgatagtttggtcaaggagccagatctgaaggacatacgcatcacctttgaggagtttaaggcatttgctgatttgcgacgaagattggagccactgtcgatggctatctttgcttacggtaaattgaatgggttattgacgaaggaggatctaaaacgtgcagcgcaacatgtttgcggggtcgacttaacagatagagtagtagacatcattttccatgtgttcgacacaaatcaggatgggaacttgagcccagaagagttcttaagagcgttacaaagaagagaaactgatattcgtgaaccaacaataccaggtccattggggttcttgtcttgctggttcagtggtaggaagtgttcttcactaaaacatgtggttatctgattgagcccctatttgatcctcacggcgcagaaggtaatcaccaagcagtgcattgctgatcgttacaacggacttcactgtatgtcgtcttggtggccgaagcttgactagcagtaacagctctaattgtaaatcgtgtcttctgtagccctaggactgagtgatatacatcgttattctcacgtgtaaattaaaccccatatggccatatggcttcaatatatgaaacattgtcatttagctttatttttagttgaaaacgtgactcacttttgccggaaccgtagcgttagagtgccaaacagac

SEQ ID NO: 204510 - DNA, 1697 bp, Zea Mays
ctgactccacagtccacaccaccaccacacccaggcttccacttgccgccgcgcccgcgcctccccctcattttctccccctccactgctttgcgcctacgcatcgccgccccgcctctagtcctctgtcctcctcttcctactgtaaaccacctcgtccctatccgcggcaaccgttcaccgcgccgcgaggcctgctgatccgaccgaccttccaccgtcatggctcccctgcgccgcgcgtctcgcctccttcgatcagccgtctgccggctgaggtctccagcgccggctcgggccttctccagcgccgcggcgaccgagacgggtgccgtgatcgccgccgctgccgtggcggtggccagctccgggctcgggctgtggctgaaaccgccgtcgcttgccgactccggcgaggcgcccggcgaccagatctcggtcgcctgtgccggcgccacggaggcgcgggaggagaaggggtggttcctgttcgcaggtacattttttttgtgacattgctcagcattcatgagtcaaatttcactgtggccttcaaaatgttcgacattgaccacagtggttaatttatctcgccaagaaaaaagacctgctcgttatgagcatgttcaatcatctgacttgtttgttgatggtaaaagaaggggtgatagacagagaagagtttaagaaaataatggcactgatgcggtcctttaacagacaagggtcgactcataaggatggtttacgtattggacttaaagttggcaagcctgtggaaaatggtggggtggtcgagtacttctttgggagtgatgggaatgaacctctacactttgacaagttttctaaaattttgaaggaattgcatgatgagattattcaactggagttcagtcattatgatgtcaaatcgtctaaaacaataccagcaaaggattttgcattgtccatggttgcttctgctgacatgaaccatatcaacaagctgcttgatagagttgatagtttggtcaaggagccagatctgaaggacatacgcatcacctttgaggagtttaaggcatttgctgatttgcgacgaagattggagccactgtcgatggctatctttgcttacggtaaattgaatgggttattgacgaaggaggatctaaaacgtgcagcgcaacatgtttgcggggtcgacttaacagatagagtagtagacatcattttccatgtgttcgacacaaatcaggatgggaacttgagcccagaagagttcttaagagcgttacaaagaagagaaactgatattcgtgaaccaacaataccaggtccattggggttcttgtcttgctggttcagtggtaggaagtgttcttcactaaaacatgtggttatctgattgagcccctatttgatcctcacggcgcagaaggtaatcaccaagcagtgcattgctgatcgttacaacggacttcactgtatgtcgtcttggtggccgaagcttgactagcagtaacagctctaattgtaaatcgtgtcttctgtagccctaggactgagtgatatacatcgttattctcacgtgtaaattaaaccccatatggccatatggcttcaatatatgaaacattgtcatttagctttatttttagttgaaaacgtgactcacttttgccggaaccgtagcgttagagtgccaaacagac

SEQ ID NO: 204511 - DNA, 1710 bp, Zea Mays
ctgactccacagtccacaccaccaccacacccaggcttccacttgccgccgcgcccgcgcctccccctcattttctccccctccactgctttgcgcctacgcatcgccgccccgcctctagtcctctgtcctcctcttcctactgtaaaccacctcgtccctatccgcggcaaccgttcaccgcgccgcgaggcctgctgatccgaccgaccttccaccgtcatggctcccctgcgccgcgcgtctcgcctccttcgatcagccgtctgccggctgaggtctccagcgccggctcgggccttctccagcgccgcggcgaccgagacgggtgccgtgatcgccgccgctgccgtggcggtggccagctccgggctcgggctgtggctgaaaccgccgtcgcttgccgactccggcgaggcgcccggcgaccagatctcggtcgcctgtgccggcgccacggaggcgcgggaggagaaggggtggttcctgttcgcagactcatttcgtagaagggtcttcttcaactacgagaagaggatacggcttctcagtcctcctgagaagatttttgagtactttgcgtctgtgaggaatcgagaaggggaagtttacatgttgcctgctgacttgatgagagcagtagtccctgtttttcctccatcagagtccacggtagttcgtgaaggaagattaaggggggagcggagccctggagaattgcactgtgctccatcagagttctttatgcagttcgacacaaataatgatggcctcatctcctttgctgagtacattttttttgtgacattgctcagcattcatgagtcaaatttcactgtggccttcaaaatgttcgacattgaccacagtggattattcaactggagttcagtcattatgatgtcaaatcgtctaaaacaataccagcaaaggattttgcattgtccatggttgcttctgctgacatgaaccatatcaacaagctgcttgatagagttgatagtttggtcaaggagccagatctgaaggacatacgcatcacctttgaggagtttaaggcatttgctgatttgcgacgaagattggagccactgtcgatggctatctttgcttacggtaaattgaatgggttattgacgaaggaggatctaaaacgtgcagcgcaacatgtaagattttcttaccaggtttgcggggtcgacttaacagatagagtagtagacatcattttccatgtgttcgacacaaatcaggatgggaacttgagcccagaagagttcttaagagcgttacaaagaagagaaactgatattcgtgaaccaacaataccaggtccattggggttcttgtcttgctggttcagtggtaggaagtgttcttcactaaaacatgtggttatctgattgagcccctatttgatcctcacggcgcagaaggtaatcaccaagcagtgcattgctgatcgttacaacggacttcactgtatgtcgtcttggtggccgaagcttgactagcagtaacagctctaattgtaaatcgtgtcttctgtagccctaggactgagtgatatacatcgttattctcacgtgtaaattaaaccccatatggccatatggcttcaatatatgaaacattgtcatttagctttatttttagttgaaaacgtgactcacttttgccggaaccgtagcgttagagtgccaaacagac

SEQ ID NO: 204512 - DNA, 1775 bp, Zea Mays
ctgactccacagtccacaccaccaccacacccaggcttccacttgccgccgcgcccgcgcctccccctcattttctccccctccactgctttgcgcctacgcatcgccgccccgcctctagtcctctgtcctcctcttcctactgtaaaccacctcgtccctatccgcggcaaccgttcaccgcgccgcgaggcctgctgatccgaccgaccttccaccgtcatggctcccctgcgccgcgcgtctcgcctccttcgatcagccgtctgccggctgaggtctccagcgccggctcgggccttctccagcgccgcggcgaccgagacgggtgccgtgatcgccgccgctgccgtggcggtggccagctccgggctcgggctgtggctgaaaccgccgtcgcttgccgactccggcgaggcgcccggcgaccagatctcggtcgcctgtgccggcgccacggaggcgcgggaggagaaggggtggttcctgttcgcagactcatttcgtagaagggtcttcttcaactacgagaagaggatacggcttctcagtcctcctgagaagatttttgagtactttgcgtctgtgaggaatcgagaaggggaagtttacatgttgcctgctgacttgatgagagcagtagtccctgtttttcctccatcagagtccacggtagttcgtgaaggaagattaaggggggagcggagccctggagaattgcactgtgctccatcagagttctttatgcagttcgacacaaataatgatggcctcatctcctttgctgagtacattttttttgtgacattgctcagcattcatgagtcaaatttcactgtggccttcaaaatgttcgacattgaccacagtggttaatttatctcgccaagaaaaaagacctgctcgttatgagcatgttcaatcatctgacttgtttgttgatggtaaaagaaggattattcaactggagttcagtcattatgatgtcaaatcgtctaaaacaataccagcaaaggattttgcattgtccatggttgcttctgctgacatgaaccatatcaacaagctgcttgatagagttgatagtttggtcaaggagccagatctgaaggacatacgcatcacctttgaggagtttaaggcatttgctgatttgcgacgaagattggagccactgtcgatggctatctttgcttacggtaaattgaatgggttattgacgaaggaggatctaaaacgtgcagcgcaacatgtttgcggggtcgacttaacagatagagtagtagacatcattttccatgtgttcgacacaaatcaggatgggaacttgagcccagaagagttcttaagagcgttacaaagaagagaaactgatattcgtgaaccaacaataccaggtccattggggttcttgtcttgctggttcagtggtaggaagtgttcttcactaaaacatgtggttatctgattgagcccctatttgatcctcacggcgcagaaggtaatcaccaagcagtgcattgctgatcgttacaacggacttcactgtatgtcgtcttggtggccgaagcttgactagcagtaacagctctaattgtaaatcgtgtcttctgtagccctaggactgagtgatatacatcgttattctcacgtgtaaattaaaccccatatggccatatggcttcaatatatgaaacattgtcatttagctttatttttagttgaaaacgtgactcacttttgccggaaccgtagcgttagagtgccaaacagac

SEQ ID NO: 204513 - DNA, 2222 bp, Zea Mays
ctgactccacagtccacaccaccaccacacccaggcttccacttgccgccgcgcccgcgcctccccctcattttctccccctccactgctttgcgcctacgcatcgccgccccgcctctagtcctctgtcctcctcttcctactgtaaaccacctcgtccctatccgcggcaaccgttcaccgcgccgcgaggcctgctgatccgaccgaccttccaccgtcatggctcccctgcgccgcgcgtctcgcctccttcgatcagccgtctgccggctgaggtctccagcgccggctcgggccttctccagcgccgcggcgaccgagacgggtgccgtgatcgccgccgctgccgtggcggtggccagctccgggctcgggctgtggctgaaaccgccgtcgcttgccgactccggcgaggcgcccggcgaccagatctcggtcgcctgtgccggcgccacggaggcgcgggaggagaaggggtggttcctgttcgcagactcatttcgtagaagggtcttcttcaactacgagaagaggatacggcttctcagtcctcctgagaagatttttgagtactttgcgtctgtgaggaatcgagaaggggaagtttacatgttgcctgctgacttgatgagagcagtagtccctgtttttcctccatcagagtccacggtagttcgtgaaggaagattaaggggggagcggagccctggagaattgcactgtgctccatcagagttctttatgcagttcgacacaaataatgatggcctcatctcctttgctgagtacattttttttgtgacattgctcagcattcatgagtcaaatttcactgtggccttcaaaatgttcgacattgaccacagtgggtgagttcttatcctaccgttgctctaagtcttcagaataggttccccgaccctgctgaaacacatctgttgaccagaattttctcaacctgtacacttctatttggttttgataaacgattaaaataaatttgatgttttgagaggaaatttagttcttcaagtcctgtttgcttcagtttgaaatttcttttcctgtgtaaacatatgttgtttagtaatgctgataaaggtatgtcgttctgtactcatgcataaacaagaggacagttaatatggtcttgtttgtgttgtattgttgtttacctgtgatcattgcatgcagttaatttatctcgccaagaaaaaagacctgctcgttatgagcatgttcaatcatctgacttgtttgttgatggtaaaagaaggggtgatagacagagaagagtttaagaaaataatggcactgatgcggtcctttaacagacaagggtcgactcataaggatggtttacgtattggacttaaagttggcaagcctgtggaaaatgattattcaactggagttcagtcattatgatgtcaaatcgtctaaaacaataccagcaaaggattttgcattgtccatggttgcttctgctgacatgaaccatatcaacaagctgcttgatagagttgatagtttggtcaaggagccagatctgaaggacatacgcatcacctttgaggagtttaaggcatttgctgatttgcgacgaagattggagccactgtcgatggctatctttgcttacggtaaattgaatgggttattgacgaaggaggatctaaaacgtgcagcgcaacatgtttgcggggtcgacttaacagatagagtagtagacatcattttccatgtgttcgacacaaatcaggatgggaacttgagcccagaagagttcttaagagcgttacaaagaagagaaactgatattcgtgaaccaacaataccaggtccattggggttcttgtcttgctggttcagtggtaggaagtgttcttcactaaaacatgtggttatctgattgagcccctatttgatcctcacggcgcagaaggtaatcaccaagcagtgcattgctgatcgttacaacggacttcactgtatgtcgtcttggtggccgaagcttgactagcagtaacagctctaattgtaaatcgtgtcttctgtagccctaggactgagtgatatacatcgttattctcacgtgtaaattaaaccccatatggccatatggcttcaatatatgaaacattgtcatttagctttatttttagttgaaaacgtgactcacttttgccggaaccgtagcgttagagtgccaaacagac

SEQ ID NO: 204514 - DNA, 1592 bp, Zea Mays
ctgactccacagtccacaccaccaccacacccaggcttccacttgccgccgcgcccgcgcctccccctcattttctccccctccactgctttgcgcctacgcatcgccgccccgcctctagtcctctgtcctcctcttcctactgtaaaccacctcgtccctatccgcggcaaccgttcaccgcgccgcgaggcctgctgatccgaccgaccttccaccgtcatggctcccctgcgccgcgcgtctcgcctccttcgatcagccgtctgccggctgaggtctccagcgccggctcgggccttctccagcgccgcggcgaccgagacgggtgccgtgatcgccgccgctgccgtggcggtggccagctccgggctcgggctgtggctgaaaccgccgtcgcttgccgactccggcgaggcgcccggcgaccagatctcggtcgcctgtgccggcgccacggaggcgcgggaggagaaggggtggttcctgttcgcagactcatttcgtagaagggtcttcttcaactacgagaagaggatacggcttctcagtcctcctgagaagagtccacggtagttcgtgaaggaagattaaggggggagcggagccctggagaattgcactgtgctccatcagagttctttatgcagttcgacacaaataatgatggcctcatctcctttgctgagtacattttttttgtgacattgctcagcattcatgagtcaaatttcactgtggccttcaaaatgttcgacattgaccacagtggattattcaactggagttcagtcattatgatgtcaaatcgtctaaaacaataccagcaaaggattttgcattgtccatggttgcttctgctgacatgaaccatatcaacaagctgcttgatagagttgatagtttggtcaaggagccagatctgaaggacatacgcatcacctttgaggagtttaaggcatttgctgatttgcgacgaagattggagccactgtcgatggctatctttgcttacggtaaattgaatgggttattgacgaaggaggatctaaaacgtgcagcgcaacatgtttgcggggtcgacttaacagatagagtagtagacatcattttccatgtgttcgacacaaatcaggatgggaacttgagcccagaagagttcttaagagcgttacaaagaagagaaactgatattcgtgaaccaacaataccaggtccattggggttcttgtcttgctggttcagtggtaggaagtgttcttcactaaaacatgtggttatctgattgagcccctatttgatcctcacggcgcagaaggtaatcaccaagcagtgcattgctgatcgttacaacggacttcactgtatgtcgtcttggtggccgaagcttgactagcagtaacagctctaattgtaaatcgtgtcttctgtagccctaggactgagtgatatacatcgttattctcacgtgtaaattaaaccccatatggccatatggcttcaatatatgaaacattgtcatttagctttatttttagttgaaaacgtgactcacttttgccggaaccgtagcgttagagtgccaaacagac

SEQ ID NO: 204515 - DNA, 2022 bp, Zea Mays
ctgactccacagtccacaccaccaccacacccaggcttccacttgccgccgcgcccgcgcctccccctcattttctccccctccactgctttgcgcctacgcatcgccgccccgcctctagtcctctgtcctcctcttcctactgtaaaccacctcgtccctatccgcggcaaccgttcaccgcgccgcgaggcctgctgatccgaccgaccttccaccgtcatggctcccctgcgccgcgcgtctcgcctccttcgatcagccgtctgccggctgaggtctccagcgccggctcgggccttctccagcgccgcggcgaccgagacgggtgccgtgatcgccgccgctgccgtggcggtggccagctccgggctcgggctgtggctgaaaccgccgtcgcttgccgactccggcgaggcgcccggcgaccagatctcggtcgcctgtgccggcgccacggaggcgcgggaggagaaggggtggttcctgttcgcaggtacattttttttgtgacattgctcagcattcatgagtcaaatttcactgtggccttcaaaatgttcgacattgaccacagtgggtgagttcttatcctaccgttgctctaagtcttcagaataggttccccgaccctgctgaaacacatctgttgaccagaattttctcaacctgtacacttctatttggttttgataaacgattaaaataaatttgatgttttgagaggaaatttagttcttcaagtcctgtttgcttcagtttgaaatttcttttcctgtgtaaacatatgttgtttagtaatgctgataaaggtatgtcgttctgtactcatgcataaacaagaggacagttaatatggtcttgtttgtgttgtattgttgtttacctgtgatcattgcatgcagttaatttatctcgccaagaaaaaagacctgctcgttatgagcatgttcaatcatctgacttgtttgttgatggtaaaagaaggggtgatagacagagaagagtttaagaaaataatggcactgatgcggtcctttaacagacaagggtcgactcataaggatggtttacgtattggacttaaagttggcaagcctgtggaaaatggtggggtggtcgagtacttctttgggagtgatgggaatgaacctctacactttgacaagttttctaaaattttgaaggaattgcatgatgagattattcaactggagttcagtcattatgatgtcaaatcgtctaaaacaataccagcaaaggattttgcattgtccatggttgcttctgctgacatgaaccatatcaacaagctgcttgatagagttgatagtttggtcaaggagccagatctgaaggacatacgcatcacctttgaggagtttaaggcatttgctgatttgcgacgaagattggagccactgtcgatggctatctttgcttacggtaaattgaatgggttattgacgaaggaggatctaaaacgtgcagcgcaacatgtttgcggggtcgacttaacagatagagtagtagacatcattttccatgtgttcgacacaaatcaggatgggaacttgagcccagaagagttcttaagagcgttacaaagaagagaaactgatattcgtgaaccaacaataccaggtccattggggttcttgtcttgctggttcagtggtaggaagtgttcttcactaaaacatgtggttatctgattgagcccctatttgatcctcacggcgcagaaggtaatcaccaagcagtgcattgctgatcgttacaacggacttcactgtatgtcgtcttggtggccgaagcttgactagcagtaacagctctaattgtaaatcgtgtcttctgtagccctaggactgagtgatatacatcgttattctcacgtgtaaattaaaccccatatggccatatggcttcaatatatgaaacattgtcatttagctttatttttagttgaaaacgtgactcacttttgccggaaccgtagcgttagagtgccaaacagac

SEQ ID NO: 204516 - DNA, 2220 bp, Zea Mays
tccacactgactccacagtccacaccaccaccacacccaggcttccacttgccgccgcgcccgcgcctccccctcattttctccccctccactgctttgcgcctacgcatcgccgccccgcctctagtcctctgtcctcctcttcctactgtaaaccacctcgtccctatccgcggcaaccgttcaccgcgccgcgaggcctgctgatccgaccgaccttccaccgtcatggctcccctgcgccgcgcgtctcgcctccttcgatcagccgtctgccggctgaggtctccagcgccggctcgggccttctccagcgccgcggcgaccgagacgggtgccgtgatcgccgccgctgccgtggcggtggccagctccgggctcgggctgtggctgaaaccgccgtcgcttgccgactccggcgaggcgcccggcgaccagatctcggtcgcctgtgccggcgccacggaggcgcgggaggagaaggggtggttcctgttcgcagactcatttcgtagaagggtcttcttcaactacgagaagaggatacggcttctcagtcctcctgagaagagtccacggtagttcgtgaaggaagattaaggggggagcggagccctggagaattgcactgtgctccatcagagttctttatgcagttcgacacaaataatgatggcctcatctcctttgctgagtacattttttttgtgacattgctcagcattcatgagtcaaatttcactgtggccttcaaaatgttcgacattgaccacagtgggtgagttcttatcctaccgttgctctaagtcttcagaataggttccccgaccctgctgaaacacatctgttgaccagaattttctcaacctgtacacttctatttggttttgataaacgattaaaataaatttgatgttttgagaggaaatttagttcttcaagtcctgtttgcttcagtttgaaatttcttttcctgtgtaaacatatgttgtttagtaatgctgataaaggtatgtcgttctgtactcatgcataaacaagaggacagttaatatggtcttgtttgtgttgtattgttgtttacctgtgatcattgcatgcagttaatttatctcgccaagaaaaaagacctgctcgttatgagcatgttcaatcatctgacttgtttgttgatggtaaaagaaggggtgatagacagagaagagtttaagaaaataatggcactgatgcggtcctttaacagacaagggtcgactcataaggatggtttacgtattggacttaaagttggcaagcctgtggaaaatggtggggtggtcgagtacttctttgggagtgatgggaatgaacctctacactttgacaagttttctaaaattttgaaggaattgcatgatgagattattcaactggagttcagtcattatgatgtcaaatcgtctaaaacaataccagcaaaggattttgcattgtccatggttgcttctgctgacatgaaccatatcaacaagctgcttgatagagttgatagtttggtcaaggagccagatctgaaggacatacgcatcacctttgaggagtttaaggcatttgctgatttgcgacgaagattggagccactgtcgatggctatctttgcttacggtaaattgaatgggttattgacgaaggaggatctaaaacgtgcagcgcaacatgtttgcggggtcgacttaacagatagagtagtagacatcattttccatgtgttcgacacaaatcaggatgggaacttgagcccagaagagttcttaagagcgttacaaagaagagaaactgatattcgtgaaccaacaataccaggtccattggggttcttgtcttgctggttcagtggtaggaagtgttcttcactaaaacatgtggttatctgattgagcccctatttgatcctcacggcgcagaaggtaatcaccaagcagtgcattgctgatcgttacaacggacttcactgtatgtcgtcttggtggccgaagcttgactagcagtaacagctctaattgtaaatcgtgtcttctgtagccctaggactgagtgatatacatcgttattctcacgtgtaaattaaaccccatatggccatatggcttcaatatatgaaacattgtcatttagctttatttttagttgaaaacgtgactcacttttgccggaaccgtagcgttagagtgccaaacagac

SEQ ID NO: 204517 - DNA, 1926 bp, Zea Mays
cctcggtcggtcggtccacactgactccacagtccacaccaccaccacacccaggcttccacttgccgccgcgcccgcgcctccccctcattttctccccctccactgctttgcgcctacgcatcgccgccccgcctctagtcctctgtcctcctcttcctactgtaaaccacctcgtccctatccgcggcaaccgttcaccgcgccgcgaggcctgctgatccgaccgaccttccaccgtcatggctcccctgcgccgcgcgtctcgcctccttcgatcagccgtctgccggctgaggtctccagcgccggctcgggccttctccagcgccgcggcgaccgagacgggtgccgtgatcgccgccgctgccgtggcggtggccagctccgggctcgggctgtggctgaaaccgccgtcgcttgccgactccggcgaggcgcccggcgaccagatctcggtcgcctgtgccggcgccacggaggcgcgggaggagaaggggtggttcctgttcgcagactcatttcgtagaagggtcttcttcaactacgagaagaggatacggcttctcagtcctcctgagaagatttttgagtactttgcgtctgtgaggaatcgagaaggggaagtttacatgttgcctgctgacttgatgagagcagtagtccctgtttttcctccatcagagtccacggtagttcgtgaaggaagattaaggggggagcggagccctggagaattgcactgtgctccatcagagttctttatgcagttcgacacaaataatgatggcctcatctcctttgctgagtacattttttttgtgacattgctcagcattcatgagtcaaatttcactgtggccttcaaaatgttcgacattgaccacagtggggtgatagacagagaagagtttaagaaaataatggcactgatgcggtcctttaacagacaagggtcgactcataaggatggtttacgtattggacttaaagttggcaagcctgtggaaaatggtggggtggtcgagtacttctttgggagtgatgggaatgaacctctacactttgacaagttttctaaaattttgaaggaattgcatgatgagattattcaactggagttcagtcattatgatgtcaaatcgtctaaaacaataccagcaaaggattttgcattgtccatggttgcttctgctgacatgaaccatatcaacaagctgcttgatagagttgatagtttggtcaaggagccagatctgaaggacatacgcatcacctttgaggagtttaaggcatttgctgatttgcgacgaagattggagccactgtcgatggctatctttgcttacggtaaattgaatgggttattgacgaaggaggatctaaaacgtgcagcgcaacatgtttgcggggtcgacttaacagatagagtagtagacatcattttccatgtgttcgacacaaatcaggatgggaacttgagcccagaagagttcttaagagcgttacaaagaagagaaactgatattcgtgaaccaacaataccaggtccattggggttcttgtcttgctggttcagtggtaggaagtgttcttcactaaaacatgtggttatctgattgagcccctatttgatcctcacggcgcagaaggtaatcaccaagcagtgcattgctgatcgttacaacggacttcactgtatgtcgtcttggtggccgaagcttgactagcagtaacagctctaattgtaaatcgtgtcttctgtagccctaggactgagtgatatacatcgttattctcacgtgtaaattaaaccccatatggccatatggcttcaatatatgaaacattgtcatttagctttatttttagttgaaaacgtgactcacttttgccggaaccgtagcgttagagtgccaaacagac

SEQ ID NO: 204518 - DNA, 2009 bp, Zea Mays
cgtccctcggtcggtcggtccacactgactccacagtccacaccaccaccacacccaggcttccacttgccgccgcgcccgcgcctccccctcattttctccccctccactgctttgcgcctacgcatcgccgccccgcctctagtcctctgtcctcctcttcctactgtaaaccacctcgtccctatccgcggcaaccgttcaccgcgccgcgaggcctgctgatccgaccgaccttccaccgtcatggctcccctgcgccgcgcgtctcgcctccttcgatcagccgtctgccggctgaggtctccagcgccggctcgggccttctccagcgccgcggcgaccgagacgggtgccgtgatcgccgccgctgccgtggcggtggccagctccgggctcgggctgtggctgaaaccgccgtcgcttgccgactccggcgaggcgcccggcgaccagatctcggtcgcctgtgccggcgccacggaggcgcgggaggagaaggggtggttcctgttcgcagactcatttcgtagaagggtcttcttcaactacgagaagaggatacggcttctcagtcctcctgagaagatttttgagtactttgcgtctgtgaggaatcgagaaggggaagtttacatgttgcctgctgacttgatgagagcagtagtccctgtttttcctccatcagagtccacggtagttcgtgaaggaagattaaggggggagcggagccctggagaattgcactgtgctccatcagagttctttatgcagttcgacacaaataatgatggcctcatctcctttgctgagtacattttttttgtgacattgctcagcattcatgagtcaaatttcactgtggccttcaaaatgttcgacattgaccacattaatttatctcgccaagaaaaaagacctgctcgttatgagcatgttcaatcatctgacttgtttgttgatggtaaaagaaggggtgatagacagagaagagtttaagaaaataatggcactgatgcggtcctttaacagacaagggtcgactcataaggatggtttacgtattggacttaaagttggcaagcctgtggaaaatggtggggtggtcgagtacttctttgggagtgatgggaatgaacctctacactttgacaagttttctaaaattttgaaggaattgcatgatgagattattcaactggagttcagtcattatgatgtcaaatcgtctaaaacaataccagcaaaggattttgcattgtccatggttgcttctgctgacatgaaccatatcaacaagctgcttgatagagttgatagtttggtcaaggagccagatctgaaggacatacgcatcacctttgaggagtttaaggcatttgctgatttgcgacgaagattggagccactgtcgatggctatctttgcttacggtaaattgaatgggttattgacgaaggaggatctaaaacgtgcagcgcaacatgtttgcggggtcgacttaacagatagagtagtagacatcattttccatgtgttcgacacaaatcaggatgggaacttgagcccagaagagttcttaagagcgttacaaagaagagaaactgatattcgtgaaccaacaataccaggtccattggggttcttgtcttgctggttcagtggtaggaagtgttcttcactaaaacatgtggttatctgattgagcccctatttgatcctcacggcgcagaaggtaatcaccaagcagtgcattgctgatcgttacaacggacttcactgtatgtcgtcttggtggccgaagcttgactagcagtaacagctctaattgtaaatcgtgtcttctgtagccctaggactgagtgatatacatcgttattctcacgtgtaaattaaaccccatatggccatatggcttcaatatatgaaacattgtcatttagctttatttttagttgaaaacgtgactcacttttgccggaaccgtagcgttagagtgccaaacagac

SEQ ID NO: 204519 - DNA, 2392 bp, Zea Mays
gtcaccgtctcgcaccgacaagtcgcaaaaggcgtccccgccacagcggcgacgcgtccctcggtcggtcggtccacactgactccacagtccacaccaccaccacacccaggcttccacttgccgccgcgcccgcgcctccccctcattttctccccctccactgctttgcgcctacgcatcgccgccccgcctctagtcctctgtcctcctcttcctactgtaaaccacctcgtccctatccgcggcaaccgttcaccgcgccgcgaggcctgctgatccgaccgaccttccaccgtcatggctcccctgcgccgcgcgtctcgcctccttcgatcagccgtctgccggctgaggtctccagcgccggctcgggccttctccagcgccgcggcgaccgagacgggtgccgtgatcgccgccgctgccgtggcggtggccagctccgggctcgggctgtggctgaaaccgccgtcgcttgccgactccggcgaggcgcccggcgaccagatctcggtcgcctgtgccggcgccacggaggcgcgggaggagaaggggtggttcctgttcgcagactcatttcgtagaagggtcttcttcaactacgagaagaggatacggcttctcagtcctcctgagaagatttttgagtactttgcgtctgtgaggaatcgagaaggggaagtttacatgttgcctgctgacttgatgagagcagtagtccctgtttttcctccatcagagtccacggtagttcgtgaaggaagattaaggggggagcggagccctggagaattgcactgtgctccatcagagttctttatgcagttcgacacaaataatgatggcctcatctcctttgctgagtacattttttttgtgacattgctcagcattcatgagtcaaatttcactgtggccttcaaaatgttcgacattgaccacagtgggtgagttcttatcctaccgttgctctaagtcttcagaataggttccccgaccctgctgaaacacatctgttgaccagaattttctcaacctgtacacttctatttggttttgataaacgattaaaataaatttgatgttttgagaggaaatttagttcttcaagtcctgtttgcttcagtttgaaatttcttttcctgtgtaaacatatgttgtttagtaatgctgataaaggtatgtcgttctgtactcatgcataaacaagaggacagttaatatggtcttgtttgtgttgtattgttgtttacctgtgatcattgcatgcagttaatttatctcgccaagaaaaaagacctgctcgttatgagcatgttcaatcatctgacttgtttgttgatggtaaaagaaggggtgatagacagagaagagtttaagaaaataatggcactgatgcggtcctttaacagacaagggtcgactcataaggatggtttacgtattggacttaaagttggcaagcctgtggaaaatggtggggtggtcgagtacttctttgggagtgatgggaatgaacctctacactttgacaagttttctaaaattttgaaggaattgcatgatgagattattcaactggagttcagtcattatgatgtcaaatcgtctaaaacaataccagcaaaggattttgcattgtccatggttgcttctgctgacatgaaccatatcaacaagctgcttgatagagttgatagtttggtcaaggagccagatctgaaggacatacgcatcacctttgaggagtttaaggcatttgctgatttgcgacgaagattggagccactgtcgatggctatctttgcttacggtaaattgaatgggttattgacgaaggaggatctaaaacgtgcagcgcaacatgtttgcggggtcgacttaacagatagagtagtagacatcattttccatgtgttcgacacaaatcaggatgggaacttgagcccagaagagttcttaagagcgttacaaagaagagaaactgatattcgtgaaccaacaataccaggtccattggggttcttgtcttgctggttcagtggtaggaagtgttcttcactaaaacatgtggttatctgattgagcccctatttgatcctcacggcgcagaaggtaatcaccaagcagtgcattgctgatcgttacaacggacttcactgtatgtcgtcttggtggccgaagcttgactagcagtaacagctctaattgtaaatcgtgtcttctgtagccctaggactgagtgatatacatcgttattctcacgtgtaaattaaaccccatatggccatatggcttcaatatatgaaacattgtcatttagctttatttttagttgaaaacgtgactcacttttgccggaaccgtagcgttagagtgccaaacagac

SEQ ID NO: 204520 - DNA, 2141 bp, Zea Mays
tgaaaattctggtttaattaatgacactgggagcactacatttgtaacattgtacacgtgcaccggggcgtctggtcaccgtctcgcaccgacaagtcgcaaaaggcgtccccgccacagcggcgacgcgtccctcggtcggtcggtccacactgactccacagtccacaccaccaccacacccaggcttccacttgccgccgcgcccgcgcctccccctcattttctccccctccactgctttgcgcctacgcatcgccgccccgcctctagtcctctgtcctcctcttcctactgtaaaccacctcgtccctatccgcggcaaccgttcaccgcgccgcgaggcctgctgatccgaccgaccttccaccgtcatggctcccctgcgccgcgcgtctcgcctccttcgatcagccgtctgccggctgaggtctccagcgccggctcgggccttctccagcgccgcggcgaccgagacgggtgccgtgatcgccgccgctgccgtggcggtggccagctccgggctcgggctgtggctgaaaccgccgtcgcttgccgactccggcgaggcgcccggcgaccagatctcggtcgcctgtgccggcgccacggaggcgcgggaggagaaggggtggttcctgttcgcagactcatttcgtagaagggtcttcttcaactacgagaagaggatacggcttctcagtcctcctgagaagatttttgagtactttgcgtctgtgaggaatcgagaaggggaagtttacatgttgcctgctgacttgatgagagcagtagtccctgtttttcctccatcagagtccacggtagttcgtgaaggaagattaaggggggagcggagccctggagaattgcactgtgctccatcagagttctttatgcagttcgacacaaataatgatggcctcatctcctttgctgagtacattttttttgtgacattgctcagcattcatgagtcaaatttcactgtggccttcaaaatgttcgacattgaccacagtggttaatttatctcgccaagaaaaaagacctgctcgttatgagcatgttcaatcatctgacttgtttgttgatggtaaaagaaggggtgatagacagagaagagtttaagaaaataatggcactgatgcggtcctttaacagacaagggtcgactcataaggatggtttacgtattggacttaaagttggcaagcctgtggaaaatggtggggtggtcgagtacttctttgggagtgatgggaatgaacctctacactttgacaagttttctaaaattttgaaggaattgcatgatgagattattcaactggagttcagtcattatgatgtcaaatcgtctaaaacaataccagcaaaggattttgcattgtccatggttgcttctgctgacatgaaccatatcaacaagctgcttgatagagttgatagtttggtcaaggagccagatctgaaggacatacgcatcacctttgaggagtttaaggcatttgctgatttgcgacgaagattggagccactgtcgatggctatctttgcttacggtaaattgaatgggttattgacgaaggaggatctaaaacgtgcagcgcaacatgtttgcggggtcgacttaacagatagagtagtagacatcattttccatgtgttcgacacaaatcaggatgggaacttgagcccagaagagttcttaagagcgttacaaagaagagaaactgatattcgtgaaccaacaataccaggtccattggggttcttgtcttgctggttcagtggtaggaagtgttcttcactaaaacatgtggttatctgattgagcccctatttgatcctcacggcgcagaaggtaatcaccaagcagtgcattgctgatcgttacaacggacttcactgtatgtcgtcttggtggccgaagcttgactagcagtaacagctctaattgtaaatcgtgtcttctgtagccctaggactgagtgatatacatcgttattctcacgtgtaaattaaaccccatatggccatatggcttcaatatatgaaacattgtcatttagctttatttttagttgaaaacgtgactcacttttgccggaaccgtagcgttagagtgccaaacagac

SEQ ID NO: 204521 - DNA, 2591 bp, Zea Mays
tcgtcagcaatcctaatccaaaccgccgcggccacggccgcagccttccatagttctgtcagaaattccccttctcatccctgatccctccaactcccaccccaatacatcctgccgacgccatcagccggcgggacgcacacacgaggtcgaccttcgaaccctagtccttggccgagccgccttgcgggatcgtccccgccgcgcggcagctctgcctcgacccttttagtctccgtccgacaccgcttggatcagtgctgtgtgctgtcaggagccgtggggcggcgcgaccgcgctggctgcctggctcggaggcagcttggcagcttgcagtggccagcgcccagcggctgctcgcgcgtaggcgcaggcgcgcacggcgcagcggccagcggcggctcggacgctcggtcagcccctggggcctggctgcctgggctcggtcgctcggaggcaggcagggaggcaggcatcggctctgcctctgctggctgcggctgctcgtggcctcgcgccgtcgcgctcgcgcgcaggggtgggaaactggggccgctgctcggtcgcgcgcaaggagatggaatcaccacccctcacagctgaagcaattgcttttaccgagaaaaagatggacatgactttggaggatataatcaagatgtcaaagaaaaagaatcctggaggcaagaacccccctaggcagccgatcaaaaagcgtccattccagaatgccaacactaataaagggaatggcaaggttcaacggtttatggaatctagatcaaccattagacaaggtgttcttgcacagagaaggtcaaatcttggtggaagtcagtttgctgctacaaagcaggctgcaaagaaggctgctgctatgccaatgcgcagcggggctgtctattggaagaagcctagcagtattcatggtgtaatctatagctgctggatgagtgctatttttggacaccagtgtctgaggtttacgttagtgttatttgtcaactatggttggaaggaccgaaggagatgtgataatgactagcatctcatgccactggtgactgatcatccagatacagggatgctacatgcctgagttggaattggtttttactactggctccttggctgtgctcagtgtttgtttgaatgatgaatgcaatgtgaatctagggtagtgatgctatagcaggacaattgtatgcctccaaggagtacattttgcttctgcctcctattaaagttggctgtatccataacagcattctatcataaagttgttcactagtttccacagatattgcttgcttgcatttctactggatgagaataaatcgtgttatcttgcgatttatctgactatatgctgagctgtatggatgctttcttttcaaggtcaactgttggaatttattttcatgatttcttatgtcttgttgatcctggatcagtggtcactaattacatgacttgagtttatcagttcaatcaatcaataagtggtgttaacttgggaaatttttgaaccatgtgtgttgaaattttggtggaaataaacagtctagactctagaatgttgggggccttggaaaccaagaggatgcactagatattttcagtgactactttatcatttctgtttgattttatttcgaagcatggtatgtacttcctgactccccttgagaagtgagaattgtatccttgttttgatggggcatggtgagtttgctcagaaaacagtattgatcctggttctccattgtttatgattcatggtacttgagcactcctgctcatgtgagatactaatgtttttattttgatacagtgcaagtaccttagtgcagaggaggtcagtaggtgatgcttttcaaaataccaaggtcaaggagtcgcagaaccatgcagcaccaaggacgatggatgcactctttgcacggatgaaggcgcaacgcatgaggaccgcaccacagcagcaggcaaatcctgcctctggacgtgatttcaaccagcagcgacgtgttcagcagcagcagaggcgaggtagagcatatggtggccgtgttgtcggcaaccaatgagcatatttggtgcatcgaagccccttctcttcactggtcttaaggaccttgagggctagtttgggaactctatgtttctctattttctcaagtgaaaatgagctaatttttcttgggaaaatgaggttttcaaactagccttgaatgaaaggacgccgggggaaaatctaacttgactttctttgttggatgaaaggatgtggacagaatatgaagcgaattttgtgtgactctagttgtctgcttctgttcagcatgtacactgacctacggaaattacttgctagattttgatgtcatgtttattgagttgatttggttcgtctcttcaacagaactaggagtattcgccttttaccatatgtataaaattttaaatacctttactgtgaggtagacaagctgaatttatcatagtcctttcgttttaaaattatatctatactgtgtatagatacatagtgtatggtagaacctagctatatagaaaagtcaaaatgttct

SEQ ID NO: 204522 - DNA, 2571 bp, Zea Mays
cagacaacggaccctctctcctcgtcagcaatcctaatccaaaccgccgcggccacggccgcagccttccatagttctgtcagaaattccccttctcatccctgatccctccaactcccaccccaatacatcctgccgacgccatcagccggcgggacgcacacacgaggtcgaccttcgaaccctagtccttggccgagccgccttgcgggatcgtccccgccgcgcggcagctctgcctcgacccttttagtctccgtccgacaccgcttggatcagagatggaatcaccacccctcacagctgaagcaattgcttttaccgagaaaaagatggacatgactttggaggatataatcaagatgtcaaagaaaaagaatcctggaggcaagaacccccctaggcagccgatcaaaaagcgtccattccagaatgccaacactaataaagggaatggcaaggttcaacggtttatggaatctagatcaaccattagacaaggtgttcttgcacagagaaggtcaaatcttggtggaagtcagtttgctgctacaaagcaggctgcaaagaaggctgctgctatgccaatgcgcagcggggctgtctattggaagaagcctaggtaaacaatggttatcttattgcttatgagaaagtttactgcattcaaggagttgttaaatttattgtgtcatgcaccttgggttatattggctgagaatgattgtgatgctggtgtttgcatggaactgccttgacttctctggttatacacagttacacacatgttattaaagaacaatgaacttcatattcctgttctgcaaggcttgttttcttggttgaactgctacaaatacatggtgaatataacatatgagccttaaagcttcattgaaagttatggcatttccctttattctggttgagctggtcaaatttgtgaacctgctgggacaccctggatatgtatctgctgttggctgacatttttctatgcaattcagcagtattcatggtgtaatctatagctgctggatgagtgctatttttggacaccagtgtctgaggtttacgttagtgttatttgtcaactatggttggaaggaccgaaggagatgtgataatgactagcatctcatgccactggtgactgatcatccagatacagggatgctacatgcctgagttggaattggtttttactactggctccttggctgtgctcagtgtttgtttgaatgatgaatgcaatgtgaatctagggtagtgatgctatagcaggacaattgtatgcctccaaggagtacattttgcttctgcctcctattaaagttggctgtatccataacagcattctatcataaagttgttcactagtttccacagatattgcttgcttgcatttctactggatgagaataaatcgtgttatcttgcgatttatctgactatatgctgagctgtatggatgctttcttttcaaggtcaactgttggaatttattttcatgatttcttatgtcttgttgatcctggatcagtggtcactaattacatgacttgagtttatcagttcaatcaatcaataagtggtgttaacttgggaaatttttgaaccatgtgtgttgaaattttggtggaaataaacagtctagactctagaatgttgggggccttggaaaccaagaggatgcactagatattttcagtgactactttatcatttctgtttgattttatttcgaagcatggtatgtacttcctgactccccttgagaagtgagaattgtatccttgttttgatggggcatgtgcaagtaccttagtgcagaggaggtcagtaggtgatgcttttcaaaataccaaggtcaaggagtcgcagaaccatgcagcaccaaggacgatggatgcactctttgcacggatgaaggcgcaacgcatgaggaccgcaccacagcagcaggcaaatcctgcctctggacgtgatttcaaccagcagcgacgtgttcagcagcagcagaggcgaggtagagcatatggtggccgtgttgtcggcaaccaatgagcatatttggtgcatcgaagccccttctcttcactggtcttaaggaccttgagggctagtttgggaactctatgtttctctattttctcaagtgaaaatgagctaatttttcttgggaaaatgaggttttcaaactagccttgaatgaaaggacgccgggggaaaatctaacttgactttctttgttggatgaaaggatgtggacagaatatgaagcgaattttgtgtgactctagttgtctgcttctgttcagcatgtacactgacctacggaaattacttgctagattttgatgtcatgtttattgagttgatttggttcgtctcttcaacagaactaggagtattcgccttttaccatatgtataaaattttaaatacctttactgtgaggtagacaagctgaatttatcatagtcctttcgttttaaaattatatctatactgtgtatagatacatagtgtatggtagaacctagctatatagaaaagtcaaaatgttct

SEQ ID NO: 204523 - DNA, 1241 bp, Zea Mays
accattcgaaagatccctccaggaaagatttttcttccctcctccgacgccccagcccaccaacacactctataaagcagccctcagtcacacacagaacgcacaagcgcaagccgggcaagaaaactccgcaggccagtctgcgagttggatggccttcttcttggccctcgtgtgcatcctcatcttgctagccatcgcctcctacgtccagtacactcgctggcaaaaggggaaaggccgcttcggcggccatgggaggtctgctcccttgaagctgcctcctggctccatgggctggccttaccttggcgagaccctccagctttactcccaggaccccagcttcttcttcgcttccaaacagaagagcatcatctcgttcacgttcagggaggccgtggccgacgtggagtacaaagggttccttatccccaaggggtggaaggtgatgccgctcttcaggaacatccaccacagcccggactacttccaggatccacacaagttcgacccttctagattccaggtggcgccgcgtccgagcacgttcctgccgtttgggcacggcgtgcacgcgtgccccgggaacgagctggccaagctcgagatgctcgtcctcatccaccacctggtcaccggctacaggtgcgtccatctcctctcagatcctctccatatattcccgcttgtcctatagcttgtggaccaggatgacacatggctggctgctgccgctctccatggggctccggctctgatctctctccgtgcatgctccaaatctcctcctgtctgtggcaaatcgttggatccagtgacgaggtcgagtacagcccgttccctgtgcccaagcacggcttgcctgtcagattatggagacaaaacaatccggtcgacagaaaggggcgtgagaccgacgacgatcatgtggagaggatatttatttagtttgactcttgagttaggcatgaatttaaccccaagctagctagagaagttttttttcccctttgaaattcttctttgctcgcctcttcctcctggatcaaattgcgttggaggagaagaaacggcagctttctctctttcgttttctttgcctgcttcaccgctacgataatggtgaaaatatgtaagctacgtggacatcaatgatccacagcatcgttgatatatataatatatagagaaaattctctgcacgatcaatgcaattttatccggtatcttatttacca

SEQ ID NO: 204524 - DNA, 1745 bp, Zea Mays
accattcgaaagatccctccaggaaagatttttcttccctcctccgacgccccagcccaccaacacactctataaagcagccctcagtcacacacagaacgcacaagcgcaagccgggcaagaaaactccgcaggccagtctgcgagttggatggccttcttcttggccctcgtgtgcatcctcatcttgctagccatcgcctcctacgtccagtacactcgctggcaaaaggggaaaggccgcttcggcggccatgggaggtctgctcccttgaagctgcctcctggctccatgggctggccttaccttggcgagaccctccagctttactcccaggaccccagcttcttcttcgcttccaaacagaagaggtacggcgagatcttcaagacgcaccttctgggttgcccgtgcgtgatgctggcgagcccggaggcggcgcggttcgtgctggtgacgcaggcgcacctgttcaagccgacctacccgcggagcaaggagcgcatgatcgggccgtcggctctcttcttccaccagggcgactaccacctccgcctccgcaagctcgtccagggcgcgctcggccccgacgcgctgcgcgcgctcgttcctgaggtggaggccgccgtgcggtccactctcgcttcctgggacgccggccacgtcagaagcacgttccacgccatgaagacgctgtcgtttgatgtgggcatcgtgacgatcttcggcggccggctggacgagcggcgcaaggcggagctgaggaagaattactccgtcgtggagaaggggtacaactccttccccaacagcctgccggggacgctccattacaaggcgatgcaggtgattttggagagcttaaggatggcgagcatcatctcgttcacgttcagggaggccgtggccgacgtggagtacaaagggttccttatccccaaggggtggaaggtgatgccgctcttcaggaacatccaccacagcccggactacttccaggatccacacaagttcgacccttctagattccaggtggcgccgcgtccgagcacgttcctgccgtttgggcacggcgtgcacgcgtgccccgggaacgagctggccaagctcgagatgctcgtcctcatccaccacctggtcaccggctacaggtgcgtccatctcctctcagatcctctccatatattcccgcttgtcctatagcttgtggaccaggatgacacatggctggctgctgccgctctccatggggctccggctctgatctctctccgtgcatgctccaaatctcctcctgtctgtggcaaatcgttggatccagtgacgaggtcgagtacagcccgttccctgtgcccaagcacggcttgcctgtcagattatggagacaaaacaatccggtcgacagaaaggggcgtgagaccgacgacgatcatgtggagaggatatttatttagtttgactcttgagttaggcatgaatttaaccccaagctagctagagaagttttttttcccctttgaaattcttctttgctcgcctcttcctcctggatcaaattgcgttggaggagaagaaacggcagctttctctctttcgttttctttgcctgcttcaccgctacgataatggtgaaaatatgtaagctacgtggacatcaatgatccacagcatcgttgatatatataatatatagagaaaattctctgcacgatcaatgcaattttatccggtatcttatttacca

SEQ ID NO: 204525 - DNA, 1393 bp, Zea Mays
accattcgaaagatccctccaggaaagatttttcttccctcctccgacgccccagcccaccaacacactctataaagcagccctcagtcacacacagaacgcacaagcgcaagccgggcaagaaaactccgcaggccagtctgcgagttggatggccttcttcttggccctcgtgtgcatcctcatcttgctagccatcgcctcctacgtccagtacactcgctggcaaaaggggaaaggccgcttcggcggccatgggaggtctgctcccttgaagctgcctcctggctccatgggctggccttaccttggcgagaccctccagctttactcccaggaccccagcttcttcttcgcttccaaacagaagaggtacggcgagatcttcaagacgcaccttctgggttgcccgtgcgtgatgctggcgagcccggaggcggcgcggttcgtgctggtgacgcaggcgcacctgttcaagccgacctacccgcggagcaaggagcgcatgatcgggccgtcggctctcttcttccaccagggcgactaccacctccgcctccgcaagctcgtccagggcgcgctcggccccgacgcgctgcgcgcgctcgttcctgaggtggaggccgccgtgcggtccactctcgcttcctgggacgccggccacgatggcgagcatcatctcgttcacgttcagggaggccgtggccgacgtggagtacaaagggttccttatccccaaggggtggaaggtgatgccgctcttcaggaacatccaccacagcccggactacttccaggatccacacaagttcgacccttctagattccaggtggcgccgcgtccgagcacgttcctgccgtttgggcacggcgtgcacgcgtgccccgggaacgagctggccaagctcgagatgctcgtcctcatccaccacctggtcaccggctacaggtggcaaatcgttggatccagtgacgaggtcgagtacagcccgttccctgtgcccaagcacggcttgcctgtcagattatggagacaaaacaatccggtcgacagaaaggggcgtgagaccgacgacgatcatgtggagaggatatttatttagtttgactcttgagttaggcatgaatttaaccccaagctagctagagaagttttttttcccctttgaaattcttctttgctcgcctcttcctcctggatcaaattgcgttggaggagaagaaacggcagctttctctctttcgttttctttgcctgcttcaccgctacgataatggtgaaaatatgtaagctacgtggacatcaatgatccacagcatcgttgatatatataatatatagagaaaattctctgcacgatcaatgcaattttatccggtatcttatttacca

SEQ ID NO: 204526 - DNA, 1092 bp, Zea Mays
accattcgaaagatccctccaggaaagatttttcttccctcctccgacgccccagcccaccaacacactctataaagcagccctcagtcacacacagaacgcacaagcgcaagccgggcaagaaaactccgcaggccagtctgcgagttggatggccttcttcttggccctcgtgtgcatcctcatcttgctagccatcgcctcctacgtccagtacactcgctggcaaaaggggaaaggccgcttcggcggccatgggaggtctgctcccttgaagctgcctcctggctccatgggctggccttaccttggcgagaccctccagctttactcccaggaccccagcttcttcttcgcttccaaacagaagagcatcatctcgttcacgttcagggaggccgtggccgacgtggagtacaaagggttccttatccccaaggggtggaaggtgatgccgctcttcaggaacatccaccacagcccggactacttccaggatccacacaagttcgacccttctagattccaggtggcgccgcgtccgagcacgttcctgccgtttgggcacggcgtgcacgcgtgccccgggaacgagctggccaagctcgagatgctcgtcctcatccaccacctggtcaccggctacaggtggcaaatcgttggatccagtgacgaggtcgagtacagcccgttccctgtgcccaagcacggcttgcctgtcagattatggagacaaaacaatccggtcgacagaaaggggcgtgagaccgacgacgatcatgtggagaggatatttatttagtttgactcttgagttaggcatgaatttaaccccaagctagctagagaagttttttttcccctttgaaattcttctttgctcgcctcttcctcctggatcaaattgcgttggaggagaagaaacggcagctttctctctttcgttttctttgcctgcttcaccgctacgataatggtgaaaatatgtaagctacgtggacatcaatgatccacagcatcgttgatatatataatatatagagaaaattctctgcacgatcaatgcaattttatccggtatcttatttacca

SEQ ID NO: 204527 - DNA, 1958 bp, Zea Mays
gtcatttgttcggcctactcagcccattacacgtgagtgactactttccccatccgacctgcacataagctgccgccaccgtgtctctcctcttcatccacctcgcgcggagttccgcagcggcgcagctcaaaattcctgccctctcgccatcaaatcatgcgaaggatttgctaaacaggccatccatgttttcgtcatctgtcagtgtcaggtacttgcaaattttctagaaaccttctttagagatccgactaatccattccgtcgatcgagtcccgtccgctccatatggaagaaggcggccgccatgaccatgacgcgggcgaccgcatcagcagcctacccgacgacctcctcttctcaatcctcctccgcatcggatccattcgcgccgccgcgcgcaccagcgtgctctcccgccgctggcgccacgtctgggcccgcctgcccgagctccgcctcggcacatgcgacgagcagccgggggcgacgttcctggacttcgtcgacgccgtcctcgacgcctgctccgccccggccgtccaccgccttgaggtggccatgtactgccatggccttcgagtccatgcgtgccgcctcgtcccgtggctacgcttcgcctcgcagcgccgggtgggggatatccatatccaagtgccatcccagaagaaattcttcttgtctaagcccatcaaagaggagctcgagcttcccgtgtgcgatggagcgacgagaatcaccctctcgctcgagcgacgatggagcctccgcctctgtccggcgggctcgttcatgtcgctgaccgacctgcacataagctgcgccaccatggcaggcagcgagcttggcaaccttgtgtccgagcagtgcccgctcctgaggaatctgtaccttttcgtcaggctggctgctgcttccaacgtgtccatacactccaactcgcttcagtccctctcattcaacgtccaaaacacccagaagctagaagtcatggcccctaagcttgaagtgctggccgtatgtgatgccactaaggcacatatctctgccccaaagctctccgtggtaagttgggacaatgacactggctacaaccctctgtgccaccactttgccaatgctgcccgtcacctccgcctgctacacttgggctcaaagtgtgtatccgcttccctgatgcgtcaattcgatgaagttgatgtgctgaagctgaagctgaacctcctcaatattaagggaacagaggcatacacaaatttattgaatgaaacggctgcactacccaagtgtgaggaattaaagttacgagtgtcattaagggcttcccaacacaactttgcatcaatcatgtttcatatcttaaggagctgcaacaatacaaggaggatttcgataaagatcgattctagcatgattttcaaggctgatggcattattctcgagtcccttgaagaggtgaaaattacttttattagacattgctatggacaagtgcagttcgtggaggagtttgccaggtgccatgcaccaagcctgaaaaagttagtcgtcaactcaccaaccaaagggctacaagagatggtcggcggattgtttgatccggatgtcactgtcaaatgcaatgttatctagcgccagaggggtgtgtctttgaaaaagataaatctatatttgaaatttaccataaaccagctccaccagggaattcaggatctactagtgaactatttagatacacaatagctttaaatccataaaatataataggttttggttggaatgccttgttttgctattgaggtgaatatttgtcaccggctagttcatttttgaactacacgtcgacaaataaaaatgacaaagggagtgtatctttttttttccacatactacacgtgtgtcctgttgatatttattcgcaaaaatgtcttcttttaaaacaaatacaatatttt

SEQ ID NO: 204528 - DNA, 1381 bp, Zea Mays
cacataagctgccgccaccgtgtctctcctcttcatccacctcgcgcggagttccgcagcggcgcagctcaaaattcctgccctctcgccatcaaatcatgcgaaggatttgctaaacaggccatccatgttttcgtcatctgtcagtgtcaggtacttgcaaattttctagaaaccttctttagagatccgactaatccattccgtcgatcgagtcccgtccgctccatatggaagaaggcggccgccatgaccatgacgcgggcgaccgcatcagcagcctacccgacgacctcctcttctcaatcctcctccgcatcggatccattcgcgccgccgcgcgcaccagcgtgctctcccgccgctggcgccacgtctgggcccgcctgcccgagctccgcctcggcacatgcgacgagcagccgggggcgacgttcctggacttcgtcgacgccgtcctcgacgcctgctccgccccggccgtccaccgccttgaggtggccatgtactgccatggccttcgagtccatgcgtgccgcctcgtcccgtggctacgcttcgcctcgcagcgccgggtgggggatatccatatccaagtgccatcccagaagaaattcttcttgtctaagcccatcaaagaggagctcgagcttcccgtgtgcgatggagcgacgagaatcaccctctcgctcgagcgacgatggagcctccgcctctgtccggcgggctcgttcatgtcgctgaccgacctgcacataagctgcgccaccatggcaggcagcgagcttggcaaccttgtgtccgagcagtgcccgctcctgaggaatctgtaccttttcgtcaggctggctgctgcttccaacgtgtccatacactccaactcgcttcagtccctctcattcaacgtccaaaacacccagaagctagaagtcatggcccctaagcttgaagtgctggccgtatgtgatgccactaaggcacatatctctgccccaaagctctccgtggtaagttgggacaatgacactggctacaaccctctgtgccaccactttgccaatgctgcccgtcacctccgcctgctacacttgggctcaaagtgtgtatccgcttccctgatgcgtcaattcgatgaagttgatgtgctgaagctgaagctgaacctcctcaatattaagggaacagaggcatacacaaatttattgaatgaaacggctgcactacccaagtgtgaggaattaaagttacgagtgtcattaagggcttcccaacacaactttgcatcaatcatgtttcatatcttaaggagctgcaacaatacaaggaggatttcgataaagatcgattctagcatgttaaatttgagagacaagaaaggcat

SEQ ID NO: 204529 - DNA, 1091 bp, Zea Mays
cctctcgccatcaaatcatgcgaaggatttgctaaacaggccatccatgttttcgtcatctgtcagtgtcagaagctagaagtcatggcccctaagcttgaagtgctggccgtatgtgatgccactaaggcacatatctctgccccaaagctctccgtggtaagttgggacaatgacactggctacaaccctctgtgccaccactttgccaatgctgcccgtcacctccgcctgctacacttgggctcaaagtgtgtatccgcttccctgatgcgtcaattcgatgaagttgatgtgctgaagctgaagctgaacctcctcaatattaagggaacagaggcatacacaaatttattgaatgaaacggctgcactacccaagtgtgaggaattaaagttacgagtgtcattaagggcttcccaacacaactttgcatcaatcatgtttcatatcttaaggagctgcaacaatacaaggaggatttcgataaagatcgattctagcatggtgtatctttgcccatcctcttgcttttgtctcgggccgcagattttcaaggctgatggcattattctcgagtcccttgaagaggtgaaaattacttttattagacattgctatggacaagtgcagttcgtggaggagtttgccaggtgccatgcaccaagcctgaaaaagttagtcgtcaactcaccaaccaaagggctacaagagatggtcggcggattgtttgatccggatgtcactgtcaaatgcaatgttatctagcgccagaggggtgtgtctttgaaaaagataaatctatatttgaaatttaccataaaccagctccaccagggaattcaggatctactagtgaactatttagatacacaatagctttaaatccataaaatataataggttttggttggaatgccttgttttgctattgaggtgaatatttgtcaccggctagttcatttttgaactacacgtcgacaaataaaaatgacaaagggagtgtatctttttttttccacatactacacgtgtgtcctgttgatatttattcgcaaaaatgtcttcttttaaaacaaatacaatatttt

SEQ ID NO: 204530 - DNA, 1284 bp, Zea Mays
aagtttgaaaatagggctaaattcgtaattatgaataaagagtaattgcggtcgtggttccggattccccgccgccgccgcaagaccggagccctaattccaagcggtaaacgatgaggccgcacgcggtgggtatgggtggcggtggcgtggggaggcggaaggcgggggccgccgccgccgcggctagccgggagtggttggtggtgccggcgtcgggcccggcgcgggtggaggaagcagggaagcacgcggtgatggcgcgtacggggcttcccgcgcgcgatctcagggtgctcgacccgttactctcgtacccgtccacgatcctgggccgcgagcgcgccatcgtggtcaacttggagcgcgtcaaagctctgatcacagccgcggaggtgctgcttcctaacaccaaggatcccgccttcgcgcgcttcgttcgcgacctccagacccgcgtcctcgcatcttcgtctgaccaggcagctgaactcactgacatggaaggtgaatcacctattgttgcttcaccatttcctgtaccaagttcatccaaagggcatgaaatggagatgactaagaagactgctgctgttgtgcctgaaatgactagcagcagcagtatgcccaatttagctgttgcaaaagatggaaataccaaggttttgcctttcgaatttcgagctcttgaagtgtgccttgaatcagcctgcagatctttggaagaggaagtatgtgcttgcatctggaattgtttgtctggttatatgttgtttatctggccgcaattgaattcatacctctaacatcagacttctactctggagctagaggcatatccagcattagatgagctgacatcaaagatcagcacattaaaccttgaacgagttaggcaaatcaagagtcgtctggttgcgatatctggtcgagtacagaaggtgagggatgagcttgagcatttactggatgatgaaatggatatggctgaaatgtacttgacagagaagcttactcaacaagaaatcagtgaggcttcatctagagctgaggttgatgatgcatctcttacagaagacgatagggatgaagattatagaagtgaaccagatggaagcaatggtagtgttataggttataagcccaatattgaagagctagagatgcttctagaggcttactttgtgcaaattgatggcacacttaacaagctatcacattgacacaaggacactagtgtggggagctgagcttcacattcataagatgtcttattcgcatgtt

SEQ ID NO: 204531 - DNA, 1026 bp, Zea Mays
atgaaaaggcttaggagagagggagaggtatgagaacatggacatcgctttacattatggtgctatgttgagggaatgtattcgccaccaaagcattgcaaggtatgttttagagtctgaacacatgaagaagttctttgactatatacagcttccaaattttgacatagcttctgatgcttcggctacctttaaggaactgttgacaaggcataaagcaaccgtggctgaatttctctccaacaattatgattggttctttgaagaatttaactctaggttgctgtcatcaaccaactacataacaaaaaggcaagctatcaagttgttgggagatatgctgctggatagatcaaatgctgcagtcatgatgcgctatgttagctccaaagacaaccttatgattttgatgaatctcttaagggattcgagtaaaaatattcaaattgaagcatttcacgtgttcaagctgtttgctgcgaataaaaacaaaccgcctgaggtcgtgaacatactggtcaccaatagaagcaagctacttcggttttttgctggattcaagattgacaaagaggatgaacagtttgaagcagacaaggagcaagtcataaaagaaatatcggcactttgagtatgcttgaggaaagcggagctgacaggacggtcccacggtgcagcgagagggagtgagcgcacggagggagccccatcacgttgatgagacggacccgcaaggaagagagggaaagggggcgcggacgagggcaactggtatcgacagagcggctccactgggtagagagagggagggagcacgcggcctggctgggccgagctagaccggtttgggctgaaatggttttctctttttccaggaaatttctcattgcttttctttttattttctctaggattttcaattcaaatttaaaccaagtttcaaattcaaacaaattcaaacatatgcaacaatttaaagaatgtttaagctcagcatgatgcaacatttcatgactcataatgttt

SEQ ID NO: 204532 - DNA, 2869 bp, Zea Mays
cttcccatatcccaccaccacctcctctctcactacctatctgccatcccgagtgattgtctgtgcgaccaagacatggcttctgacggcggcggcagctcccctcctccccacacgccgctccggcggtcgccgtcgccgtggttccgctagtccttatgcttcgtccccttctctcggggggttcgagacgccgccgcaccctggccgccgcacgccgtccggagctggggctggcgcccctcggcagccgcgtcagaactcgactggccggttcccgccgacgccctccactccaatgtccaccgatgacgtccctccatcctccgaagctggggacgacgagaccgacggcggcggcggcgtcgacgccaccccggtcttcgtctggggcaccaacataagcgtgcaggacgtcaacgccgccattctccggttcttgcgccacttccgggacccgcgcgacgctggccgcgtcgacccggtcatggacgagggcaagtacatgcgcgccatccaccgcatcctcgagctcgagggcggggagtcgctcgacgtcgatgcgcacgacgtgtttgaccacgacccagacctctacagcaagatggttcgctatccgctcgaggtgctcgccatcttcgacatcgtgctcatggacctcgtcgcgcgcatcgagccgctcttcgagaagcacatccagaccaggatctacaacctcaagtcgtccatttgcttgaggaatctcaacccatctgatattgagaagatggtatccatcaagggtatgataattagatgcagctcggtcataccggagctcaaggaggctgtgttccgctgcctggtttgtggtttctactcagagcccgtcatggttgatagaggaagagtaactgaaccacacatttgtcagaaagaacaatgtaaagccacaaattctatgaccctagtgcacaacagatgcagattttcagacaagcagatcataaagttgcaggaaacaccagacgagataccagaaggtggcactccacatacagttagtgtcttgatgcatgataagcttgttgatgctggaaagcctggagatagggttgagataactggaatatacagagctatgagtattcgaattggaccaactcaaaggacagtgaagtctatattcaagacatatattgattgccttcacataaagaagacagacaagtctaggcttcatgtggaggacaccatggatattgataattctaacgctagcaaatctactgaagaggattttcttagtgataaggttgagaaactaaaagagctttcgaagttgcctgatatctatgaaagattgactagatcattagctccaaacatatgggagttggatgatgtcaaaagaggtctcctttgccagcttttcggcggcaatcccttgaagcttccttctggagctagtttccggggtgacatcaatattttacttgtgggggaccctggaacaagtaaatcccagcttctccagtacatgcataaactgtctcctcgtggtatctatacgagtggtagaggaagttctgctgttggtcttactgcttatgttaccaaagaccctgagactggcgaaactgttctagaaagtggagcacttgttttgagtgacaaaggtgtttgttgcatagatgagtttgataagatgtctgataatgcccgaagcatgttacacgaggtgatggaacagcagacagtatccattgcgaaggctggaataattgcatctttaaacgctaggacatctgtcctggcatgtgccaatcctactgaatcacgttacaatccaaggctctctgtaattgacaacatccacttagcgccaacgctactttcaagattcgacctgatttatcttatcttggacaaggcggatgagcaaactgataggcgcctggcaaagcatattgtttcgttgcattttgagaatccaaatttagaggagctcgaggtcttggacttgcagacactagtttcctacataagctatgcaaggaagtatattcagccacagttatctgatgaagctgcagaagagttaactcgtggctatgtcgagatgagaaaaagagggaatagccctgggagcagaaagaaggtcataacagcaaccgctagacaaatagagagtttgatccgtctcagcgaagcattagcccgaatgcggttctctgaagtggtcgaggtgcgggatgttgtggaggcattcaggcttcttgaagtcgccatgcagcagtctgcgacggatcatgcaactggtacgattgatatggatctgatcatgacggggatatccgcaagcgaaaggcagaggcgggagaacctcgttgccgcaacccgtaacctgattgcggagaaaatgcagcttggaggcccctcgatgcgcatgattgagttgctggaggaactgaggaagcagagctcaatggaaattcatatgcacgaactccgcggtgctcttggcaccctgatgactgaaggcgcggtggttatccatggagacaacgtgaggagagtttgatgtcttgacggccatctgcggtgatgcttctataaggctccaacccgccacttccttgaacagacaaggttccgaagataactgtagcacttagccgtaacttgtggtccgaggtctaaactggtccagatttgtagcagtattgctagttgtagatttttttttaaaaaattgttatcagaattttgttctcttgctattgtccgagtttactgcaacaaggcaactatcatctcgttctctgatcagtatcatgctgggttctatcatctatatgtgcgaacaccggcagcgctgacgcaaggc

SEQ ID NO: 204533 - DNA, 2983 bp, Zea Mays
ccgccattttactctccccttccccatccccatccccatccccatcccacccttcccatatcccaccaccacctcctctctcactacctatctgccatcccgagtgattgtctgtgcgaccaagacatggcttctgacggcggcggcagctcccctcctcccgcatcgtcgccctatggtcggccgtcaagcccactcgcggttactaactcctccccatctcagcccacacgccgctccggcggtcgccgtcgccgtggttccgctagtccttatgcttcgtccccttctctcggggggttcgagacgccgccgcaccctggccgccgcacgccgtccggagctggggctggcgcccctcggcagccgcgtcagaactcgactggccggttcccgccgacgccctccactccaatgtccaccgatgacgtccctccatcctccgaagctggggacgacgagaccgacggcggcggcggcgtcgacgccaccccggtcttcgtctggggcaccaacataagcgtgcaggacgtcaacgccgccattctccggttcttgcgccacttccgggacccgcgcgacgctggccgcgtcgacccggtcatggacgagggcaagtacatgcgcgccatccaccgcatcctcgagctcgagggcggggagtcgctcgacgtcgatgcgcacgacgtgtttgaccacgacccagacctctacagcaagatggttcgctatccgctcgaggtgctcgccatcttcgacatcgtgctcatggacctcgtcgcgcgcatcgagccgctcttcgagaagcacatccagaccaggatctacaacctcaagtcgtccatttgcttgaggaatctcaacccatctgatattgagaagatggtatccatcaagggtatgataattagatgcagctcggtcataccggagctcaaggaggctgtgttccgctgcctggtttgtggtttctactcagagcccgtcatggttgatagaggaagagtaactgaaccacacatttgtcagaaagaacaatgtaaagccacaaattctatgaccctagtgcacaacagatgcagattttcagacaagcagatcataaagttgcaggaaacaccagacgagataccagaaggtggcactccacatacagttagtgtcttgatgcatgataagcttgttgatgctggaaagcctggagatagggttgagataactggaatatacagagctatgagtattcgaattggaccaactcaaaggacagtgaagtctatattcaagacatatattgattgccttcacataaagaagacagacaagtctaggcttcatgtggaggacaccatggatattgataattctaacgctagcaaatctactgaagaggattttcttagtgataaggttgagaaactaaaagagctttcgaagttgcctgatatctatgaaagattgactagatcattagctccaaacatatgggagttggatgatgtcaaaagaggtctcctttgccagcttttcggcggcaatcccttgaagcttccttctggagctagtttccggggtgacatcaatattttacttgtgggggaccctggaacaagtaaatcccagcttctccagtacatgcataaactgtctcctcgtggtatctatacgagtggtagaggaagttctgctgttggtcttactgcttatgttaccaaagaccctgagactggcgaaactgttctagaaagtggagcacttgttttgagtgacaaaggtgtttgttgcatagatgagtttgataagatgtctgataatgcccgaagcatgttacacgaggtgatggaacagcagacagtatccattgcgaaggctggaataattgcatctttaaacgctaggacatctgtcctggcatgtgccaatcctactgaatcacgttacaatccaaggctctctgtaattgacaacatccacttagcgccaacgctactttcaagattcgacctgatttatcttatcttggacaaggcggatgagcaaactgataggcgcctggcaaagcatattgtttcgttgcattttgagaatccaaatttagaggagctcgaggtcttggacttgcagacactagtttcctacataagctatgcaaggaagtatattcagccacagttatctgatgaagctgcagaagagttaactcgtggctatgtcgagatgagaaaaagagggaatagccctgggagcagaaagaaggtcataacagcaaccgctagacaaatagagagtttgatccgtctcagcgaagcattagcccgaatgcggttctctgaaggtcgaggtgcgggatgttgtggaggcattcaggcttcttgaagtcgccatgcagcagtctgcgacggatcatgcaactggtacgattgatatggatctgatcatgacggggatatccgcaagcgaaaggcagaggcgggagaacctcgttgccgcaacccgtaacctgattgcggagaaaatgcagcttggaggcccctcgatgcgcatgattgagttgctggaggaactgaggaagcagagctcaatggaaattcatatgcacgaactccgcggtgctcttggcaccctgatgactgaaggcgcggtggttatccatggagacaacgtgaggagagtttgatgtcttgacggccatctgcggtgatgcttctataaggctccaacccgccacttccttgaacagacaaggttccgaagataactgtagcacttagccgtaacttgtggtccgaggtctaaactggtccagatttgtagcagtattgctagttgtagatttttttttaaaaaattgttatcagaattttgttctcttgctattgtccgagtttactgcaacaaggcaactatcatctcgttctctgatcagtatcatgctgggttctatcatctatatgtgcgaacaccggcagcgctgacgcaaggc

SEQ ID NO: 204534 - DNA, 1914 bp, Zea Mays
gaagataacctacagagacagacaggtggacccagaccacgttctccccctccaaaccggggtggccaactggctaatataactgaccgccccgcacgacgccctccgtcccacccgcttcggcctctccctcctcctcgctcgctcgatcgctcccacgtcctcgcctccctccacaaaccaccaccaccatccaggatcgcagcgcggcgcgcgagagaggggtgagcaggtcgggcaagatgagggagatcctgcacatccagggcggccagtgcggcaaccagatcggcgccaagttctgggaggtgatctgcggcgagcactgcgtcgactccacgggccgctactcggggacctcctcgcagcagctcgagctcgagcggatcaacgtctactacaacgaggctgggggtggccgctatgtgccccgcgccgtgctcatggacctggagcccggcaccatggaatccatccgcgccggccccttcggcggcatcttccgccccgacaactttgtctacggccagtccggcgccgggaacaactgggccaagggccactacaccgagggcgccgagctcatcgactccgtccttgacgtcgtgcgcaaggaggccgagaactgcgactgcctccaagggttccaagtatgccactccctgggtggcggcactggttctggcatgggcacgctgctcatttccaagatccgggaggagtacccggaccgcatgatgctcaccttctccgtgttcccgtcgcccaaggtgtccgacaccgtcgtggagccctacaacgccacgctgtccgtgcaccagctcgtggagaacgccgacgagtgcatggtccttgacaacgaggcgctctatgatatttgcttccgcaccctcaagctcaccaacccttcatttggtgacctgaaccatctgatctcggcgacgatgagcggcgtgacatgctgcctgcggttcccgggccagctgaactcggacctccgcaagctggcggtgaacctgatcccgttcccgcggctgcacttcttcatggtggggttcgccccgctgacgtcccgcggctcgcagcagtaccgcgcgctgacggtgccggagctgacgcagcagatgtgggatgccaagaacatgatgtgcgcggcggacccgcgccacgggcggtacctgacagcgtccgccatgttccggggcaagatgagcaccaaggaggtggacgagcagatgatcaacgtgcagaacaagaactcctcctacttcgtggagtggatccccaacaacgtcaagtccagcgtgtgcgacatcccgcccgtcgggctgcccatggcctccaccttcgtgggcaactccacctccatccaggagatgttccgccgcgtgagcgagcagttcacggccatgttccggcgcaaggctttcttgcactggtacaccagcgagggcatggacgagatggagttcacagaggccgagagcaacatgaacgacctcgttgccgagtaccagcagtaccaggacgccaccgccgaggagtacgaagaggaagagcacgacggcgaggaggagcacgcctgatctggacgccaactcatcggtgcaaagcgtttcagtttcatcgctcctatggtacacaaatcgcgactacgtattcctacaatcctactaccttaagtatgtatattcatgtactgccgtatttgccttactgcttttattagcttgtgtgtgtatctacagtcgtgtgtgttagtgttttctgaaattgtgatatattgccaccgctgtccagattctgtgggtatgtttattcatataattggaatgctctctgttcttgtacgtatcccctccattgttttttgaacaaactgacaatctaataaattagccaatatccatcatt

SEQ ID NO: 204535 - DNA, 1883 bp, Zea Mays
catgcatatgcatgctttgaacataacacgaccatgggcggcgagcgcacggtgaagcggctgcggctgtcccgggcgctgacggtccccgagagcaccaccgtgctggaggtgtgccgccggatggccgcgcggagggccgacgccgcgctgctcacggactcgaacgcgctgctctgcggcatcctcaccgacaaggacatcgctacgagggtgatcgcgcgcgagctcaagatcgacgagacgccggtgtggaaggtgatgacgaggcaccccatcttcgtcctctcggatacgctcgccgtcgaggcgctgcagaagatggttcaaggcaagttcaggcacctgccggtggtggataacggcgaggtggtggccatgctggacatcgccaagtgcctctacgacgccatctcccggatggagagggcgtccgagaaggggaaggcggcgatcgccaacgtcgcggctggcgacgacaagtactccatcgtcgaagctctcaaggagcaaatgttcaggccctgcttgtctgccattattggcgaagactcaacagtcgtcatggtgtcgcctggtgattccgtccttgcagctaccaagaggatggtggaagcgcatgcgacctcagccgtagtggccgtggggagcaagccgcaaggcatcctgacttcaagggatatcttgatgcgcctggtcgctaagaacctgtcagcggacgcgactccggtagagaaggtcatgacccctgaccctgaatttgccacggtcgacatgcctatactggacgccctacggaccatgcaggagcgcaagttcttgcatcttccagtgatggacagagacggctcaatcatttcaatcatcgacgtcattgacatcgcacatgccgcgatctccatttgcgtttgcgcgcaacgtgcatgcgatggcacactgcaggtggagagcagtggcggcggcggcgacggcagcgcggggagcgacgaggcggcatcgtccatgttccagaggttctgggactccgccatggccttgggccccctggacgacgagacggacacccagtcccagatgagcgaggcgtcgaggtcgcagatgatgatgtccgatgtccaccaccaccaccaccaccacgactccgcgggcggcggcagcgaggcggggttctcgctgtcgtccttctccttcaagctccaggacaggcgagggcggatgcaccgcttcagctgtgaggttcagagcttgacgcctctggtgacctgcatcctgcggaggctcggcgccgacatcgaccctgaccgcctaccgcaaatcctgtacgaagacgaggaccgggacaaggtggtgctcgcgtcggacgacgacctcgcggcggcggtggaacacgccaggctcgccggatggaagggtctgaagctgttcctggactactccggcaccaccgggcgcaggaaagcggtggccaccccacgtggcgccatggcggtgggcatgtccagccgggacgcgtgggcggcggcgtacagcggggtcgccgccggggctgccctcgtcactggcatcggcgtcatggcgtacctgcgaagatctgcctagctagtgtggtggcgcggcggcgcggcgcgcatattcgccaatgcaagagcaaggggttcctgtcctgccttcgaatcaccacagaggtgctagtatgtgtggattacgtacccaaccggtgtatgtgtgtattcttttctacacgaacatgtaccagggcacaagttttccattaagaagaaatgggtggaccaaacaaatccttcagaccgaagcgagctaggtcgaggaaacccggcgttcggcattgatagcgattatataccgatattgtttgattcgtg

SEQ ID NO: 204536 - DNA, 1600 bp, Zea Mays
gcgcacacttcggcagttgagagaacaaacgaactggtgggtgggttggggggtcgtcgccgccggccggtggagttgctcgctcctgcctcttggatctgccgcccggtggtggctcgccgccaaggatggcgcgggcggagaagatacgctccggtagcacggcgttggcgacggcttcgacggagacgccaggcaggtcgacggaccaccggagggcgctctacttcgccgccttcctggtgctggccgacgccgcgctcgtcgccctcatcgtcgccttcgtcccgtataccaagatcgactgggacgcctacatgtcccaggtggacgcttttctggagggggagagggactacaccaagatcgagggagacacagggccattggtctacccggccggattcctctacgtctactccgccgttaagttccttacgggaggccgcgtcttccctgctcagattttgtttggcgtcttgtacattgtcaacttgagcctcactcttctgctttacgtcaagactgaagtgtggagctgtctcaattaagatgaatgtccttctttttgctccttctttgcttctacttatggtcaaggccatgagcatcaaaggagtcttctttgccttattgggagctgctgtcgtacaggttttgttgggtatgccattcttgctgtcacatccagttgagtacatctcaagagcattcaatctcggtcgcgtgtttatccatttctggtctgtgaactttaaattcgtcccagagaaggtgtttgtatcgaaagagcttgccattgcattgttgattcttcacctcaccacacttatgatatttgctcactacaagtggttaaagcatgaaggaggcctattcggtttcctgcattccagatttaaaaatgctaaatcaatcaagcagcttgtttccagccagcccagaccatccagtctcagcgcagaacatattgtaactgttatgtttgttggcaacttcattggcgttgtgtgtgcccgatcattgcactaccaattctattcctggtacttctattccttgccttttctattgtggaaaacacgttaccagacacctttgaggattattctatttctcgttgtggagtgctgctggaatgtttacccttccactgcctattcatcactccttttgctatttgtgcacttgtgcattttgtttggtatatggttttcacctgctgaatacccctatatcatcagtaaagggacaaaacggacataccaagaagttgcaaagctagacttccctgcaaaatagtgtaatctttgaaggtagcagtgaggatacaagtgtcaaaggcttctggaaattgtgaggtactttggtatgccaatactcttgggactagttggcccaaatttctcgagtagcatctagacatataccaaatatgtatgtccatgtgtaacttcttaacatagatgatagcgactctaactataagagtaactatggctgcggacttccccaggatcttgttttatcatcctttagacatgtctcagcagtcagcagccaaaagagatccatgcctcaccttataaggccttgtttg

SEQ ID NO: 204537 - DNA, 1705 bp, Zea Mays
gcgcacacttcggcagttgagagaacaaacgaactggtgggtgggttggggggtcgtcgccgccggccggtggagttgctcgctcctgcctcttggatctgccgcccggtggtggctcgccgccaaggatggcgcgggcggagaagatacgctccggtagcacggcgttggcgacggcttcgacggagacgccaggcaggtcgacggaccaccggagggcgctctacttcgccgccttcctggtgctggccgacgccgcgctcgtcgccctcatcgtcgccttcgtcccgtataccaagatcgactgggacgcctacatgtcccaggtggacgcttttctggagggggagagggactacaccaagatcgagggagacacagggccattggtctacccggccggattcctctacgtctactccgccgttaagttccttacgggaggccgcgtcttccctgctcagattttgtttggcgtcttgtacattgtcaacttgagcctcactcttctgctttacgtcaagactgaagtgcttccatggtgggctttaggtttgctttgtttgtccaagagggttcactccatctttgttctccgtcttttcaatgactgcttcgccatgacattgctccacgctgctatggttttgatcatttatcgcaagtggtaccttggtctagtagttttcagtggagctgtctcaattaagatgaatgtccttctttttgctccttctttgcttctacttatggtcaaggccatgagcatcaaaggagtcttctttgccttattgggagctgctgtcgtacaggttttgttgggtatgccattcttgctgtcacatccagtctgtgaactttaaattcgtcccagagaaggtgtttgtatcgaaagagcttgccattgcattgttgattcttcacctcaccacacttatgatatttgctcactacaagtggttaaagcatgaaggaggcctattcggtttcctgcattccagatttaaaaatgctaaatcaatcaagcagcttgtttccagccagcccagaccatccagtctcagcgcagaacatattgtaactgttatgtttgttggcaacttcattggcgttgtgtgtgcccgatcattgcactaccaattctattcctggtacttctattccttgccttttctattgtggaaaacacgttaccagacacctttgaggattattctatttctcgttgtggagtgctgctggaatgtttacccttccactgcctattcatcactccttttgctatttgtgcacttgtgcattttgtttggtatatggttttcacctgctgaatacccctatatcatcagtaaagggacaaaacggacataccaagaagttgcaaagctagacttccctgcaaaatagtgtaatctttgaaggtagcagtgaggatacaagtgtcaaaggcttctggaaattgtgaggtactttggtatgccaatactcttgggactagttggcccaaatttctcgagtagcatctagacatataccaaatatgtatgtccatgtgtaacttcttaacatagatgatagcgactctaactataagagtaactatggctgcggacttccccaggatcttgttttatcatcctttagacatgtctcagcagtcagcagccaaaagagatccatgcctcaccttataaggccttgtttg

SEQ ID NO: 204538 - DNA, 1739 bp, Zea Mays
gcgcacacttcggcagttgagagaacaaacgaactggtgggtgggttggggggtcgtcgccgccggccggtggagttgctcgctcctgcctcttggatctgccgcccggtggtggctcgccgccaaggatggcgcgggcggagaagatacgctccggtagcacggcgttggcgacggcttcgacggagacgccaggcaggtcgacggaccaccggagggcgctctacttcgccgccttcctggtgctggccgacgccgcgctcgtcgccctcatcgtcgccttcgtcccgtataccaagatcgactgggacgcctacatgtcccaggtggacgcttttctggagggggagagggactacaccaagatcgagggagacacagggccattggtctacccggccggattcctctacgtctactccgccgttaagttccttacgggaggccgcgtcttccctgctcagattttgtttggcgtcttgtacattgtcaacttgagcctcactcttctgctttacgtcaagactgaagtggtttgctttgtttgtccaagagggttcactccatctttgttctccgtcttttcaatgactgcttcgccatgacattgctccacgctgctatggttttgatcatttatcgcaagtggtaccttggtctagtagttttcagtggagctgtctcaattaagatgaatgtccttctttttgctccttctttgcttctacttatggtcaaggccatgagcatcaaaggagtcttctttgccttattgggagctgctgtcgtacaggttttgttgggtatgccattcttgctgtcacatccagttgagtacatctcaagagcattcaatctcggtcgcgtgtttatccatttctggtctgtgaactttaaattcgtcccagagaaggtgtttgtatcgaaagagcttgccattgcattgttgattcttcacctcaccacacttatgatatttgctcactacaagtggttaaagcatgaaggaggcctattcggtttcctgcattccagatttaaaaatgctaaatcaatcaagcagcttgtttccagccagcccagaccatccagtctcagcgcagaacatattgtaactgttatgtttgttggcaacttcattggcgttgtgtgtgcccgatcattgcactaccaattctattcctggtacttctattccttgccttttctattgtggaaaacacgttaccagacacctttgaggattattctatttctcgttgtggagtgctgctggaatgtttacccttccactgcctattcatcactccttttgctatttgtgcacttgtgcattttgtttggtatatggttttcacctgctgaatacccctatatcatcagtaaagggacaaaacggacataccaagaagttgcaaagctagacttccctgcaaaatagtgtaatctttgaaggtagcagtgaggatacaagtgtcaaaggcttctggaaattgtgaggtactttggtatgccaatactcttgggactagttggcccaaatttctcgagtagcatctagacatataccaaatatgtatgtccatgtgtaacttcttaacatagatgatagcgactctaactataagagtaactatggctgcggacttccccaggatcttgttttatcatcctttagacatgtctcagcagtcagcagccaaaagagatccatgcctcaccttataaggccttgtttg

SEQ ID NO: 204539 - DNA, 1539 bp, Zea Mays
gcgcacacttcggcagttgagagaacaaacgaactggtgggtgggttggggggtcgtcgccgccggccggtggagttgctcgctcctgcctcttggatctgccgcccggtggtggctcgccgccaaggatggcgcgggcggagaagatacgctccggtagcacggcgttggcgacggcttcgacggagacgccaggcaggtcgacggaccaccggagggcgctctacttcgccgccttcctggtgctggccgacgccgcgctcgtcgccctcatcgtcgccttcgtcccgtataccaagatcgactgggacgcctacatgtcccaggtggacgcttttctggagggggagagggactacaccaagatcgagggagacacagggccattggtctacccggccggattcctctacgtctactccgccgttaagttccttacgggaggccgcgtcttccctgctcagattttgtttggcgtcttgtacattgtcaacttgagcctcactcttctgctttacgtcaagactgaagtgcttccatggtgggctttaggtttgctttgtttgtccaagagggttcactccatctttgttctccgtcttttcaatgactgcttcgccatgacattgctccacgctgctatggttttgatcatttatcgcaagtggtaccttggtctagtagttttcagtggagctgtctcaattaagatgaatgtccttctttttgctccttctttgcttctacttatggtcaaggccatgagcatcaaaggagtcttctttgccttattgggagctgctgtcgtacaggttttgttgggtatgccattcttgctgtcacatccagttgagtacatctcaagagcattcaatctcggtcgcgtgtttatccatttctggtctgtgaactttaaattcgtcccagagaaggtgtttgtatcgaaagagcttgccattgcattgttgattcttcacctcaccacacttatgatatttgctcactacaagtggttaaagcatgaaggaggcctattcggtttcctgcattccagatttaaaaatgctaaatcaatcaagcagcttgtttccagccagcccagaccatccagtctcagcgcagaacatattgtaactgttatgtttgttggcaacttcattggcgttgtgtgtgcccgatcattgcactaccaattctattcctggtacttctattccttgccttttctattgtggaaaacacgttaccagacacctttgaggattattctatttctcgttgtggagtgctgctggaatgtttacccttccactgcctattcatcactccttttgctatttgtgcacttgtgcattttgtttggtatatggttttcacctgctgaatacccctatatcatcagtaaagggacaaaacggacataccaagaagttgcaaagctagacttccctgcaaaatagtgtaatctttgaaggtagcagtgaggatacaagtgtcaaaggcttctggaaattgtgagtgaggtcacgagaacctgaa

SEQ ID NO: 204540 - DNA, 2632 bp, Zea Mays
ctggaggtgaaaggcggctgctttcgctgtctccccaccacccgcgcacagtggcggcgctgacggtggcaggaaaggaaagtggcgatcacaccaaactcacatacagatggagatggcagagaccttgcatgtattgcccgatgatggcaatggaagtgctgcagttcagactgagccttattgccatgaagacgccattgaggacatggaatctttcttggatgaagtaaacgacagggttcatgtttcaggaattgtgactggtgctatcatcaaggggatcctaagtgatgtgcggcaagaagctgctagccaaattgctctcaaggatgcagagatatcatcactgaaccagaagctgcagcagccagtaaatggcagcttgagtttatctgagggacgggataaaagacatgatgagttttatagtctccgccagcagcttgactccatttccaagtcactgttgaattctgaatgggggctatcgggatcacagcataactttgaagattcagaaaatgccagcaagcagcaggacaaagaaaattcctctagaaatggtgtagcaaagaccattcatcctggagactctaaagaagaagtttttggtgatccgaaactcttggatcacatggataaggttgctttgatagcccatttcaataaatcaatgaatgagatgaaaaggcagcatgattcagttctgtaccagaggacggaagagatattcaaactgaagcgtgaaatcctgaagaaggatggatcaaacccttttcatttacgaaataacaaagaacttgagcaaacaaggaagaaaattgaggaagtcatctcaaagttggatgtgctcctcctggagaataaaagagcctctgtccgtatcaagtcaaatgcaattcctggtcaacaagataagaacaatgtattaggttctgaaatcgagcaactagaaagcggtgcaagtaataatgaagactaccattgctctattccaactcactcatcacattttgcatccagagaggcagatcatgaactgaatattgtaaggcctcaatttgacgttgaagatgccagaattgcagccacctttagagaagaaatagaaaggattatcataaaagagttcattagtgaaataaacatagaattgcatggttatgagattgagggtggtatgaagcaggaagtttgctcaataattcacaatgaggctattgctagagcaatgtcaaacattgattctttgttgttgaagtacgaggagaaaaagggtcatgctgaagaggaatctctacataagcaaaagattgaaaaactgaaactaattgtggattccttcactgaagtattgagtgaaaaggagaaatttgtatcacagattggattggaagcgatgcagactcgcgtggagtcaatgtgttgtgaacttgatttgttaagggacaaagtggcaaagcaagattcctacctatctgaaaagaacagggaatttgatgccattatgtgcaggttggagcaagctcagcagcatgttcaacacaatgatgttaccttggttgagctgaatgatagacttagaaccatttcaaactctctaaaagacctagagaaacagaatcaagctctacattatgccatggaagaaaaagagaagatgctaacatctgctgtttccaaagacaatgatatgagagaattcatggaaaatcttgttaaatctatcaaagattttgaaattgtcatgatgaatcagcaggctgttgttgcaaataaagtcgatcatcatgaatcaaggttctgtttattaaaagaacaatgtaaacaccttgcaaaagaaggcaatcttttaagaaagaaggccttacgatacaaagagatatctgagacaagagactctaatcttcagaaagctgaacttgaggtggatttgcttggtgatgaggttgaggccttaacggatcttcttgcaaaaatctatactgcacttgatcactattctccagtactgcaacactacaccggcgttatggagaccttgagcatgattaagaagcacattagcatggcgaagtaaaatgcttctggtcggcttgacactgtagaattgtaggtttgacagcaggcttccagtggtttgacataagtttgtagaattgtagatggcagcaagcttttgtttccgactcaaggactaggtgattacccccttttgcaggcagagtagtggtcttggtagcttttgagcactctgtaaatgacccaacccaaccgtagctattagttcttgtgcttggcttttgatgctatggcctatgggctttgccacctgctatgctgggttgcaaaggtgaactcttgtaacattggtagccgagaggatgttagagaagctgagttttcatgtggatctttattttttcctggcacaatggtagataaatctacactatagcctggcgttcaggctttgtagtgatcatgcgtgccaccaaagtaacatttacattgaaatgcaagtaggctgtaatgcagacgattcagaatctgcactatcctgattggatgaacggacgacctcggttaccaggattcatgtaatttcaaacaactatgtgcaagctca

SEQ ID NO: 204541 - DNA, 2897 bp, Zea Mays
caagagataaccttagcacgttaacggcggcggcggtgagaaaaggcgggggagggggactggaggtgaaaggcggctgctttcgctgtctccccaccacccgcgcacagtggcggcgctgacggtggcaggaaaggaaaggtagagcatcagtcaccagcgcagcttctttcttttcccctttaccgccgttgtatttcggggggcggcattccttgcctcgctgctgtttcttgctctacggattcactggtggtggtggtggtggcggagctctccgtcctaggaggcgctggtggttttccggattgtttcgtctcgcccctcccctcttggtttgagcttggtggcgatcacaccaaactcacatacagatggagatggcagagaccttgcatgtattgcccgatgatggcaatggaagtgctgcagttcagactgagccttattgccatgaagacgccattgaggacatggaatctttcttggatgaagtaaacgacagggttcatgtttcaggaattgtgactggtgctatcatcaaggggatcctaagtgatgtgcggcaagaagctgctagccaaattgctctcaaggatgcagagatatcatcactgaaccagaagctgcagcagccagtaaatggcagcttgagtttatctgagggacgggataaaagacatgatgagttttatagtctccgccagcagcttgactccatttccaagtcactgttgaattctgaatgggggctatcgggatcacagcataactttgaagattcagaaaatgccagcaagcagcaggacaaagaaaattcctctagaaatggtgtagcaaagaccattcatcctggagactctaaagaagaagtttttggtgatccgaaactcttggatcacatggataaggttgctttgatagcccatttcaataaatcaatgaatgagatgaaaaggcagcatgattcagttctgtaccagaggacggaagagatattcaaactgaagcgtgaaatcctgaagaaggatggatcaaacccttttcatttacgaaataacaaagaacttgagcaaacaaggaagaaaattgaggaagtcatctcaaagttggatgtgctcctcctggagaataaaagagcctctgtccgtatcaagtcaaatgcaattcctggtcaacaagataagaacaatgtattaggttctgaaatcgagcaactagaaagcggtgcaagtaataatgaagactaccattgctctattccaactcactcatcacattttgcatccagagaggcagatcatgaactgaatattgtaaggcctcaatttgacgttgaagatgccagaattgcagccacctttagagaagaaatagaaaggattatcataaaagagttcattagtgaaataaacatagaattgcatggttatgagattgagggtggtatgaagcaggaagtttgctcaataattcacaatgaggctattgctagagcaatgtcaaacattgattctttgttgttgaagtacgaggagaaaaagggtcatgctgaagaggaatctctacataagcaaaagattgaaaaactgaaactaattgtggattccttcactgaagtattgagtgaaaaggagaaatttgtatcacagattggattggaagcgatgcagactcgcgtggagtcaatgtgttgtgaacttgatttgttaagggacaaagtggcaaagcaagattcctacctatctgaaaagaacagggaatttgatgccattatgtgcaggttggagcaagctcagcagcatgttcaacacaatgatgttaccttggttgagctgaatgatagacttagaaccatttcaaactctctaaaagacctagagaaacagaatcaagctctacattatgccatggaagaaaaagagaagatgctaacatctgctgtttccaaagacaatgatatgagagaattcatggaaaatcttgttaaatctatcaaagattttgaaattgtcatgatgaatcagcaggctgttgttgcaaataaagtcgatcatcatgaatcaaggttctgtttattaaaagaacaatgtaaacaccttgcaaaagaaggcaatcttttaagaaagaaggccttacgatacaaagagatatctgagacaagagactctaatcttcagaaagctgaacttgaggtggatttgcttggtgatgaggttgaggccttaacggatcttcttgcaaaaatctatactgcacttgatcactattctccagtactgcaacactacaccggcgttatggagaccttgagcatgattaagaagcacattagcatggcgaagtaaaatgcttctggtcggcttgacactgtagaattgtaggtttgacagcaggcttccagtggtttgacataagtttgtagaattgtagatggcagcaagcttttgtttccgactcaaggactaggtgattacccccttttgcaggcagagtagtggtcttggtagcttttgagcactctgtaaatgacccaacccaaccgtagctattagttcttgtgcttggcttttgatgctatggcctatgggctttgccacctgctatgctgggttgcaaaggtgaactcttgtaacattggtagccgagaggatgttagagaagctgagttttcatgtggatctttattttttcctggcacaatggtagataaatctacactatagcctggcgttcaggctttgtagtgatcatgcgtgccaccaaagtaacatttacattgaaatgcaagtaggctgtaatgcagacgattcagaatctgcactatcctgattggatgaacggacgacctcggttaccaggattcatgtaatttcaaacaactatgtgcaagctca

SEQ ID NO: 204542 - DNA, 1353 bp, Zea Mays
ctactcgacgtgctcgtattggtataatcccagagccacaggcacgaacgagtacgggatcccgggaagattcacgcccggcgccacctttccgtagcgccacgaggccacgaccacgagtattttaagcgtggccggcgaccgttccgcgggaagaccgcgcaagatgatgcagggcgcggcggcgggggggacctctgtctccggagcctcttgggctcgggccacgcgcggccgcgcggccgtcctcgcctcgcgccacgtcggcgtgggcgcctcctcctccgactactactacaaccacttcgggccccgcggcgccaccgccgccccgctcctccgcgcccgcgggggcgggcggctcaggcctctgccgctgctgtccggcagcggaaagaatggggaggtcgccaaggccgcggcggcggcggcatcggtgccggcggacgacgcgagtgccgccgcggtgacgacagacggcggtggcattgcggccacggcgcagctgggcgccatgatcgtcgcgtggtacctgctcaacatctacttcaacatctacaacaagcaggttccttcccttccggtgctgggctcgctcgtgccgatcgttggcggcgtcgccttggcgtcattcaccgaagtttctttcaactggaccgggttttggagcgccatggcgtccaatctgaccaaccaatcgaggaacgtcctcagcaagaaactccttgccggtgacaaggatgttatggatgacataaatctcttctcggtgatcactgtgctgtcgtttctgctgtcctgccctctgatgatctttgccgaaggcatcaagttcaccccaggatacctccagagcacgggcctgaacctccaagagctgtgcgtgagagcagcgctcgcaggtctgtgcttccatggctatcagaagctctcgtacttgatcttgtcgagagtgtcgccagtgacacactccgtcgccaactgcgtaaagcgtgtggttgtgatcgtctcctccgttctgttcttcagcacacctatttcgcctgtcaatgcactaggaactggtgctgcattagcaggtgttttcctttactcgaggttgacaagaaccaagaagccaaaggatgcataagcaaggataaaacagattacaggtttttgagggcacagccgactgcaagattcacgaatgaatatatattctcgagcctcacgtgagcatctccaacatgtcatgcaaagcactttacactgtagattacattttttatagattgcactttttgtaaagtgaagtttaaaataaagagcatagagtcaatctgacatgggctaatatagtccaaactccaa

SEQ ID NO: 204543 - DNA, 2931 bp, Zea Mays
tgatgcacttgaaattcgaagaaatatgctgcacacacagcaagtcgggtctgtaggcagaaccgccaacagtcagcacctgcttaatcaaatataaatagcatcgtctcactttttttcccaactagtgtgtgatctgtgtgtgagtgtgagattggttcaaattcctatttgaattttagcctttttttactatttaaacatgggagcaggctacccattagtaggtggtaccgtggtagtcagcggtcagcacagccttccctaactatctcgtcaatcgtcagctgcactgcaatctgtggtcgcaacgcaacgtcccccgtcgtggccgcgtgctatcttcctcctccctccctccttgccgcacgcgtcaaaccttgcaaagagagttcggtcgacggcgccagccggcgatggcagcgccgcgccaccgccagggccacattgcgcagtgccttggcaggatcctcgcctgccgcggcagcgccaccgccgccgtcgctgccggcccaggcggccgacggctcaccggcgcggagttcgtcgacggcgtgcggagcctggccgctggcctcgccgaccgcggggtgcgccctggccacgtcgtcgccgccgtcgccctcaacagcgtcgagtacgtgcagctgttcctcgccgtcacctacgccggagccatcatcgcccctctcaactaccgctgggtgcgtgcgtgctcctccacttcatctccttttctcggttcttacagcacacagcactcactccggcaaagagtgcaagtaagtttcgtcgtcgtctccccctgttctgaagcagagcttcgaggaggcggcgcaggcggtggagctcgtgcggccgacggcgttcgccttcgacggcgcgttcagctcctgggcgcttcggctgatggagggcgacaggttcccatccatcggcctctacctcctcctgggcgatccttgcaggaccggccgcgctgctgcaggttgtgctgtacccattaccgacgtcacggggagcctcggcggagctacggcagcggcggcgatggagcccgtgtcggctccagacgacattgctctaatatgcttcacatccggtgaaaaaaccaggctgttacagaacgaatagaattgaaatcgagaaacttggctacaggatgtatagctgatggtacgtactctgattctgatccaaccaggaaccacggggcggcccaagggcgtagcgataagccacacgtccttgatcatccagtccctcgccaagatcgccattgtcggctacggcgaggacgatgtttacctgcacacagcgcctctgtgccacatcggaggggtctcgtcgtgcatggcagtcctgatggccggaggctgccacgtcctggcgccgaagttcgacgccaggtcggcgttcgccgccatccaggagcacggagtgacctgcttcatcaccgtccccgcgatcatggctgacctgctgtcctacgctcggaaagaggagatggcgccgggctgcgggaggacgacggtgaccaagattctgaacggcggcggcgggctgccgctccacctcgtaaacgcagcctcgcaatcctttcctcgggctgctattttctcagcttacgtagctctgtaatctgcaacagggatgaccgaggcctgctcgtctctgacgttcatggccctcaccacgccaaagcttcaagagccggagccggagccggagacccaaccgtgcggccaccacggaggtgtctgcgtcggcaaaccggcgccgcacgttgagatacggatcggcatggatgacgacggcaccaccgccggttcttcgccgaccgggaacgtcttgaccagaggcttgcacaccatggttggctactgggcaaacggcaaggcggactcatccgagtgtgacaggaacggatggcttgacaccggagacactgggtgggtggacgaggagggtaatctgtggctcttgggaaggcacaagggccgcatcaagaccggaggcgaaaatgtttacccggaagaggttgaatcggtgctgtcccagcaccccggagtggcgagagctgtggtggtcggcgtgccggatagccgtctcggggagagagtcgttgcgtgtgtcagcgtcaaggacggctggaactgggtggatgcgagagctgagcacgagcaccgaggcggaggcgaggaggtgtctcctcagatcctccatggccactgcaggacgaaagaactgagcagatttaaggtgccaaggtcttattaccagtggaggcagccatttccggtgaccacgacggggaagatcagaagggaggagctgaagagggaactcctggcagcaattcgactgcccagcaacctgtagctttttgaggcgatgatctgtttttggaccaaatcttggttcagttcgactccgattgaagtcttctgttttttttggtctgtaggtgcttttagcttttacctggttggagtttaagatgcgaaaaaaagagcgtttgattattggaaacctgtaacatccatgacttttcttcaccttgacaaaagaagtcgagtcaatggcaagtcccatgaaattcagagcatccgattcttggagaactgaaaattgttgacgccttttcagagcgccaatcactcaagaagaaccggcggcggtgctctctggtcagccgcggacggtccgcggcctggggctggatggtccgcgacctggtgtgaggcggcggtgctccctggtcagacgcggacggtccgcggcacaggaccggacggtccgcgacctggtgcagcaggagcccgggttccctgcctgacggctggacggtccgcgcgtgcgcaggggcggcagaggatcgctggcggcgcctgaatctcgctcccgggagggaccccgtcggggaggaga

SEQ ID NO: 204544 - DNA, 2558 bp, Zea Mays
atctccaacaaatctcaaaattatttattccaatacatgagcattgggagccccctaagatttaaattcctgaaaaaagtgtcaatacttcaacaactctcaatattttcgaaaaacctaaaatgaatctgttgttgagcccacaaaacctgtctgtcgatcatacctgtcacactgtttttctgcgtcacccatccttcgttcctccctgcgccgccgatctgcttcatgtgttggcgcaagcttcagacgtgatctgctcctcgcctcaggttgcctccgttgacgtgtgggagcagctgcagcggagctcggaaaccacggtgagccgcccgcagtatgcacctctctcggataacagggcaaggaatgaccactcggagccacattatgcatctggagtgaacctttcacaaagtgctccttccactaatcaagtttctcaggctgccagtggaaaccaaatgtcgacagaagcatatcgtgctaagcatgagattaccatcatcggcaacgagtcacctgcaccattcatgacatttcagtccacatgcttcccatcagatattctaagggaggttctgcaagcaggattctctgcaccaactcctatccaagctcagtcatggccaattgctatgaagggtagggatatagtagctgtggcaaagacaggttcaggaaaaacactgggctatctcctcccagggtttattcttctgaagcgcctgcatcataattcaagggaaggtccaacagtattagttttgtccccaaccagggaattggcaacacaaattcaagatgaagcaatcaagtttggcagatcttcaagaatatcttctacttgcttatatggaggtgctccaaaaggtcctcagctaagggagttggagcgtggtgccgatgttgttgttgcaactcctgggagattgaacgacattttggaaatgaataaagtgagcctgcgccaagtatcatatcttgtccttgatgaagctgaccgtatgcttgatatgggatttgagccacaaataagaaaaattgtgaaacaaataccacctagacggcaaactcttatgtacactgccacatggccaaaagaggttagaaaaatagcgtcggatttactgaataacccagttcaagttaacattggaaacactgatcagctggttgcaaataaatcaattactcagcatgtggaagttatcccacatatggagaaatcaagacgacttgatcagatcttgcgttcacaagatcctggatcaaaaatcataatattttgctccaccaagaggatgtgtgatcagttggctagaaacctatcacggcagtatggtgcttctgctattcatggtgataaatcacaggctgagagggattctgtgttgaatgacttccgaagcggcaggtgtccagtactcgtagccactgatgtggccgctcgaggcttggacataaaggacatcaggatcgtggttaattatgatttcccaactggtgtggaggactatgtccatcgaattgggagaacaggtagggctggcgcaacaggatctgcctacacattctttggtgaccaggattcaaagtacgcttcagaacttgtgaagattttggagggtgcaaaccagtctgtgccaccacaattaaaagaaatggcccttcgtggaggatatggtggaagatcacgtcgatgggcatcttctgatgactcttatggtagtcagggatatggtgctaaaagatcaactgatagtttcaagaacagcagcttcggcaaccaggccgggggtggttcaagctttcactcgagcttccataacagctctagtggcaatcagttcggtgatactacaagctttcatgccagctatggtaacagcagccagaacaatcagacgggtgacaatccgagcttcccacccagctccagcaacaatcagtccggggatggtctcagttttcatgaaaggttctatggatcacgcggaagggacgagagcagatcaaacaatgatggattccgtgctaggagcagaagtcctggcaagcctgtggaagtttccaactggtgattgcatccactaggtgcaatccaatttttgcgatggtgacgaaaccaagtaaaagatggtacctcgacaagttatattttcctcttatcctgcttaaatctaaggatgtcctggaacatcactaacttaggatatgggtgatggtctgatcccaatggacaatggtctcctactttcttgatttgacgcctgagagacgcctgattccataccatatgcctgtggttgtagtttgtaaaatgttaaaaacttgactttgctagtatatttcctaatgctataacccaatcctgggtaaacagacgcatggggatgaattttggacggaaccatggacatttgatgtatgtgtttaatgttgtgtacaatctatgtcgaattctgttgtaagtgccgtccgcatcgttttatatctttgtgcccgttattacaggtcttaaagaatcatgctgcccgtatgtgactcttctcatg

SEQ ID NO: 204545 - DNA, 2001 bp, Zea Mays
gttcgacctgtttgttgtcttgttctgcaagcaggattctctgcaccaactcctatccaagctcagtcatggccaattgctatgaagggtagggatatagtagctgtggcaaagacaggttcaggaaaaacactgggctatctcctcccagggtttattcttctgaagcgcctgcatcataattcaagggaaggtccaacagtattagttttgtccccaaccagggaattggcaacacaaattcaagatgaagcaatcaagtttggcagatcttcaagaatatcttctacttgcttatatggaggtgctccaaaaggtcctcagctaagggagttggagcgtggtgccgatgttgttgttgcaactcctgggagattgaacgacattttggaaatgaataaagtgagcctgcgccaagtatcatatcttgtccttgatgaagctgaccgtatgcttgatatgggatttgagccacaaataagaaaaattgtgaaacaaataccacctagacggcaaactcttatgtacactgccacatggccaaaagaggttagaaaaatagcgtcggatttactgaataacccagttcaagttaacattggaaacactgatcagctggttgcaaataaatcaattactcagcatgtggaagttatcccacatatggagaaatcaagacgacttgatcagatcttgcgttcacaagatcctggatcaaaaatcataatattttgctccaccaagaggatgtgtgatcagttggctagaaacctatcacggcagtatggtgcttctgctattcatggtgataaatcacaggctgagagggattctgtgttgaatgacttccgaagcggcaggtgtccagtactcgtagccactgatgtggccgctcgaggcttggacataaaggacatcaggatcgtggttaattatgatttcccaactggtgtggaggactatgtccatcgaattgggagaacaggtagggctggcgcaacaggatctgcctacacattctttggtgaccaggattcaaagtacgcttcagaacttgtgaagattttggagggtgcaaaccagtctgtgccaccacaattaaaagaaatggcccttcgtggaggatatggtggaagatcacgtcgatgggcatcttctgatgactcttatggtagtcagggatatggtgctaaaagatcaactgatagtttcaagaacagcagcttcggcaaccaggccgggggtggttcaagctttcactcgagcttccataacagctctagtggcaatcagttcggtgatactacaagctttcatgccagctatggtaacagcagccagaacaatcagacgggtgacaatccgagcttcccacccagctccagcaacaatcagtccggggatggtctcagttttcatgaaaggttctatggatcacgcggaagggacgagagcagatcaaacaatgatggattccgtgctaggagcagaagtcctggcaagcctgtggaagtttccaactggtgattgcatccactaggtgcaatccaatttttgcgatggtgacgaaaccaagtaaaagatggtacctcgacaagttatattttcctcttatcctgcttaaatctaaggatgtcctggaacatcactaacttaggatatgggtgatggtctgatcccaatggacaatggtctcctactttcttgatttgacgcctgagagacgcctgattccataccatatgcctgtggttgtagtttgtaaaatgttaaaaacttgactttgctagtatatttcctaatgctataacccaatcctgggtaaacagacgcatggggatgaattttggacggaaccatggacatttgatgtatgtgtttaatgttgtgtacaatctatgtcgaattctgttgtaagtgccgtccgcatcgttttatatctttgtgcccgttattacaggtcttaaagaatcatgctgcccgtatgtgactcttctcatg

SEQ ID NO: 204546 - DNA, 2006 bp, Zea Mays
gccttttctcgttgctatagactatagttctgcaagcaggattctctgcaccaactcctatccaagctcagtcatggccaattgctatgaagggtagggatatagtagctgtggcaaagacaggttcaggaaaaacactgggctatctcctcccagggtttattcttctgaagcgcctgcatcataattcaagggaaggtccaacagtattagttttgtccccaaccagggaattggcaacacaaattcaagatgaagcaatcaagtttggcagatcttcaagaatatcttctacttgcttatatggaggtgctccaaaaggtcctcagctaagggagttggagcgtggtgccgatgttgttgttgcaactcctgggagattgaacgacattttggaaatgaataaagtgagcctgcgccaagtatcatatcttgtccttgatgaagctgaccgtatgcttgatatgggatttgagccacaaataagaaaaattgtgaaacaaataccacctagacggcaaactcttatgtacactgccacatggccaaaagaggttagaaaaatagcgtcggatttactgaataacccagttcaagttaacattggaaacactgatcagctggttgcaaataaatcaattactcagcatgtggaagttatcccacatatggagaaatcaagacgacttgatcagatcttgcgttcacaagatcctggatcaaaaatcataatattttgctccaccaagaggatgtgtgatcagttggctagaaacctatcacggcagtatggtgcttctgctattcatggtgataaatcacaggctgagagggattctgtgttgaatgacttccgaagcggcaggtgtccagtactcgtagccactgatgtggccgctcgaggcttggacataaaggacatcaggatcgtggttaattatgatttcccaactggtgtggaggactatgtccatcgaattgggagaacaggtagggctggcgcaacaggatctgcctacacattctttggtgaccaggattcaaagtacgcttcagaacttgtgaagattttggagggtgcaaaccagtctgtgccaccacaattaaaagaaatggcccttcgtggaggatatggtggaagatcacgtcgatgggcatcttctgatgactcttatggtagtcagggatatggtgctaaaagatcaactgatagtttcaagaacagcagcttcggcaaccaggccgggggtggttcaagctttcactcgagcttccataacagctctagtggcaatcagttcggtgatactacaagctttcatgccagctatggtaacagcagccagaacaatcagacgggtgacaatccgagcttcccacccagctccagcaacaatcagtccggggatggtctcagttttcatgaaaggttctatggatcacgcggaagggacgagagcagatcaaacaatgatggattccgtgctaggagcagaagtcctggcaagcctgtggaagtttccaactggtgattgcatccactaggtgcaatccaatttttgcgatggtgacgaaaccaagtaaaagatggtacctcgacaagttatattttcctcttatcctgcttaaatctaaggatgtcctggaacatcactaacttaggatatgggtgatggtctgatcccaatggacaatggtctcctactttcttgatttgacgcctgagagacgcctgattccataccatatgcctgtggttgtagtttgtaaaatgttaaaaacttgactttgctagtatatttcctaatgctataacccaatcctgggtaaacagacgcatggggatgaattttggacggaaccatggacatttgatgtatgtgtttaatgttgtgtacaatctatgtcgaattctgttgtaagtgccgtccgcatcgttttatatctttgtgcccgttattacaggtcttaaagaatcatgctgcccgtatgtgactcttctcatg

SEQ ID NO: 204547 - DNA, 2006 bp, Zea Mays
ctgatctccgcgccgtgaaggaagcttcaactacgagaacatgactgacctgctcggcgacggcatcttcgccgtggacggcgacaagtggaggcagcagcggaagatcgccagctacgacttctccacgagggcgctgcgcgacttcagcggctcggtcttcaagaggaacgccgcgaggctcgccggcatcgtctccggcaaggcggcgtccgggcagcccatggagttccagggcctcgcgctcagggcgaccatggactccatcttcaccatcgccttcggcctggacctagacacgctgggcggctcggcggaagggagccgcttcgccgcggcgttcgacgacgccagcgagttcacgctgctccgctacgtgaacgcgttctggaaggcgcagaggttcctcggcgtaggctccgaggcggcgctcaagaagcgggtcaaggtcgtcgacgagttcgtgtacaagcgcatccgcgagagagcccaggagctctccgacagcaagctggcgaccgaggacactgtccctgattcgaggcaagacatgctgtccagattcatccacacggccacgaacgagtccgggacggtggactacaagtacctgagggacatcatactgaacatagtcatcgccggcaaggacacgacggcgggggcgctcgcctggttcctctacatggcgtgcaagcacccggagatccaggagaagatctgccaggaggccgcaaaggcgaccgacgccagcgagacggcgggcgtggacgagttcgcgcagagcctgaccgacgaggccctgaacaagatgcactacctgcacgccgcgctgaccgagacgctcaggttgtacccgtcggttcctctggataacaagcagtgcttcggagacgacgtcctgcctgacggttccagcgtcagcaagggagacatcgtgttctacgtcccctacgccatgggccggatggagtacctctggggcaaggacgccgaggtgttccggccggagcggtggctggatcaggacggagagttccagcaggagagcccgttcaaattcacagcgttccaggctggtccgaggatatgcctggggaaggagttcgcgtaccggcagatgaagatcttcgcggcggtgctcctccgattcttcgtgttccgcctgcgcgacggcgacaaagcgagcgtgaattaccggaccatgatcacgctccacatcgacgagggtctgcatctgacagcgacggcgagatgaggtcgcctggcctggccaccggtggacacgtagccgccggtgcctgtagctacgcgagcgacaggtccttgacaccgtaccttgtgtacatatatatatgcaaagaaacgaaaacgagcagtggtagtaggcaaccactttgtgtactgcgtcttgctggggaataatgacatgtcatggcatgagttgcaggctagcttgcatgcagtacgtcagtgtcgcggcggtgaggcggtgagcagaggtcggtgttctacgccatgcgtccgtgtctgaaaatatcggacttgtcacctgaatctcagctgatcgtcgtcgttcagagcacgtttttcagcattggtggtcacggcgaaacgccacgcatccgcagtttcccgggatctgtgccacatcaagtcatggcaagcaccgtttgctgtcaagacgatggatggctgacgcgacatcctgctggtctagacgatgggcatggagtcgcctcggacagcaacttgcgtcaacatggtcgtcgtgatatatttgacagatggcaccggcaccggcaccggaccgagacgcacggtgacggtgctcactacagctgttcaacgttcttgcgtcacaggagcgacacatgaacaatgactgagcccccaactcactgaaatggattagggaatataagaataaatattggattcacccaataattggagtataaatcgtaagaaaggagaatcacctaatttgtaagactttgttggtc

SEQ ID NO: 204548 - DNA, 946 bp, Zea Mays
aagagaggtaactgaacgaagcatccggtgtgtgccctcgtcatccgccgccgccgccatgccgggcttcgctcagcgtctcgcgggcatcccgtggcggagcatcgcgaggcaaggcctctcccgcgtgttcctggtggcgaaggcctactgcgtgatccacgtcgtcaacgaccacctctgctcggtgaccttagtgcggggcgccagcatgctgccgtccctgaacctggcgggcgacgcggtggcggtggacagggtcagcgtgaggctcggccgggtcgcgccgggggacatcgtgctgatgatctcccccgaggacccgcgcaagtcggtcgtcaagcgcgtcgtcgggatgcaaggggactccgtcacctaccttgtcgaccccggcaaaagcgactcctcctccagaaccgtcgtggtaccgcaagatcatgtctgggtgcagggtgacaatatctttgcttctaacgattcgaggcaatttggagctgtgccttatgggctgattacagggaagatcttttgccgggtttggccgccggagagtttcggcgcaattgatgacgcaaccaagcagtcttaacgctgaggaggagccgaggagagcacatggacccatattgtttgctcgcgcccagagattctataatagccaactgcagggggggcccttccttgagctcgagagctttcgacgacctaccgcagcgcatttctacagcgaagcaaagagcgtgtcccgtgtttttatagttttggtgtgtgacaagttctgaaacccaaatcggcacaggtttcgagacagtttttttttttttggtgctagtgccaacctgggtttgggtttgcaactacactacaacttcacatgcttattccaaacatttgaactgatttgtcagtcctcgttttgcagaagggtgtgtttgtttgtttaaac

SEQ ID NO: 204549 - DNA, 2420 bp, Zea Mays
aagagaggtaactgaacgaagcatccggtgtgtgccctcgtcatccgccgccgccgccatgccgggcttcgctcagcgtctcgcgggcatcccgtggcggagcatcgcgaggcaaggcctctcccgcgtgttcctggtggcgaaggcctactgcgtgatccacgtcgtcaacgaccacctctgctcggtgaccttagtgcggggcgccagcatgctgccgtccctgaacctggcgggcgacgcggtggcggtggacagggtcagcgtgaggctcggccgggtcgcgccgggggacatcgtgctgatgatctcccccgaggacccgcgcaagtcggtcgtcaagcgcgtcgtcgggatgcaaggggactccgtcacctaccttgtcgaccccggcaaaagcgactcctcctccagaaccgtcgtggtaccgcaagatcatgtctgggtgcagggtgacaatatctttgcttctaacgattcgaggcaatttggagctgtgccttatgggctgattacagggaagatcttttgccgggtttggccgccggagagtttcggcgcaattgatgacgcaaccaagcagtcttaacgctgaggaggagccgaggagagcacatggacccatattgtttgctcgcgcccagagattctataatagccaactgcagggggggcccttccttgagctcgagagctttcgacgacctaccgcagcgcatttctacagcgaagcaaagagcgtgtcccgtgtttttatagttttggtgtgtgacaagttctgaaacccaaatcggcacaggtttcgagacagtttttttttttttgaatcgaagttgacataatctatagctacatgaaacgcagtcgtttttgttcacgcgcaagataccctagatttacatgtcagtggatcggagcacagccaacaagcacatatgctgcgtaatgcaggaaaggacctacttggtttcagtacacaaaagcacacagcggactggtagtctagcgagagtcgatccaagatctgaagaactcgtggagctatttggtgtgtggaggaatcataaaagggctactgattgcgttacctaagctagatctgttagaagctataactgcaaaactaaacctgagattctagatctacttctgatgcttgtgagagactagtgcgcttcgattcttgcatctccacctcaacagagatcacttgttttggcttgcagttttctgtctccatccgtctgagtttttccttctgtatggcacgtagttcatacctacaacaggtaggataagtgtacaatgatgttgtcaataacaaatggtagctggcataggagaacgtacgtaatatcatatatcaggaggtaaggtaaactctatatggtaatgtaattgctcatcaaatagcgacagttcagtcctccattatgatatttgcacgttctgtgcgaatgttgcagagaaactggcagtaacaattttggtcaatggattgccaattatgtcagtttcaaccctcaaacatctcaattttttgcttggcaaaaagcttattgtggtattcctatatatgacatcacttcttattatccagggaagaacttacagattacattttttagcttcacagcttgtgcttattctccagggaactaacagattacattattgagcctaaacaggaaagcccactatttcttcaggttatccatgtactgaaatttttattacattacatgtgatcttcctatatagcttcattgattgtgcttattctccagggaactaacagattacatttttaagcctaaacaggaaagcccactattccttcaggttatctatgtagtgaaaatttattccatgttatctttctagcagtacgagtttataccataaagaacaatcaccttgtgatattccttgatagtaagtatataatgaaactatagtaagtgggcgtagcaggaagaagcataattgcttcgatataatgtttctgtttatcgccaagtccaaatttcctgtcccctaaatttagaattgttaacttgtctacaaagcttcatgtcaagacactcctacatgcttgatgcttcaatagtatattcttgagggaacttatagcttgcattttattagcctattacacaagagagcccactagcttttaaggtttatctatgtagtcaaaaatgtgtttcatcttccgagcagaagtatgtatactaaataacaaatcgcctgagtgagatgctaataattaaagaagatagcactcaactgatagtaaccaaagtgagatgctaatttcgaagtttcgctcattgatcaacgactgacagactgcgagagcaattgaactccacaactgaagcatcacacacacacacatggggatactgttaagacga

SEQ ID NO: 204550 - DNA, 967 bp, Zea Mays
gaaaaggaaaaaaaagctaccatgtttcctaaggcttaaggtttggccgccggagagtttcggcgcaattgatgacgcaaccaagcagtcttaacgctgaggaggagccgaggagagcacatggacccatattgtttgctcgcgcccagagattctataatagccaactgcagggggggcccttccttgagctcgagagctttcgacgacctaccgcagcgcatttctacagcgaagcaaagagcgtgtcccgtgtttttatagttttggtgtgtgacaagttctgaaacccaaatcggcacaggtttcgagacagtttttttttttttggtgctagtgccaacctgggtttgggtttgcaactacactacaacttcacatgcttattccaaacatttgaactgatttgtcagtcctcgttttgcagaagggtgtgtttgtttgtttatccatgtccatgtcaaaacacacgacgattattgttcagcatgtccatgtcaaaacatacatcgatcttgaggttattatgccatactatatatatagcactgtaataaagtcatccatccggcctctacgtcgacgcggcggcggcggtggcgctgggctccggtgctgctgccgccgctagctgaaaccgatggtgctgctgctgctgcagcagcagcgacgacttgcactgggcgcacatgcagatctgctgggtggtgcagaagccgccgacgtagcccttgtcctggcagcgggcgatgcagagcagtggcgcgtcgcggcactccgggacgatgctgcggaacagcgggcacatgcccttgccgtctgcttggttcagcaacccggtctatatatatacttccacgcgagctcatcgatcatggtccatgtccatctccttctttttgtcctcgacgtcgcctggtgcatgccgggcatgcaggcgccgtggctaccgctgccggcgctgtag

SEQ ID NO: 204551 - DNA, 1556 bp, Zea Mays
aagagaggtaactgaacgaagcatccggtgtgtgccctcgtcatccgccgccgccgccatgccgggcttcgctcagcgtctcgcgggcatcccgtggcggagcatcgcgaggcaaggcctctcccgcgtgttcctggtggcgaaggcctactgcgtgatccacgtcgtcaacgaccacctctgctcggtgaccttagtgcggggcgccagcatgctgccgtccctgaacctggcgggcgacgcggtggcggtggacagggtcagcgtgaggctcggccgggtcgcgccgggggacatcgtgctgatgatctcccccgaggacccgcgcaagtcggtcgtcaagcgcgtcgtcgggatgcaaggggactccgtcacctaccttgtcgaccccggcaaaagcgactcctcctccagaaccgtcgtggtaccgcaagatcatgtctgggtgcagggtgacaatatctttgcttctaacgattcgaggcaatttggagctgtgccttatgggctgattacagggaagatcttttgccgggtttggccgccggagagtttcggcgcaattgatgacgcaaccaagcagtcttaacgctgaggaggagccgaggagagcacatggacccatattgtttgctcgcgcccagagattctataatagccaactgcagggggggcccttccttgagctcgagagctttcgacgacctaccgcagcgcatttctacagcgaagcaaagagcgtgtcccgtgtttttatagttttggtgtgtgacaagttctgaaacccaaatcggcacaggtttcgagacagtttttttttttttggtgctagtgccaacctgggtttgggtttgcaactacactacaacttcacatgcttattccaaacatttgaactgatttgtcagtcctcgttttgcagaagggtgtgtttgtttgtttatccatgtccatgtcaaaacacacgacgattattgttcagcatgtccatgtcaaaacatacatcgatcttgaggttattatgccatactatatatatagcactgtaataaagtcatccatccggcctctacgtcgacgcggcggcggcggtggcgctgggctccggtgctgctgccgccgctagctgaaaccgatggtgctgctgctgctgcagcagcagcgacgacttgcactgggcgcacatgcagatctgctgggtggtgcagaagccgccgacgtagcccttgtcctggcagcgggcgatgcagagcagtggcgcgtcgcggcactccgggacgatgctgcggaacagcgggcacatgcccttgccgtctgagggtgacggcaaaataaggaaggagaacatgatcagtagtagggcatcagttgcagccatgacgaccaccttggaagaagccatggcactggttgtagcttccgcttccgatctgcaggcgaacgaatgaatcggtttcaggctttcagctgtgctgcttagatgtactgtctgtacttacatatatatgcatgcgccggggcgataataaggaaaagagctaggagttttaattttc

SEQ ID NO: 204552 - DNA, 4265 bp, Zea Mays
cgcagtccaaaaaaaacccagcaaaccgacacgtccaatccaaatagaagaaaaaaaaactcgggcaattccgccgggcgccggccatccgatcgatcccgtcccagctgtccttcctccccgaagtatccatcatccatgaacatggagcgcctaccgccgccggcaggatcgcgccacggtcaccaccgctacacgcggatgccgcggcaggcggacctcgagggcgaagcggcgcctgctgaccaggagcgggaacccgagcggcggccggaggtcctggcggcctcagcgtcggcatcgctccgagtgcccgacgccgcgcgggtgttcgacgagctgcccagggcgtccatcgtagccgtatcgcgccccgacgccggggacatcacgcccatgctgctctcctataccatcgaggttcattacaagcagtttagatggcgtctatataagaaagcttcacaggttctctatcttcactttgcattgaagaggcgtgaatttcttgaagaattccatgaaaagcaggagcaggtcaaagaatggctccaaaatttgggaattggggagcatatgccagtagtacatgatgaggatgaagcggatgatgtaaatgttccaccacagtctgatgataactcaattagaaatagaaacgttccttcaagtgctgttttacctgtcattcgaccggctcttggacgtcaaaactctatttctgatcgagcaaaagttgcaatgcaagaatatctaaaccatttcttagggaacttggatatcgtcaattcacgggaggtttgcaaatttttggaggtgtcatgtttgtcatttttacctgagtatggtcccaagttaaaagaagacaatgtttcagttggacatttaccaaagattcaaaaggaccggaaaaaacgatgctgttcatgtggattgtttaactgttgcaagagcaattggcaaaagacctgggctgtcctgaagccaggattcttggctttgcttgaagacccttttgatccaaagcttttagacgtcattatttttgatgcattgccacatatggatataactggagaaggccaagtttctttagcaaaagagattaaagaacgtaatccactgcattttggattccaggtttcttctggtggccggacaataaagctacgcgcaacaagctcttctagggttaaggactgggttactgcaataaatgctgctcgacaacctccagaaggctggtgctatcctcatcgttttggctcatttgcaccaccgaggggtttgttggaagatgggagtatggtacaatggtttgtagatgggcaagctgcattcaaagctattgcatcctccattgaggaagccaaatcggagatatttattactggctggtggctctgcccagagttgtatcttcgacgcccattccaacatcatggatcatctagacttgatgctctactggaagcaagagctaagcagggtgtacagatttacattctcttgtacaaggaagttgctcttgctttgaaaattaacagcttatacagtaaacagaggctacttaacattcatgaaaatgttaaagttctgcgttaccctgatcacttctcaagtggtgtatacttgtggtcacaccatgagaagattgtgattgttgataatcaagtatgttatattggaggtcttgatctgtgctttggtcgctacgatagtcctgagcacaaagtcgctgattctcctccagagatgtggccaggaaaggactactacaatcccagggaatctgaacccaattcctgggaggacaccatgaaagatgagctggaccgtgataaatatccccgcatgccttggcatgatgttcagtgtgctctctatggcccaccttgccgtgatgtagcgaggcattttgttcagcgctggaattatgcaaagaggaacaaagctctaaatgagcaagcaattcccttactgatgcctcattaccacatggtaattccacactacaagggtagaagcaaagaaacaaatgatgaggctgagggtaaacaatacaatgataaggatgttgatattggaaagccagtcttgacatcacgcacatcatgtcaggatgttccattgctcttacctcaagagcttgaacctcgtgaattatccagttcagatttaagggtgaatgatttagatattaaccattcagatcgtttaaacaagaagaactttaatcagcctttgctcaaccgaaaggcaaaactggattcttctcatcaggatttacctatgagaagttttgtagacaatctcagttcccttgagccatcatctgttagacgttttgattcgtcaaaagatgataggaatcacattgacaaaaaatggtgggaaatgcaggagcgaggcaaccaagttgcttcattacttgatattggacaagttggtccaagggtaacatgtcgttgtcaggttgttaggagtgtcggtcaatggtcagctgggaccactcaaattgaaggaagcatccacaatgcctacttttctctgattgagaaggcagaacacttcgtatacattgagaatcaatttttcatatcgggtctgtcaggagatgatacgattaaaaaccgcgtactggaagcattgtatcggcgcatacttagagctgaaagagagaaaaagcgctttaaggccatcatcatcatacctcttttacctggttttcagggaggcattgatgatggtggagcagcatcagtcagggcaatcatgcattggcaatatcggactatctgcagaggttctaattcgattcttcagaatctatttgatgttattggacctaaagcacatgattacatctccttttatgggcttagagcacatggtaaactccatgatgggggtcccttggttactagtcaggtatgatgagcttctatttgtgcatgttttgttcctccccagggtcctcactcttgtccagctgagcatcatgaattttacctagaagaggcaatgaactgctcgtcatcatcttttatttttttttgaaaaaaacgcaggagaattgctcgtcatcatcacactttgttttttatctttcgcagaactacttccggtccaatttataaggtgtagcttaacatgattataaacttttgattattggatagtacatttgattgcaaatctaatagtatcaattttgtatttaaaatagtcaacaactgtttgccaaattattggtcaaagatataaagtttgacccttgacatatgcgaaatgtcttataaaatagactgggaggagcagcatataaaatgtattcaggataccattctaacaatgtcccatttccagatttatgtacatagcaagttaatgatagttgatgaccgcatcacattgattggctcagctaatattaatgatagaagcttgcttggatcaagagactccgagattgctgtggtcatcgaagataaagaggttgttaattcaaaaatggatggaagaccttgggaagctgggaagtcctctttaagcctacgcctctcgctgtgggtggaacaccttggccttcatccaggagaggttagccatatcatggatcctatagatgattcaacattcaaaaatatctggatggccactgccaagacaaataccatgatataccaagatgtcttcgggtgtgtacccaacgatctcattcactcaagggttcaatttcggcaaagctttgctcacttgagggacaaaattggccacactacaattgatttgggtgttgcccaagagaagctagaagcttaccaagagggtgatctcaaaagtatcaaccctatggacagactacagttagtcaggggccaccttgtttcgtttccgttggatttcatgtgccaagaggacttgagaccatatttcagtgaaagtgagtactacacatcaccacaggttttccattagcctctctgtctgcctcgtaaagttactcaaccggctgtacatgttgcaaagatcaccttgtagatgctctacacatgttgtcaaataggaaacaaaaaaaaattaatatattatcataccattagagtattagaattgtttcctagaaagaaaatagtatatcagtatagttcattcgttccaacaacttttagtttcgggaaagaaacaatcaaattcattgtttataagtgcaaataataggagtttccttagttcaacacattttctttggaatgaatata

SEQ ID NO: 204553 - DNA, 3434 bp, Zea Mays
cgacgccgcgcgggtgttcgacgagctgcccagggcgtccatcgtagccgtatcgcgccccgacgccggggacatcacgcccatgctgctctcctataccatcgaggttcattacaagcagtttagatggcgtctatataagaaagcttcacaggttctctatcttcactttgcattgaagaggcgtgaatttcttgaagaattccatgaaaagcaggagcaggtcaaagaatggctccaaaatttgggaattggggagcatatgccagtagtacatgatgaggatgaagcggatgatgtaaatgttccaccacagtctgatgataactcaattagaaatagaaacgttccttcaagtgctgttttacctgtcattcgaccggctcttggacgtcaaaactctatttctgatcgagcaaaagttgcaatgcaagaatatctaaaccatttcttagggaacttggatatcgtcaattcacgggaggtttgcaaatttttggaggtgtcatgtttgtcatttttacctgagtatggtcccaagttaaaagaagacaatgtttcagttggacatttaccaaagattcaaaaggaccggaaaaaacgatgctgttcatgtggattgtttaactgttgcaagagcaattggcaaaagacctgggctgtcctgaagccaggattcttggctttgcttgaagacccttttgatccaaagcttttagacgtcattatttttgatgcattgccacatatggatataactggagaaggccaagtttctttagcaaaagagattaaagaacgtaatccactgcattttggattccaggtttcttctggtggccggacaataaagctacgcgcaacaagctcttctagggttaaggactgggttactgcaataaatgctgctcgacaacctccagaaggctggtgctatcctcatcgttttggctcatttgcaccaccgaggggtttgttggaagatgggagtatggtacaatggtttgtagatgggcaagctgcattcaaagctattgcatcctccattgaggaagccaaatcggagatatttattactggctggtggctctgcccagagttgtatcttcgacgcccattccaacatcatggatcatctagacttgatgctctactggaagcaagagctaagcagggtgtacagatttacattctcttgtacaaggaagttgctcttgctttgaaaattaacagcttatacagtaaacagaggctacttaacattcatgaaaatgttaaagttctgcgttaccctgatcacttctcaagtggtgtatacttgtggtcacaccatgagaagattgtgattgttgataatcaagtatgttatattggaggtcttgatctgtgctttggtcgctacgatagtcctgagcacaaagtcgctgattctcctccagagatgtggccaggaaaggactactacaatcccagggaatctgaacccaattcctgggaggacaccatgaaagatgagctggaccgtgataaatatccccgcatgccttggcatgatgttcagtgtgctctctatggcccaccttgccgtgatgtagcgaggcattttgttcagcgctggaattatgcaaagaggaacaaagctctaaatgagcaagcaattcccttactgatgcctcattaccacatggtaattccacactacaagggtagaagcaaagaaacaaatgatgaggctgagggtaaacaatacaatgataaggatgttgatattggaaagccagtcttgacatcacgcacatcatgtcaggatgttccattgctcttacctcaagagcttgaacctcgtgaattatccagttcagatttaagggtgaatgatttagatattaaccattcagatcgtttaaacaagaagaactttaatcagcctttgctcaaccgaaaggcaaaactggattcttctcatcaggatttacctatgagaagttttgtagacaatctcagttcccttgagccatcatctgttagacgttttgattcgtcaaaagatgataggaatcacattgacaaaaaatggtgggaaatgcaggagcgaggcaaccaagttgcttcattacttgatattggacaagttggtccaagggtaacatgtcgttgtcaggttgttaggagtgtcggtcaatggtcagctgggaccactcaaattgaaggaagcatccacaatgcctacttttctctgattgagaaggcagaacacttcgtatacattgagaatcaatttttcatatcgggtctgtcaggagatgatacgattaaaaaccgcgtactggaagcattgtatcggcgcatacttagagctgaaagagagaaaaagcgctttaaggccatcatcatcatacctcttttacctggttttcagggaggcattgatgatggtggagcagcatcagtcagggcaatcatgcattggcaatatcggactatctgcagagagcacatggtaaactccatgatgggggtcccttggttactagtcagatttatgtacatagcaagttaatgatagttgatgaccgcatcacattgattggctcagctaatattaatgatagaagcttgcttggatcaagagactccgagattgctgtggtcatcgaagataaagaggttgttaattcaaaaatggatggaagaccttgggaagctgggaagtcctctttaagcctacgcctctcgctgtgggtggaacaccttggccttcatccaggagaggttagccatatcatggatcctatagatgattcaacattcaaaaatatctggatggccactgccaagacaaataccatgatataccaagatgtcttcgggtgtgtacccaacgatctcattcactcaagggttcaatttcggcaaagctttgctcacttgagggacaaaattggccacactacaattgatttgggtgttgcccaagagaagctagaagcttaccaagagggtgatctcaaaagtatcaaccctatggacagactacagttagtcaggggccaccttgtttcgtttccgttggatttcatgtgccaagaggacttgagaccatatttcagtgaaagtgagtactacacatcaccacaggttttccattagcctctctgtctgcctcgtaaagttactcaaccggctgtacatgttgcaaagatcaccttgtagatgctctacacatgttgtcaaataggaaacaaaaaaaaattaatatattatcataccattagagtattagaattgtttcctagaaagaaaatagtatatcagtatagttcattcgttccaacaacttttagtttcgggaaagaaacaatcaaattcattgtttataagtgcaaataataggagtttccttagttcaacacattttctttggaatgaatata

SEQ ID NO: 204554 - DNA, 3465 bp, Zea Mays
cagggcgtccatcgtagccgtatcgcgccccgacgccggggacatcacgcccatgctgctctcctataccatcgaggttcattacaagcagtttagatggcgtctatataagaaagcttcacaggttctctatcttcactttgcattgaagaggcgtgaatttcttgaagaattccatgaaaagcaggagcaggtcaaagaatggctccaaaatttgggaattggggagcatatgccagtagtacatgatgaggatgaagcggatgatgtaaatgttccaccacagtctgatgataactcaattagaaatagaaacgttccttcaagtgctgttttacctgtcattcgaccggctcttggacgtcaaaactctatttctgatcgagcaaaagttgcaatgcaagaatatctaaaccatttcttagggaacttggatatcgtcaattcacgggaggtttgcaaatttttggaggtgtcatgtttgtcatttttacctgagtatggtcccaagttaaaagaagacaatgtttcagttggacatttaccaaagattcaaaaggaccggaaaaaacgatgctgttcatgtggattgtttaactgttgcaagagcaattggcaaaagacctgggctgtcctgaagccaggattcttggctttgcttgaagacccttttgatccaaagcttttagacgtcattatttttgatgcattgccacatatggatataactggagaaggccaagtttctttagcaaaagagattaaagaacgtaatccactgcattttggattccaggtttcttctggtggccggacaataaagctacgcgcaacaagctcttctagggttaaggactgggttactgcaataaatgctgctcgacaacctccagaaggctggtgctatcctcatcgttttggctcatttgcaccaccgaggggtttgttggaagatgggagtatggtacaatggtttgtagatgggcaagctgcattcaaagctattgcatcctccattgaggaagccaaatcggagatatttattactggctggtggctctgcccagagttgtatcttcgacgcccattccaacatcatggatcatctagacttgatgctctactggaagcaagagctaagcagggtgtacagatttacattctcttgtacaaggaagttgctcttgctttgaaaattaacagcttatacagtaaacagaggctacttaacattcatgaaaatgttaaagttctgcgttaccctgatcacttctcaagtggtgtatacttgtggtcacaccatgagaagattgtgattgttgataatcaagtatgttatattggaggtcttgatctgtgctttggtcgctacgatagtcctgagcacaaagtcgctgattctcctccagagatgtggccaggaaaggactactacaatcccagggaatctgaacccaattcctgggaggacaccatgaaagatgagctggaccgtgataaatatccccgcatgccttggcatgatgttcagtgtgctctctatggcccaccttgccgtgatgtagcgaggcattttgttcagcgctggaattatgcaaagaggaacaaagctctaaatgagcaagcaattcccttactgatgcctcattaccacatggtaattccacactacaagggtagaagcaaagaaacaaatgatgaggctgagggtaaacaatacaatgataaggatgttgatattggaaagccagtcttgacatcacgcacatcatgtcaggatgttccattgctcttacctcaagagcttgaacctcgtgaattatccagttcagatttaagggtgaatgatttagatattaaccattcagatcgtttaaacaagaagaactttaatcagcctttgctcaaccgaaaggcaaaactggattcttctcatcaggatttacctatgagaagttttgtagacaatctcagttcccttgagccatcatctgttagacgttttgattcgtcaaaagatgataggaatcacattgacaaaaaatggtgggaaatgcaggagcgaggcaaccaagttgcttcattacttgatattggacaagttggtccaagggtaacatgtcgttgtcaggttgttaggagtgtcggtcaatggtcagctgggaccactcaaattgaaggaagcatccacaatgcctacttttctctgattgagaaggcagaacacttcgtatacattgagaatcaatttttcatatcgggtctgtcaggagatgatacgattaaaaaccgcgtactggaagcattgtatcggcgcatacttagagctgaaagagagaaaaagcgctttaaggccatcatcatcatacctcttttacctggttttcagggaggcattgatgatggtggagcagcatcagtcagggcaatcatgcattggcaatatcggactatctgcagaggttctaattcgattcttcagaatctatttgatgttattggacctaaagcacatgattacatctccttttatgggcttagagcacatggtaaactccatgatgggggtcccttggttactagtcagatttatgtacatagcaagttaatgatagttgatgaccgcatcacattgattggctcagctaatattaatgatagaagcttgcttggatcaagagactccgagattgctgtggtcatcgaagataaagaggttgttaattcaaaaatggatggaagaccttgggaagctgggaagtcctctttaagcctacgcctctcgctgtgggtggaacaccttggccttcatccaggagaggttagccatatcatggatcctatagatgattcaacattcaaaaatatctggatggccactgccaagacaaataccatgatataccaagatgtcttcgggtgtgtacccaacgatctcattcactcaagctttgctcacttgagggacaaaattggccacactacaattgatttgggtgttgcccaagagaagctagaagcttaccaagagggtgatctcaaaagtatcaaccctatggacagactacagttagtcaggggccaccttgtttcgtttccgttggatttcatgtgccaagaggacttgagaccatatttcagtgaaagtgagtactacacatcaccacaggttttccattagcctctctgtctgcctcgtaaagttactcaaccggctgtacatgttgcaaagatcaccttgtagatgctctacacatgttgtcaaataggaaacaaaaaaaaattaatatattatcataccattagagtattagaattgtttcctagaaagaaaatagtatatcagtatagttcattcgttccaacaacttttagtttcgggaaagaaacaatcaaattcattgtttataagtgcaaataataggagtttccttagttcaacacattttctttggaatgaatata

SEQ ID NO: 204555 - DNA, 3819 bp, Zea Mays
gcagggttcttctcgttcgcaagggctaccgctagtcgctaccggcccctcacaagtcacatctaccccgtgcagcctctgataggaagcaactggccaactgccaactaagctgctccagaacaatagcgcacgtatgatgttgagctggaggatgggctcctaaagaatacccaagcagtccttcggagtcgggactagacatgaagtccatgctccaggtttggggcatcttctgctgtgtgtgttcctgtgcacttggacaaaatacttctgcgcggcccagtgtcgtgaacgttggagctctcttcacgttccactcgacgattgggagagccgccaaggtggccatcgctgctgcggtcaatgacatcaacagagatccaagcgttcttcaggggacgaagctggttgttcagatgcaagataccaactacagcggtttcatcagcattgttcaagccttgcaattcatggagaaagacacgatcgcgatcatcgggccacagtcttcagtcgttgcgcacgtcatatcccacgtcgcaaatgaactccagcgaccagttccagatggcttccgtggctgcgatagttgattactacgggtggaagatggtgacagccgtgtacatcgatgacgactacggaagaaacggcgtgtcctccttagacgacgagcttgccaagaggagactgaagatcctgtacaaagctgcgatcaggccaggggcaagaaagagcgagatggccgccgtgctggtcaaggctgcgatgatggagtcccgggttttcgtgctgcacgcgcgtgacgattctggaatcgacgtgttctcgctggcgtacaatctgagcatgacatccggtggatacgtgtggatcgcgacagattggctcaccgcgtgcctcgactcagctcctcgtcttggaactggattactgaacacgatgcagggtgttctcacgttgcgtcagcacacggagaacaccagtaggaagaaggcgttggtttcgcgatggagtgaagtggcgaaggaggaggaggaggaggacggcggcagcttgcccaatacctatggcctctatgcttatgacactgtctggatgcttgcccatgggttggatgcgtttttcaacagtggcggaaacatttccttctctccagaccccagactgcgtgcggttgtaggaggagctctgaatctggacgcactgagcgtcttcgacgaggggacgctgttgctagaaagaatccgcaacgtgagtttcatgggtgcgactggccctgtaaagttggactcagatggtaaccttatccagcctgcatatgacattgtaaacgtagtagggtctggtttgaggacgattggctattggtccaactactctgggctgtccgttgtgtcccctgagactctgtacaagaaaccattcaatgtcagtgcaaaccaggagctccacgctgccatctggccaggcgagactgtaacgaggccccggggatgggtgttccctaacaacgggaatgagctgaggattggagttcccgacagggtaagctaccgtcagtttatatcagtagacaatcaaactggaacggtgggaggtttctgcatcgatgtgtttgctgctgcgataaacctgctgcagtacccagtcacatataggtttgtgccttttggcaatggccgtgagaatccaagctacacggaacttatcggtcgaattctgacgaatgaatttgatgctgttgttggggatgtagctattgtcacgaatcggacaaaagttgttgatttcacccagccatacgttgcttctggcctcgtcatacttaccgccgtcaagacacagagctcggatgcatgggctttcctgcagccgtttaccatcagaatgtggtctgtgacaggggtgttctttctggtcgtaggagcagtgatttggttgctcgagcacagaatcaacgacgacttccgtggtcctccagcgaagcaggttattactgttttctggttcagtttctcaactctgttctttgcccacagagaggacacgaggagcacgctgggccgcgtcgtggtcatcatctggctgttcgtagtcctgatcatccagtccagctacaccgcgagcctgacctccatcctcaccgtgcagcagctgacgtccccgatcaagggcatcgacagcctgatcgccagcgacgagcccatcgggttccaggttgggtccttcgcggagagctacctggtgcacgagctgggcgtctccccgtccaggctcaaggcgctcggcaccccggacgagtacaagaacgcgctagagctcgggcctcgcaagggaggcgtcgtggccatcgtcgacgagcgcccgtacgtcgaggtcttcctggtgcagcacgacaagttcgccatcgtgggcgcggagttcaccaagagcggctggggcttcgtgagcgttcccgcgtgactcgcctctggccgtggacctgtcgacggcgatcctggcgctgtcggagaacggcgacctgcagaggatccacgacaagtggctgtcgaacgggccgtcgccccagtccacgaccgacctggagccggaacggctgcgggtgcagagcttctcggcgctgttcctcctctgcggcgcggcgtgcctcgcggcgctggccatccacggctgcatcctggcccggcagtactccctccacgtggcgtcccagccgccggacgcggtggccacgggggccgacggcgccatccgccgctccagccgcagcagcatccggtcgttcctgtccttcgcggaccgccgggaggcgcagtgcccgagggggagctgcaaggaccccgccgcggcgctgggagggtcctccagcagcggcgtcagcagcttcacgtcaagcaacgccagcgtatcgaggtagccgcgtccgatggaccggcatacgcacggcacgatacgtcgatgcctcagcacagatagtccacactactgtacgtgcgcgtaggccgtagatgccggcgtgtaaatggtcgtatcgtagagacattgattcgattttgctaccgtctggggtccatggtgcagtgaatttggatccccgtgtgctgaggaattgtatacgtacgagtaaagcagcgcgcatggggggcaggcgggcagggcagtttcgcggccttgcagttgcagcacacgttgcggagattaatgtccgatcctaggcatttgattaaagaacactaccagcctgcgtacataaacatggagatggtaggcatgcaaagcaacgtttgtcggtaacctccccttccgcacaccaaaactagcagcagcagcagcactcgtatggctacccggcggccccctggcaagtttggatggtctggcccagacagtcccagctattgcagttaaactagacttttgcaaaggccttcgacactgtcaattggcgcgcgttaatgaacattatgagagcccgtgccttccctaccaaatggcgctcttggattgattgtttgctttcttcttcaaggtctgcaattcttctccatggatgtcatgggtcatgttttttgtgcaaaaaaggatttgagacaatgggacccaatctccccctatctcttcctccttatagcttgtacatcctttaggttctcatcaagcctgatggtgcagtccttcacccccttctgtcatcagatcagcccggagctatcatacagtatatgctgatgcaggggcgggcccatgaattaaaggatgagtatttggaattttagcgggcatattttttttaacagactagatttgttattt

SEQ ID NO: 204556 - DNA, 3886 bp, Zea Mays
agcaaccatgcctcaacccacaacaagacagcgctgaaagggtagacgagggttcccgggacaattatttgcggatcatgcatgctccacgcttttggatttaccctgttgttttctccaaacacgtatgatgttgagctggaggatgggctcctaaagaatacccaagcagtccttcggagtcgggactagacatgaagtccatgctccaggtttggggcatcttctgctgtgtgtgttcctgtgcacttggacaaaatacttctgcgcggcccagtgtcgtgaacgttggagctctcttcacgttccactcgacgattgggagagccgccaaggtggccatcgctgctgcggtcaatgacatcaacagagatccaagcgttcttcaggggacgaagctggttgttcagatgcaagataccaactacagcggtttcatcagcattgttcaagccttgcaattcatggagaaagacacgatcgcgatcatcgggccacagtcttcagtcgttgcgcacgtcatatcccacgtcgcaaatgaactccaggtgcctctgatgtccttcgctgcaaccgatccgactctgacaccgcttcagtatcctttctttgtgcgcactgtccacagcgaccagttccagatggcttccgtggctgcgatagttgattactacgggtggaagatggtgacagccgtgtacatcgatgacgactacggaagaaacggcgtgtcctccttagacgacgagcttgccaagaggagactgaagatcctgtacaaagctgcgatcaggccaggggcaagaaagagcgagatggccgccgtgctggtcaaggctgcgatgatggagtcccgggttttcgtgctgcacgcgcgtgacgattctggaatcgacgtgttctcgctggcgtacaatctgagcatgacatccggtggatacgtgtggatcgcgacagattggctcaccgcgtgcctcgactcagctcctcgtcttggaactggattactgaacacgatgcagggtgttctcacgttgcgtcagcacacggagaacaccagtaggaagaaggcgttggtttcgcgatggagtgaagtggcgaaggaggaggaggaggaggacggcggcagcttgcccaatacctatggcctctatgcttatgacactgtctggatgcttgcccatgggttggatgcgtttttcaacagtggcggaaacatttccttctctccagaccccagactgcgtgcggttgtaggaggagctctgaatctggacgcactgagcgtcttcgacgaggggacgctgttgctagaaagaatccgcaacgtgagtttcatgggtgcgactggccctgtaaagttggactcagatggtaaccttatccagcctgcatatgacattgtaaacgtagtagggtctggtttgaggacgattggctattggtccaactactctgggctgtccgttgtgtcccctgagactctgtacaagaaaccattcaatgtcagtgcaaaccaggagctccacgctgccatctggccaggcgagactgtaacgaggccccggggatgggtgttccctaacaacgggaatgagctgaggattggagttcccgacagggtaagctaccgtcagtttatatcagtagacaatcaaactggaacggtgggaggtttctgcatcgatgtgtttgctgctgcgataaacctgctgcagtacccagtcacatataggtttgtgccttttggcaatggccgtgagaatccaagctacacggaacttatcggtcgaattctgacgaatgaatttgatgctgttgttggggatgtagctattgtcacgaatcggacaaaagttgttgatttcacccagccatacgttgcttctggcctcgtcatacttaccgccgtcaagacacagagctcggatgcatgggctttcctgcagccgtttaccatcagaatgtggtctgtgacaggggtgttctttctggtcgtaggagcagtgatttggttgctcgagcacagaatcaacgacgacttccgtggtcctccagcgaagcaggttattactgttttctggttcagtttctcaactctgttctttgcccacagagaggacacgaggagcacgctgggccgcgtcgtggtcatcatctggctgttcgtagtcctgatcatccagtccagctacaccgcgagcctgacctccatcctcaccgtgcagcagctgacgtccccgatcaagggcatcgacagcctgatcgccagcgacgagcccatcgggttccaggttgggtccttcgcggagagctacctggtgcacgagctgggcgtctccccgtccaggctcaaggcgctcggcaccccggacgagtacaagaacgcgctagagctcgggcctcgcaagggaggcgtcgtggccatcgtcgacgagcgcccgtacgtcgaggtcttcctggtgcagcacgacaagttcgccatcgtgggcgcggagttcaccaagagcggctggggcttcgcgttcccgcgtgactcgcctctggccgtggacctgtcgacggcgatcctggcgctgtcggagaacggcgacctgcagaggatccacgacaagtggctgtcgaacgggccgtcgccccagtccacgaccgacctggagccggaacggctgcgggtgcagagcttctcggcgctgttcctcctctgcggcgcggcgtgcctcgcggcgctggccatccacggctgcatcctggcccggcagtactccctccacgtggcgtcccagccgccggacgcggtggccacgggggccgacggcgccatccgccgctccagccgcagcagcatccggtcgttcctgtccttcgcggaccgccgggaggcgcagtgcccgagggggagctgcaaggaccccgccgcggcgctgggagggtcctccagcagcggcgtcagcagcttcacgtcaagcaacgccagcgtatcgaggtagccgcgtccgatggaccggcatacgcacggcacgatacgtcgatgcctcagcacagatagtccacactactgtacgtgcgcgtaggccgtagatgccggcgtgtaaatggtcgtatcgtagagacattgattcgattttgctaccgtctggggtccatggtgcagtgaatttggatccccgtgtgctgaggaattgtatacgtacgagtaaagcagcgcgcatggggggcaggcgggcagggcagtttcgcggccttgcagttgcagcacacgttgcggagattaatgtccgatcctaggcatttgattaaagaacactaccagcctgcgtacataaacatggagatggtaggcatgcaaagcaacgtttgtcggtaacctccccttccgcacaccaaaactagcagcagcagcagcactcgtatggctacccggcggccccctggcaagtttggatggtctggcccagacagtcccagctattgcagttaaactagacttttgcaaaggccttcgacactgtcaattggcgcgcgttaatgaacattatgagagcccgtgccttccctaccaaatggcgctcttggattgattgtttgctttcttcttcaaggtctgcaattcttctccatggatgtcatgggtcatgttttttgtgcaaaaaaggatttgagacaatgggacccaatctccccctatctcttcctccttatagcttgtacatcctttaggttctcatcaagcctgatggtgcagtccttcacccccttctgtcatcagatcagcccggagctatcatacagtatatgctgatgcaggggcgggcccatgaattaaaggatgagtatttggaattttagcgggcatattttttttaacagactagatttgttattt

SEQ ID NO: 204557 - DNA, 954 bp, Zea Mays
taaaacttgtcttttggcttctatgcgggcgcaaggttgaggatcctgacatgttagaaaggatacggctaaccatcatcaacaacctgctccagtatcatcctgaatcaagtgagaagttggcaatgggtgaattttttgggataaaacctcctgtgaagaaggttgatatcgatattgcaacacatatagttgttgaagacgacgggccaaaaagaagcatgctttacatagagacagccgatcggcctggcctacttcttgagataatcaagatcatcgcggacacaaatattgatgtggagtcagctgagattgatactgaaggtttggttgcgaaggacaagttccatgtgagttacagaggtgcaaaactaaacagctcctcatctcaggtgttgatcaattgtctgcgttattacctccgaaggcctgagacagatgaagacagctattgactgttgtgttgttgaaccttgctagtactacattaaaaccagaaacttcaaagtttggcttgagttccttctctatgagcccccctgtactgctgcaaatggagtttccattgtagctgataaagtgcaggcaaggcacatgctaatgtgcataggtggcattgaaattgggctcacagtcactgaaccagtttgatattttgtagtcatatacagctgggagcaacagaagttaggtgtcgatcatcattatcccatttggttcctgttacaagggatcacattggaaggtcatcacatgattgacattgtctgtaagttggtacaatccgtttgcatgtaaaactcagctgtggagtgtggtgttctctttggatgaaataaaaagaaagagcattacgaaatcaccgacctccttggtcctgatcagatgtgcttattgtaaccgttttgatatggtcaattggaagagctaagtttatattgaatctttttc

SEQ ID NO: 204558 - DNA, 2704 bp, Zea Mays
caacttcccgtatatatacgacgccgctggcggtggccgcgataactacaacccgagaggccgagaccaattcccaccacaacacacaaggaagcctgcgcaccgccaccaccattcaccgccgccgaagcccgattcccagagacgcctctccttgcccccgtccccaaccccaaccaaagccaccgccgaatcgccttaatctggctggagcgcgccttggagccgtccggacctcagagctcacggggaatctttaatggcgtcggagtcgcatcgccagccataggagcctgattgacagaggcgccgattgccgactgccgactggcaactggcgaggcgatcacttgtcaatcctgtgctatccttttctcggcgcattgtcttgctttgttgatgcatacggcaccgccgatgaatggccgatctcggaggccggcagcggcgcgcggcgcgaaagcggcccccaagagcgacagcagagtgatggagaaggatccgaggaaggccgcgacaccggcgaagggaccggccaacgcgggcacccgggtcaccatgaacagaatccagtcgagagagcgcaagctcgcgctgcagcaagatgtggataagctcaagaagaagctgcgccacgaggagaacgtccaccgcgctctggagcgggcgttcacgcggccgctcggcgccctgcctcgcctgccgccgtatctgccgtctcagacgctagctcttctcgcggaggtggcggtgcttgaggaggaggtcgtccggctggaggagcaagtggtgagtttccggcaagggatctaccaggaggcgatcatcttctcctccaccaagaacgcccagctccccgacggccaagttcccgtgccggcgcagctcgtaccgtcgtacccggtgctgaattccgaggtctcaccggcgacagtgagccaaggtcctccagaccatcctcccggcgctcgtccgtcgccgcacagcggcgtggccaacggcaagcaaacgccacggaaccccgttgctacctcgccgagccaggatgaccggtccggggcagggaaagagaaccagtcgtgcagcaacacgccgagcacgagcagccgccagtcgccgtcgcagcagaagacgcccaagtgcagggcgacgccgcctgacaggcgcagggttactcctgctcagacaagccctgctgttgcgcctgaccgtaaacggcctgccgacgctgctgctggcactggcagcaactctgacaacgtgacgacgtcccacgacgacgcgagctcgagcgtgccgaacaaagtatcggaggagctgctccggtgcctgctggccatcttctcgcagatggggggctcggctgctggcggcggccgaggactaggagacgaggaccagcaggcgctgtccccgtcggtctccggctccagcgagagctcggcgtcgtcggaggcggacgcgtacccgcaggacccctacggcatcctggagctgggcgccagggacatcggcgcctacaagcggttccacgtggtcgacgccgcgtccttcgacggcaacggcgacacgcctctcgttcgtcggagactcaaggccttgctgcggaggctgtcgtcggttgacctggcggggctctcccatcagcagaagctggccttctggatcaacgtctacaattcctgcatgatgaacgcgttcctggagcatgggatacctaccaccccgcaaatgctcgtggcgatgatgcccaaggccaccgtgagcgttggtgggcgcacgcacagcgccatgtccatcgagcatttcatcctgaggctgccctacagcgccaagcaggtgaaggtgagccgggaaggggccaagtgcgacgacggcgacgtgacggcggcgcgcggcgcgttcgggctggagtggcccgagcccctcgtcaccttcgcgctctcctgcggcagctggtcgtcccccgcggtgagggtgtacacggcggcgcgcgtggaggaggagctggaggcggcgaagcgggagtacctacaggcggccgcgggcgtgtgggcggcggggaggctggcggtcccgaagctcctgcactggtacctgctggacttcgccaaggacgtggacgcgctcatggactgggtctgcctgcagctgccgccggagctgcggcaggaggcggtgcgggccgtggaggtcggccgccgcgccggcgccggcggccgcgtccgggtcctcccgtacgagttcaggttcaggtacctgttggcctcctgacgacgcgtgcgtactacggtagggagtagtgtagtgccgtgcgtactggaggtagtagtagtaatgtagtagttcgtgcgcaggtctttgcaataataaaacggagatgggattgactatgcagtttttattactagcgttttgtgctgtatgtgtggattcggtagcggtgtaatggtggtttgtgcgcgcgaggaacgtttctactgtgccgtgcggctgtgctccatccacacagcctgcatttttttttttttgcgagcagggttggttggttggttgtcagctggtttcggaaagcacaaaggacactgccactgcagtgcagtgcagtgcacgctgtctctgtcactgatgattaacctggacctgcagccttttttttttgccttttaccttccatcccggtatgtttccccactgatgattg

SEQ ID NO: 204559 - DNA, 4365 bp, Zea Mays
cccgtccccggccccggccccggccccgcatctctctctcgccctgccgtctccggagtctggagctgctctcacaaccccacacgcgcgcactcgaccccgacccccgacctcgtccaccacccgcttggcgcgcgcgcagtccttacagatttcctcgcccggggtggcggtgaggcctcgcaccgatgagctcggggaccgtcgcggcctcggaccctgggggtggcgagacgaagctggtggcgggagatgacgtcacaatatcggaagctgcgggcgatatgcctgcgttcgccgccgatttgaaagtggaggagaaggctacgttgacgatggatgtggctcatgaaaggggagatatggcggtgagcgacccactctacgcgactgagtcggctgggatggttggtaccgaagggcacggagatgagcccgtggaggacgtggatgcggtgaacggagaggacggtggcgaggaggggacgcaagaagcaggagctggtggtctgctgactgagacggagaggaagccggttctagtggtagatgtgcctgctgctgctggttctgccgctcctgaacatgctgaagccggagagcagtttcctgacagtggaaatagcccagacagcaacttagaggctgctagtctggggaatgttgatcagggtgctagataccgcctcccacctcttgataaaggcaggtttcaagttgctgatcttgtctggggtaaagtgaaaagtcatccttggtggcctggtgaaatttttgatccaacagatgcatctgaattggcgctgaagcatcggaaaaagggcagccacttggtagcttattttggtgacagtacttttgcatggtgcgatgaatcccagttgaagccttttgtaacaaattattcacaaatggagaagcagagcagttcagatggctttgttgggtcagttaataatgcacttgaagaactgtcaaggcgggtactgtcaggtttgagctgctcttgtttggcagaagagcttgctgataatggtatgtcatatacggttgataatgctgggctcaaggatggagttacttgttctgcagttaatcggcctgagatcttgaactgtttcagtccagaaaaccttcttaattatattaaggagttagctctatttcctggccagggaggtgatctattggagttagtgatagcgtgttctcaacttacatctttctatcgatctaagggatgtcctgaacttgcatcatttcaaactagtgatgcgtgggttgaggatgatctggatggtatagacactttgtccacccagaatgtaatggtggaggaacctgtgattaacgaagtgcagcctactcaagataagcccaaaaggggcagggggagacctcggaaacaaaaggctggtcatgaccaggtggtgatggagaaaaggagcacatctaatcaggtcaatgatactagctacaatgagaagaaaagaaacctcaaatcatttgaagattcagagaagtcatcagctccaactggtggtggttctttcaagattggtgagtgtattcggcgagctgcaagccagctgacaggatcttcatctattatgaaggctcagaatgaaccaacagtctataataacgctgctgaaggagagaatggggaatttgatgtctctagtgatgatgctggtgatgaacttactgtggagaaacgagcaaaaaggaggcgtctgcacataaatcacgctgcagatcccagggaattactgtcacaactatgcttggttgcaacagagccaatgaatggatatagtttctcagcaatgataatcggttacttcaacgattacagaaactatattgtttctactactactgaagcaaacattgttgataaaggtacatctagaagagggaggaagagaaaagaagttataccttctcctgaggtagagacaacggatcatatgcaggactcgtattggtccggattgagcttgtataatcacccagttcatgacctaaaaagagagagtccgactacaaggccaagacggaaacggagatcctcaagacatgcatatatacctttgtcggaacttggggagccggttcctaaaaaacagatacaagtgatggaaagatctatcatccatgtcgatgagaagatggttgatgagttgaagcccactgcacttgttttgacctttggcaggcaagtatagcacttttggaccttcgcttcgaagttaccgtcttgtcagtatgccactttctccagagacacaatcagcaaataatcctgaaaatcatggcttggagattccaggtttgaatatgtccgaagctcctaaggattccatggaagttgacctggtgcagaaaacagataaagtaaaagttacaggagaactgtcatctgaagaagttgagactgtaaggcaaacatgtctagtggaagctgcagacagtacatttgtcagtgaagttgacaggcttgagaaagcaggaaatattgatgctgagctaattgtccatgtgaatcagattggggaaggtgcagaagctgcatctgtatctgaagagtcatctcagcaagtgggtgacattgagcaagcttacactcaaaaggcagcgtcagtcagtgatctacccacagagatagaaaccttacattctgatgctataataaaagagttgcctcagaaggctccagataatatgcaaactgatatagccacggccccaaaacagagtcacaatccaggagataatgctgtatttgaagctgtcactgaagtgccaagtactgcacaagatcatagtgaggatgatgttggggatgaagttccagaagagcacactgtatttcctgtgttacaaagtcaaacccctggtgagaagctagtggggcaatctgaaactgaacaaaaagtgggacctgaagatccaaagtcacaagctgaaaatttgactgttgaacctgtcgtacaaggtgcagtcgagcaagtagaaattgaactggaatccaaaactactgttgaagtgtcatgcgaacaaggctatagtattgagcagactgttaacatggaagctgtaattgaagcatcaggtggacaacttgaggtgggaagacgaatttcagaagatgaatctatggctgatgcaaatattgagcactctatggtcatggttgatgaaactgtggaggcaaaagtagtaccactcgaggagagtacagagaataatgctgctaccataggagtagttgaggagacagctgaaggtgaaactaaggaggaagcaccagacgagaaggggaaaatagaaaataatgaagatgctgacaaattagctggagagaccagggcaggtgaaattacagttgaggcaccagatgagaaaacagaaattaaagcagatgctgacacaccagctggtgagaccaaagaatgtgaaattacagtagaggcaccagatgagaaaatagcaaacaaaggtattgttgaaccaataatcagggagataactgaagatcaaactgcagctggagaaccagatgaagaagctacaacaactgaggaaacggtagaggatgttaaggtgctagatgataagtctacagcagatgggaaacctgtagagaatgccacagtcgcgacaaatgaggattcaacaacagttgagaatactctgaaggatgcaatggttgcgccaccaggtacaaataccaccaacgccgaagaaactgctctgggtgccacagttaaagcactagatgaggatgctctagcagtggagaagactatagaggatacctcggttgaggcatcagatgtacaagcaggcaggtgcaagtgagtaaaccagcttatcgaaccttgcgttcctgtcagtttctgttgatatcgacgtagtttgctcaactgattctctcatctagaactttagatgatgtgttctgtatagaaaacctgaaactactttagcatcataaggccattaggtattgacaactagggcatctatatccttctcccccttttttgctctataaacttcacctagttgtattgggcgcgtacgtgttggtgttgtcataaacacaatttcctcctatatgtcagttcaatgctcaggtgatcagtgactgagtgaaagccttgaatcaatagggggaaggcatgttcattactacatttaacggttaggcttgcgagtctttagattatctacttggatcaaatgattcttgtatcatttgccatttgtaaccaactgtgttctggaatccttttatcatattacgtagaatatttagataattctatcttctcattggtcatcgagaagtctgca

SEQ ID NO: 204560 - DNA, 2271 bp, Zea Mays
caaggctaggacgagatcagttggtagttcaccagagttcacaaaaaaatcacaagcaagcagttgcgggtgtagctcgcaacaatggcgacgaaccccggcctcttcaccgagtggccgtggaagaagctcggcaacttcaagtacctgctgctggcgccgtgggtggcgcacggcggctacctagcggcgaccaaggggtggagggcggccgacctggggtacgtggccatcctcccgtcgctgctcctccgggcgctgcacaaccaggcgtggatcacggcgtcccgcctgcagagcgcgcgcggccggcggcaggtcgtggaccgcggcatcgagttcgagcaggtggaccgcgagcgcaactgggacgaccagatcctgctcagcggcatcctcctgtacctgggctccacctacctgccggggggccagcacctgccgctgtggcgcgcggacggcgccgcgctcatcgcgctgctgcacgccggccccgtcgagctcgtctactactggctgcaccgcgcgctgcaccaccacttcctctactcccgctaccactcccaccaccacgcctccatcgtcaccgagccaatcacctccgtcatccatccatttgctgagctcgtggcgtatgaactattgttctcaatcccattgattgtgtgcaccttgaacggaactgcttcaattattgcatttgagatttacgtgatctacatcgacttcatgaacaacatgggccactgcaactttgaattggtgcccaattggctcttcaaatggttccctcctctcaagtatctcatgtacacaccctcgtttcattctcttcaccacactcagttcaggacaaactactccctgttcatgccattctatgactacatatataacaccatggacaagtcatcggacacgttgtatgagaagtcactcaagggaaaagaagaaacggcagatgtggttcaccttacccaccttaccagcctgcactccatctatcatatgaggcccgggtttgcagaatatgcttctagaccttacactgccaagtggtatgtgcggatgatgtggccgatgtcatggctctccatggttctgacatggtcatatggttcttcatttactgttgagaggaacgtcatgaagaaactcaaaatgcaatcatgggtcatcccaagatacagtttccattatggattgagttgggagaaggaagcaatcaatagcctcgttgagaaggcaatatgtgaagctgacaagaaaggagctaaagttgttaccctcggactccttaaccaggcacataacctcaacagaaatggagaactttatcttcagaagtgcccaaagttgggagtaagactcgtagatggcaccagcttagctgctgcagtagttgtgaatagtgttcctcaaggcacagatcaagttgttctcgcagggaatatttccaaagttgctcgtgctgttgccgcagcattgtgtaggaagaatatcaaggtagtaatgaccaacaagcaggattaccattttcttaagcctaacatggcagaagatgcagctgagaaccttttgttttcaaagacaactactgcaaaggtgtggttaattggggatggtctagatgcttctgagcagtttaaggcacagaaagggacccagtttatcccatattcacagtttccaccaagaatggcacgcaaggacacctgcacctactcgacaactcctgcaatggttgtacctaaaacactacagaatgtgcactcctgtgagaattggctgccaaggagggtcatgagtgcatggcgcattgctggaatggttcatgcattggagggatggaacgagcatgagtgtggggacatcgtgctagacatggagaaaatgtggtctggtgctcttctgcatggtttccgccctgtggctcaagtttgattctccagttgcaaatgcaaggcagcacaataagttattgaaagttataacataatgctcgcgagaactatgctacatacatatcacacatttctgaatcggaacatgctgtacttctcgggttttctcacagcacaaggaagtgaagttaatagaagtagaccaaacaaactcgcttagcagggaaaaaacaacacagaatgccgagagcgaaaacatctcactgtgtacgccagcgacgggcggagcagacaaggccgcgcagacggctcgaagaattccacgagtggcgcgatgatgccggaaacggaagccgaggagggcaac

SEQ ID NO: 204561 - DNA, 2052 bp, Zea Mays
ctaggacgagatcagttggtagttcaccagagttcacaaaaaaatcacaagcaagcagttgcgggtgtagctcgcaacaatggcgacgaaccccggcctcttcaccgagtggccgtggaagaagctcggcaacttcaagccgtcatccatccatttgctgagctcgtggcgtatgaactattgttctcaatcccattgattgtgtgcaccttgaacggaactgcttcaattattgcatttgagatttacgtgatctacatcgacttcatgaacaacatgggccactgcaactttgaattggtgcccaattggctcttcaaatggttccctcctctcaagtatctcatgtacacaccctcgtttcattctcttcaccacactcagttcaggacaaactactccctgttcatgccattctatgactacatatataacaccatggacaagtcatcggacacgttgtatgagaagtcactcaagggaaaagaagaaacggcagatgtggttcaccttacccaccttaccagcctgcactccatctatcatatgaggcccgggtttgcagaatatgcttctagaccttacactgccaagtggtatgtgcggatgatgtggccgatgtcatggctctccatggttctgacatggtcatatggttcttcatttactgttgagaggaacgtcatgaagaaactcaaaatgcaatcatgggtcatcccaagatacagtttccattatggattgagttgggagaaggaagcaatcaatagcctcgttgagaaggcaatatgtgaagctgacaagaaaggagctaaagttgttaccctcggactccttaaccaggtgtggttaattggggatggtctagatgcttctgagcagtttaaggcacagaaagggacccagtttatcccatattcacagtttccaccaagaatggcacgcaaggacacctgcacctactcgacaactcctgcaatggttgtacctaaaacactacagaatgtgcactcctgtgagaattggctgccaaggagggtcatgagtgcatggcgcattgctggaatggttcatgcattggagggatggaacgagcatgagtgtggggacatcgtgctagacatggagaaaatgtggtctggtgctcttctgcatggtttccgccctgtggctcaagtttgattctccagttgcaaatgcaaggcagcacaataagttattgaaagttataacataatgctcgcgagaactatgctacatacatatcagtatgttggtgttctgtacttctgtttgtccatgctctgcctcttatcacttaagacatctgctatctatgaagttaagatgaactcatgtagtgtaaaaaccattctgcagaagcagggtgaaaaatagcatctctacaatggtaagaggggatgggatgtagtatataagtgagtctgatctactgctagatgtttactactttattcacaccctacgctcaaagatcaacgatgaattaattatgcgtcgatatttctccatgcatcaatgcatatttcaacaaggaaaagtatgagaaatgctattcattctccatgtagagatgtggatgaaagatctgcttcaatgcttcattttgttcatgatccagagaaagtagagatgtcatgtaagatgtaacagtggcccatattgcccatgacgaaaggcaataaaacgtgaccaacatatgctctgctggcactgaaatggagtagcatagcacaagctcttctaaaacatgtaaggcacaattgcacagcatactaatcattgaaacaaagtacaaagtatcaagtatggtatcttatcatacaaacaagattgttaaaatggggaacttcgaaaaccttacctcagtgttgtaatcctagccatttatcaactgtttgccagtacattcatctaattttggtttgcaccatataatgactgtaggccatcattgatagtgacgacaaattcctaccgtttcatccttgtcaaattccacattaacattttcctcgttttctattctcc

SEQ ID NO: 204562 - DNA, 2204 bp, Zea Mays
cttcaagtccttagtccaccgtctaagagccgtcatccatccatttgctgagctcgtggcgtatgaactattgttctcaatcccattgattgtgtgcaccttgaacggaactgcttcaattattgcatttgagatttacgtgatctacatcgacttcatgaacaacatgggccactgcaactttgaattggtgcccaattggctcttcaaatggttccctcctctcaagtatctcatgtacacaccctcgtttcattctcttcaccacactcagttcaggacaaactactccctgttcatgccattctatgactacatatataacaccatggacaagtcatcggacacgttgtatgagaagtcactcaagggaaaagaagaaacggcagatgtggttcaccttacccaccttaccagcctgcactccatctatcatatgaggcccgggtttgcagaatatgcttctagaccttacactgccaagtggtatgtgcggatgatgtggccgatgtcatggctctccatggttctgacatggtcatatggttcttcatttactgttgagaggaacgtcatgaagaaactcaaaatgcaatcatgggtcatcccaagatacagtttccattatggattgagttgggagaaggaagcaatcaatagcctcgttgagaaggcaatatgtgaagctgacaagaaaggagctaaagttgttaccctcggactccttaaccaggcacataacctcaacagaaatggagaactttatcttcagaagtgcccaaagttgggagtaagactcgtagatggcaccagcttagctgctgcagtagttgtgaatagtgttcctcaaggcacagatcaagttgttctcgcagggaatatttccaaagttgctcgtgctgttgccgcagcattgtgtaggaagaatatcaaggtagtaatgaccaacaagcaggattaccattttcttaagcctaacatggcagaagatgcagctgagaaccttttgttttcaaagacaactactgcaaaggtgtggttaattggggatggtctagatgcttctgagcagtttaaggcacagaaagggacccagtttatcccatattcacagtttccaccaagaatggcacgcaaggacacctgcacctactcgacaactcctgcaatggttgtacctaaaacactacagaatgtgcactcctgtgagaattggctgccaaggagggtcatgagtgcatggcgcattgctggaatggttcatgcattggagggatggaacgagcatgagtgtggggacatcgtgctagacatggagaaaatgtggtctggtgctcttctgcatggtttccgccctgtggctcaagtttgattctccagttgcaaatgcaaggcagcacaataagttattgaaagttataacataatgctcgcgagaactatgctacatacatatcagtatgttggtgttctgtacttctgtttgtccatgctctgcctcttatcacttaagacatctgctatctatgaagttaagatgaactcatgtagtgtaaaaaccattctgcagaagcagggtgaaaaatagcatctctacaatggtaagaggggatgggatgtagtatataagtgagtctgatctactgctagatgtttactactttattcacaccctacgctcaaagatcaacgatgaattaattatgcgtcgatatttctccatgcatcaatgcatatttcaacaaggaaaagtatgagaaatgctattcattctccatgtagagatgtggatgaaagatctgcttcaatgcttcattttgttcatgatccagagaaagtagagatgtcatgtaagatgtaacagtggcccatattgcccatgacgaaaggcaataaaacgtgaccaacatatgctctgctggcactgaaatggagtagcatagcacaagctcttctaaaacatcacatttctgaatcggaacatgctgtacttctcgggttttctcacagcacaaggaagtgaagttaatagaagtagaccaaacaaactcgcttagcagggaaaaaacaacacagaatgccgagagcgaaaacatctcactgtgtacgccagcgacgggcggagcagacaaggccgcgcagacggctcgaagaattccacgagtggcgcgatgatgccggaaacggaagccgaggagggcaac

SEQ ID NO: 204563 - DNA, 727 bp, Zea Mays
ttcaagtccttagtccaccgtctaagagccgtcatccatccatttgctgagctcgtggcgtatgaactattgttctcaatcccattgattgtgtgcaccttgaacggaactgcttcaattattgcatttgagatttacgtgatctacatcgacttcatgaacaacatgggccactgcaactttgaattggtgcccaattggctcttcaaatggttccctcctctcaagtatctcatgtacacaccctcttcaggacaaactactccctgttcatgccattctatgactacatatataacaccatggacaagtcatcggacacgttgtatgagaagtcactcaagggaaaagaagaaacggcagatgtggttcaccttacccaccttaccagcctgcactccatctatcatatgaggcccgggtttgcagaatatgcttctagaccttacactgccaagtggtatgtgcggatgatgtggccgatgtcatggctctccatggttctgacatggtcatatggttcttcatttactgttgagaggaacgtcatgaagaaactcaaaatgcaatcatgggtcatcccaagatacagtttccattatggattgagttgggagaaggaagcaatcaatagcctcgttgagaaggcaatatgtgaagctgacaagaaaggagctaaagttgttaccctcggactccttaaccaggaaccggtatccaatgtaag

SEQ ID NO: 204564 - DNA, 916 bp, Zea Mays
gggagggacgcgttctgggtctcaaaaaactcgagtgtgattttagaagatgaaatggtcctgaggcgaaggcattattcacgtggacccggagtccaacctgcagaaaatccacaagcgaaattggctgccagctttaattctgtgtctggaacttcgtttccttcctaaacagaaagaggcgtaaagaaaacgaaagcaaatttcgcaggtggaaagaagaggaagcgaacgagaggcaacggtggccggtcgcgggacgggtggggccacgcctggcctgacgcgggaagccggccggaaccatccaactccgccgcgtcgtcgtcgccttcgtctcgcgtgctcaccaagagaacaaaacgcgagcagccaagaattcaacgtccacgatccctacccgtggcgttggtcgtgaattggcgccgtctccccctgccagccggattccctgctttgttctcaggacttcagctcttcatgggacatccgtgcaaccccgacattcttcttcctcaagaacgggcagcagatcgacaagctcgtgggcgcgaacaaacctgagctcgagaagaaagtgctagcagccgctgatgccagtacgtcctagtgacacaagtggaagtgggcaaacgatctgtgatggcttcccggtgtatagtttccatggttcatttgtgtgcttgtcccatgtttgcctggggacgatgacgttttacaattttggcccccatcgcgcgcactcgtctgtttctctcatggaagccgtgtgaacctgtgcgtgtgtgtgacgaatgaacggaactttatatggaccagtgcttaagagtcttcgcaacataattatgaaggtttgtttgcatgttcttggttgtaacctctttagttgtgcgtggtctttctctttcagcctttt

SEQ ID NO: 204565 - DNA, 2646 bp, Zea Mays
ccgccatgaccaccatatgctgtgagtctgcgacgctggccgcgctgcatctgcatgtgcacgacaaaggaccacagacaggtctcctctgtcagtcggatcgtcgtggtgtcttcgtcgatagacatttgaccacgtccgtataatgttggcgacgaggcggattatgccggggctgatcggtagctgggtatttccatacctgtctgtactgtgctttggtcgttagtttcagagacttcaacaccgtagaaacttaggtagatgcagacactgcttcatagctatgaagcagatttatttatttttttggcttttttgtcctatattgtaggatggatctcgaaatatatgaaagatttctctgtaagccatacatacgacttttatcgaatacgactttccatataattctataagtaatctatgagattgagtatagaattctgtttactctctttttcccctaggacaggaaattctgtatatatagtacttttctcggagataggtggtgtttaatgtggctcacctttattagtatcttcttttaccctgtaactgcaaaatcttgataatgataacatggaaaggaacacactataacctcgtctgaagatgactggtagtgaacgcaagctagaaagcaacaacgatatcagctaagcaacgaactatgacaaggacgcatcacgcatagaccgacgagaactcaaagaatccgcactggcgcgcgatcgggtacagcccgcccccggcggacgacgagccggcgccggcggaatcagaacgtcccgagaagcgtcccctggacgacggcatcgttgagacgaacaaggagaacgacgcgtccctgcccgcgttgctagccgagaagggcctcagggtggccgatgacgcggcgcggaacgtgtgcagggtcgagtgcgacgtcgtcatcgtcgggtccggctgcggcgggggcgtggcggcagcggtgctcgcggcggcggggcacaaggtggtcgtcatcgagaaggggaactacttcacggcgcgggattacacggccatcgaggcgccgtcgatggagcacctctacgagggcggagggttcgtcagcacgctcagcgccagcgcgctgctcctggcaggctcgacggtcggcggcggcacggcggtcaactggtcggcctgcatcaagacccccgacgacgttcgcggggagtgggcgcgcgaccgggggctcccgctgttcgccaccggcgagtacgccgccgccatggacaaggtgttcgagcggctcggcgtgacggccggttgtgcggaggaggggctccagaacaaggtcctccgcaaggggtgcgagaggctcgggtacaaggtggagtcggtgtcgaggaactcgtcggaggggcactactgcggcagctgcggctacggctgccgcaccggcgacaagcgcggcacggacagcacgtggctcgtcgacgcggtgagccgcggcgcggtgatcctgacggggtgcaaggccgagaagctgctgctggagcctggcagtgccgcggacggcagggcgaagcgatgcgtcggcgtggtggcgaggagcaccaacccggcgatcacgaggacgctggaggtgaccgccagggtgacagtctcggcgtgcgggtctctcctgacgccggtgctgctgcgcgggagcgggctccgcaaccggcatatcgggaagaacctccacctccacccgacggccctggtgtggggctacttcccggacaccgtgccggacctcaggggcaggatgtacgagggcggcatcatcacgtccctgcacaaggtggaaggcggcggtccgggcgcgccggcccgcgccatcctcgaggcgccggcgatgggcctggccggcgcggggacgcagttcccctgggtgtccgggcgcgacatgaaggagcggatgctcaggtacgggcgcacggtgcacctcttctccatggtgagggaccgcgggtccggcaccgtgcacggcgagcggcgggtggcgtaccacctggacgccacggaccgggagaacatgcgcgacggcatgcggcgcgcgctgcgcgtcctggccgcggcgggcgcggcggagatcggcacccaccgcagcgacgggcagcggttcgcgtgcgggggcgccacggaggccgcgctggaggagttcctggacggcgtggacgtggtgcgcgggccccagtcgaaggccgaggcgtggaccctgtgctgcaccgcgcaccagatgggcagctgccggatgggcgccacggcccgggacggcgccgtggacgcgcgcggcgagagctgggaggccgggagcctgtacgtgtgcgacggcagcgtcctgcccggcgccgtgggcgtcaaccctatggtcaccatccagtccgtggcctactgcctcgccacgggcatcgccgagtcgctcaggcgcggcccggtttcacgaaaggattgagactctatttggatatgcacgtatatatccacatcaatttatttcaatttacgtgtgttaaagtggatttcacgaaaggaattgctgcagaataggtctgcagcggttcactgttcgtgtgctggagaataataagaaatggaagtgagacaaatctatcttttcatgtcgcg

SEQ ID NO: 204566 - DNA, 2372 bp, Zea Mays
cggccacgcaactcttgcgaccacacgggcatttggtctcctccattcgttgagtgcgcgcgcggcgcggcgcggcggcttgccattacccgtcctctctcttaccccgtcgtcctcttcacctgcaattgagcatttgcttgctccccctccccgacaaaaaccccctgtcccgtcgagcctcgcatccctagttccctacaagcaaggaaggaaacccgggcaacacgacaccggcggtgccagtgccacggaaaattagccggctccctccccgacgtccggcggcggccgagcaacggtgctggctcccaacatggagacgagagcctcctttcgagtgttgtctttgctggcatgctgctaggtgcctgtgcttggggctttgtttccgacaaatatggacggaggtaaaagatttcctggtacaaacgctctcatggtttggctgccaactgcaaaccttcctgaccttgagtttatcataacctcaaattaaacacatcaattcttaaggctcaatctacatgtttctgaattctgatatcctgctatccaactatgacatatgtgctgataggatattcttctttgtaggattttgaagcataaagaaatgtgtgcttgatatgatgtgattataaccgcaactgcttaccaaattacaacatcaatgctgaataatgtaattcagtaacaagttaccagcacatttaaacctaatggcaaatttgacaaaaaaaatgaaggaatatgcaatgttttctctagcataaattctactttcatgcaacggtattggtagtggtttgctcatggcatccggctggactagatttgcttcgtcagcaaactaactagccatgtcagcaatctacctcatacaatgattcacaaggattacagggagtgggtggcagccatgtgtttatatcttggtttttggagtttgttcctgcacaaaatcgtggcacttggatggttattttctcccttttctggactctcggcacgatcttggaagcttcacttgcatgggtcgtattgccagcattgaattggaggtggctgctagtcttcaccgcccttccatgcttcctcttgcttcctttctttggactaacacctgagtctccgcgctacctttgtgcacaaaatagaatgtctgatgccacatctgttctagagagaatggccaacgcaaaccaatcagctcttcccccgggagttctcacgtacaatagacaaacaaaatgtgaccacgacgttctcgctcccgagagtgaatgtcttcttcctgtcagagagaaggaatgcacagttgacaatgccaagagctccgaatctggcagtcttgctgcactgcgcatgctattatcgcgcgaactgctcagatcaactctgcttctttggtttgttttctatgcaaattcctttgcttattacgggttagtattgctgacatcgcagttgagtgatgcaaataaaagttgtgcatctggtgtgtcttttggtctgcgccaaaaggaaatcaatctttacaaagacactttcatcactagtttagcagaaatcccaggtttatttttgtctgctgttcttgttgattggtttggtcgaaaagcttcgatgtggtctatgatgttcgcatgctgtgctttccttggaccacttgtacttcaacagactgagttgttgacaactattcttctatttggtgcccgtgcatgtgccatggggagctttacagtcttgtgcctttatgctccagaggtgtatccaacatttgtccggtcaaccggtgcaggaattgcgaccgccattggtaggattggtggggttgtttgccctctcgttgctgtcgccatgctgcggagctgccatcagatggaagcactcattgtgtttgaggtgatattatgccttgctgcagttgcctgcatgttcttccctgtagagaccaagggccgtggaatggactgatgcaatatcaggcttcagcatctagatgagcttgtagttcatcactgtttgttttatgccatcattatgtacagagaatatacatgtaacatggtgtggatagttcctcaaaatatgtgcaggactttccaaatttgtaagacagattttgtactgaaagacagctggttctgtactgccaaaacactgaaagacagagttgtattactcctcaaaaaaaaaagaaaaaagaaaaaaagctaacaaaaaaaaaaaaaaacggcttgcatatgtcaatcgtcagcccacccgtaacccgtggatacataattatgatcccaaatccttttagcacttgagacaaaagcggcacaccccggcggggggcgtgtgagtaggaacgaaccccg

SEQ ID NO: 204567 - DNA, 1998 bp, Zea Mays
attcgttgagtgcgcgcgcggcgcggcgcggcggcttgccattacccgtcctctctcttaccccgtcgtcctcttcacctgcaattgagcatttgcttgctccccctccccgacaaaaaccccctgtcccgtcgagcctcgcatccctagttccctacaagcaaggaaggaaacccgggcaacacgacaccggcggtgccagtgccacggaaaattagccggctccctccccgacgtccggcggcggccgagcaacggtgctggctcccaacatggagacatataccacagacgacgcgcttaccattatggggtttggaaaattccaagcgcttgttcttttctacgctggaatgggctgggttgcagaagctatggagctcatgctcttgtcgtttctcgggccattcatacgagaggagtggaacgtctccccagagaacgagagcctcctttcgagtgttgtctttgctggcatgctgctaggtgcctgtgcttggggctttgtttccgacaaatatggacggaggactggtttaatattttcaactctatttactagtggaatgggttttctaagcgctttatctcctaactacttatgcttggtggctcttcggtttctggttggagtaggagtgggtggcagccatgtgtttatatcttggtttttggagtttgttcctgcacaaaatcgtggcacttggatggttattttctcccttttctggactctcggcacgatcttggaagcttcacttgcatgggtcgtattgccagcattgaattggaggtggctgctagtcttcaccgcccttccatgcttcctcttgcttcctttctttggactaacacctgagtctccgcgctacctttgtgcacaaaatagaatgtctgatgccacatctgttctagagagaatggccaacgcaaaccaatcagctcttcccccgggagttctcacgtacaatagacaaacaaaatgtgaccacgacgttctcgctcccgagagtgaatgtcttcttcctgtcagagagaaggaatgcacagttgacaatgccaagagctccgaatctggcagtcttgctgcactgcgcatgctattatcgcgcgaactgctcagatcaactctgcttctttggtttgttttctatgcaaattcctttgcttattacgggttagtattgctgacatcgcagttgagtgatgcaaataaaagttgtgcatctggtgtgtcttttggtctgcgccaaaaggaaatcaatctttacaaagacactttcatcactagtttagcagaaatcccaggtttatttttgtctgctgttcttgttgattggtttggtcgaaaagcttcgatgtggtctatgatgttcgcatgctgtgctttccttggaccacttgtacttcaacagactgagttgttgacaactattcttctatttggtgcccgtgcatgtgccatggggagctttacagtcttgtgcctttatgctccagaggtgtatccaacatttgtccggtcaaccggtgcaggaattgcgaccgccattggtaggattggtggggttgtttgccctctcgttgctgtcgccatgctgcggagctgccatcagatggaagcactcattgtgtttgaggtgatattatgccttgctgcagttgcctgcatgttcttccctgtagagaccaagggccgtggaatggactgatgcaatatcaggcttcagcatctagatgagcttgtagttcatcactgtttgttttatgccatcattatgtacagagaatatacatgtaacatggtgtggatagttcctcaaaatatgtgcaggactttccaaatttgtaagacagattttgtactgaaagacagctggttctgtactgccaaaacactgaaagacagagttgtattactcctcagcatttcttgcaagccagaacctttttggccaaaatacacgagttttgcagggtccaggggtaccagaaggg

SEQ ID NO: 204568 - DNA, 3090 bp, Zea Mays
attcgttgagtgcgcgcgcggcgcggcgcggcggcttgccattacccgtcctctctcttaccccgtcgtcctcttcacctgcaattgagcatttgcttgctccccctccccgacaaaaaccccctgtcccgtcgagcctcgcatccctagttccctacaagcaaggaaggaaacccgggcaacacgacaccggcggtgccagtgccacggaaaattagccggctccctccccgacgtccggcggcggccgagcaacggtgctggctcccaacatggagacatataccacagacgacgcgcttaccattatggggtttggaaaattccaagcgcttgttcttttctacgctggaatgggctgggttgcagaagctatggagctcatgctcttgtcgtttctcgggccattcatacgagaggagtggaacgtctccccagagaacgagagcctcctttcgagtgttgtctttgctggcatgctgctaggtgcctgtgcttggggctttgtttccgacaaatatggacggaggattttgaagcataaagaaatgtgtgcttgatatgatgtgattataaccgcaactgcttaccaaattacaacatcaatgctgaataatgtaattcagtaacaagttaccagcacatttaaacctaatggcaaatttgacaaaaaaaatgaaggaatatgcaatgttttctctagcataaattctactttcatgcaagtacgtttggacctttttactacaaaagcatctatttatcatctcaaatttgagaaccaatgcaattttcatctttacagcggtattggtagtggtttgctcatggcatccggctggactagatttgcttcgtcagcaaactaactagccatgtcagcaatctacctcatacaatgattcacaaggattacagggtaaaagcatagataattttccttcatttcctgtttgtgttctctctgctttttctatatctgaacgccaaggacggattcagaacaacattacaatatcactttgagaactatcttgaagatttagttgtataatgctttggcttggaaattgggtactacaaaactaatttttgcagaggatctaatcagaactttcatgaaactagaaagggataagttggatattttcttttcttccaatgccattccttactctatttcaacctcctcctctgtttcaagcataagtgagataaaacttacatttcccctatttcaggactggtttaatattttcaactctatttactagtggaatgggttttctaagcgctttatctcctaactacttatgcttggtggctcttcggtttctggttggagtaggagtgggtggcagccatgtgtttatatcttggtttttggagtttgttcctgcacaaaatcgtggcacttggatggttattttctcccttttctggactctcggcacgatcttggaagcttcacttgcatgggtcgtattgccagcattgaattggaggtggctgctagtcttcaccgcccttccatgcttcctcttgcttcctttctttggactaacacctgagtctccgcgctacctttgtgcacaaaatagaatgtctgatgccacatctgttctagagagaatggccaacgcaaaccaatcagctcttcccccgggagttctcacgtacaatagacaaacaaaatgtgaccacgacgttctcgctcccgagagtgaatgtcttcttcctgtcagagagaaggaatgcacagttgacaatgccaagagctccgaatctggcagtcttgctgcactgcgcatgctattatcgcgcgaactgctcagatcaactctgcttctttggtttgttttctatgcaaattcctttgcttattacgggttagtattgctgacatcgcagttgagtgatgcaaataaaagttgtgcatctggtgtgtcttttggtctgcgccaaaaggaaatcaatctttacaaagacactttcatcactagtttagcagaaatcccaggtttatttttgtctgctgttcttgttgattggtttggtcgaaaagcttcgatgtggtctatgatgttcgcatgctgtgctttccttggaccacttgtacttcaacagactgagttgttgacaactattcttctatttggtgcccgtgcatgtgccatggggagctttacagtcttgtgcctttatgctccagaggtttgtatcagggtcttatggcgtataatattagttatataacatgcttaattgatctgtaaaactgccatcaattaagaatcatagaacaggttcaataccagagtatcccatccatttggaattttggatctactcgttctactttactgatcgcctttttatgtgtgcctatggttctttagactctaaacatgctttgccagtttcgttggtcaagttgtgttgcagttgcagcagagtatgccttcagctaattcccttctttcttttctaggtgtatccaacatttgtccggtcaaccggtgcaggaattgcgaccgccattggtaggattggtggggttgtttgccctctcgttgctgtcgccatgctgcggagctgccatcagatggaagcactcattgtgtttgaggtgatattatgccttgctgcagttgcctgcatgttcttccctgtagagaccaagggccgtggaatggactgatgcaatatcaggcttcagcatctagatgagcttgtagttcatcactgtttgttttatgccatcattatgtacagagaatatacatgtaacatggtgtggatagttcctcaaaatatgtgcaggactttccaaatttgtaagacagattttgtactgaaagacagctggttctgtactgccaaaacactgaaagacagagttgtattactcctcaaaaaaaaaagaaaaaagaaaaaaagctaacaaaaaaaaaaaaaaacggcttgcatatgtcaatcgtcagcccacccgtaacccgtggatacataattatgatcccaaatccttttagcacttgagacaaaagcggcacaccccggcggggggcgtgtgagtaggaacgaaccccg

SEQ ID NO: 204569 - DNA, 2813 bp, Zea Mays
attcgttgagtgcgcgcgcggcgcggcgcggcggcttgccattacccgtcctctctcttaccccgtcgtcctcttcacctgcaattgagcatttgcttgctccccctccccgacaaaaaccccctgtcccgtcgagcctcgcatccctagttccctacaagcaaggaaggaaacccgggcaacacgacaccggcggtgccagtgccacggaaaattagccggctccctccccgacgtccggcggcggccgagcaacggtgctggctcccaacatggagacatataccacagacgacgcgcttaccattatggggtttggaaaattccaagcgcttgttcttttctacgctggaatgggctgggttgcagaagctatggagctcatgctcttgtcgtttctcgggccattcatacgagaggagtggaacgtctccccagagaacgagagcctcctttcgagtgttgtctttgctggcatgctgctaggtgcctgtgcttggggctttgtttccgacaaatatggacggaggattttgaagcataaagaaatgtgtgcttgatatgatgtgattataaccgcaactgcttaccaaattacaacatcaatgctgaataatgtaattcagtaacaagttaccagcacatttaaacctaatggcaaatttgacaaaaaaaatgaaggaatatgcaatgttttctctagcataaattctactttcatgcaagtacgtttggacctttttactacaaaagcatctatttatcatctcaaatttgagaaccaatgcaattttcatctttacagcggtattggtagtggtttgctcatggcatccggctggactagatttgcttcgtcagcaaactaactagccatgtcagcaatctacctcatacaatgattcacaaggattacagggtaaaagcatagataattttccttcatttcctgtttgtgttctctctgctttttctatatctgaacgccaaggacggattcagaacaacattacaatatcactttgagaactatcttgaagatttagttgtataatgctttggcttggaaattgggtactacaaaactaatttttgcagaggatctaatcagaactttcatgaaactagaaagggataagttggatattttcttttcttccaatgccattccttactctatttcaacctcctcctctgtttcaagcataagtgagataaaacttacatttcccctatttcaggactggtttaatattttcaactctatttactagtggaatgggttttctaagcgctttatctcctaactacttatgcttggtggctcttcggtttctggttggagtaggagtgggtggcagccatgtgtttatatcttggtttttggagtttgttcctgcacaaaatcgtggcacttggatggttattttctcccttttctggactctcggcacgatcttggaagcttcacttgcatgggtcgtattgccagcattgaattggaggtggctgctagtcttcaccgcccttccatgcttcctcttgcttcctttctttggactaacacctgagtctccgcgctacctttgtgcacaaaatagaatgtctgatgccacatctgttctagagagaatggccaacgcaaaccaatcagctcttcccccgggagttctcacgtacaatagacaaacaaaatgtgaccacgacgttctcgctcccgagagtgaatgtcttcttcctgtcagagagaaggaatgcacagttgacaatgccaagagctccgaatctggcagtcttgctgcactgcgcatgctattatcgcgcgaactgctcagatcaactctgcttctttggtttgttttctatgcaaattcctttgcttattacgggttagtattgctgacatcgcagttgagtgatgcaaataaaagttgtgcatctggtgtgtcttttggtctgcgccaaaaggaaatcaatctttacaaagacactttcatcactagtttagcagaaatcccaggtttatttttgtctgctgttcttgttgattggtttggtcgaaaagcttcgatgtggtctatgatgttcgcatgctgtgctttccttggaccacttgtacttcaacagactgagttgttgacaactattcttctatttggtgcccgtgcatgtgccatggggagctttacagtcttgtgcctttatgctccagaggtgtatccaacatttgtccggtcaaccggtgcaggaattgcgaccgccattggtaggattggtggggttgtttgccctctcgttgctgtcgccatgctgcggagctgccatcagatggaagcactcattgtgtttgaggtgatattatgccttgctgcagttgcctgcatgttcttccctgtagagaccaagggccgtggaatggactgatgcaatatcaggcttcagcatctagatgagcttgtagttcatcactgtttgttttatgccatcattatgtacagagaatatacatgtaacatggtgtggatagttcctcaaaatatgtgcaggactttccaaatttgtaagacagattttgtactgaaagacagctggttctgtactgccaaaacactgaaagacagagttgtattactcctcaaaaaaaaaagaaaaaagaaaaaaagctaacaaaaaaaaaaaaaaacggcttgcatatgtcaatcgtcagcccacccgtaacccgtggatacataattatgatcccaaatccttttagcacttgagacaaaagcggcacaccccggcggggggcgtgtgagtaggaacgaaccccg

SEQ ID NO: 204570 - DNA, 2243 bp, Zea Mays
cgcagcccacatcgtcgtcttcggttcgtctcttctgttgctgggctcgtcgcgagggtagcagaggccagatgagggacagagcaagcgagagaagctgaagaaacaatttgttttttttctttcttatcgaaacagcacagaccagtgaaagagggagcgaattagcgaaaagaagaagacaatataaaaaataaataaataaataactacaccgaatgcagcgagcgaggtggaggtgggggaaaaagggcgaggtgacaccgtgacagagagaaggcgagggagggatcacgaggtgtgcttcctcctccgcccaatcctgcccaaccaaatccgccagcgccgcctcctttacactcccacctctgtcccggagcaaaaaaaggagggagaggctcgcttcttggatcgcggggtcacgggacgcgcgccgcgggccggtacgctgctgctggcggactgctcgacccttgcctaccagctgctgcctgctgctgcttccttggctggcgccggcgagagacggaggcgaggcgaggcgaggcgacgacgatggaccgggcggcgctcaccgtgggcccggggatggacatgcccataatgcacgacggcgaccgctacgagctcgtccgcgacatcggctccggcaacttcggcgtcgcgcgcctcatgcgcaaccgcgccgacggccagctcgtcgccgtcaagtacatcgagcgaggcgagaagattgacgagaacgtgcagcgggagatcatcaaccaccgctccctgcgccaccccaacatcatccgcttcaaggaggtcatcctcaccccgacgcacctcgccatcgtcatggagtacgcctccggcggggagctcttcgagcgcatctgcaacgctggcaggttcagcgaggacgaggtccattccttttctttcgtcttctctcgctttcatcaacgctgcttgctcgtgctgcctttcctctgtacttgtgatgacactcctgccctgtacaactacaaacatggtacactaatcaaactgtcaaagcttctttcaggcgcgtttctttttccagcaactcatatcaggggtcagctactgccattccatgtatgccatcgcgacttgaagctagagaacaccctgttggacgggagcaccgcgcctcgcctcaagatatgtgattttggctactcaaagtcatcagttctacactcgcagccgaaatctacagtgggaactcctgcatacattgctcctgaggttcttctgaagaaggaatacgatggaaaggtcgctgatgtgtggtcatgtggagtaacgctgtacgtgatgctggtcggtgcatatccatttgaggacccagatgagcctaagaatttcaggaagacaattcagagaatattgggtgtgcagtactcaattccagactatgtccacatatctccagagtgccaaaatcttgtctctaggattttcgtcgccgacccagccaccaggatcaccatccctgagataaggaaccatccatggttcttgaagaacctgccagctgacctaatggatgacagcacgatgagcaagcagtacgaggagcctgagcaaccgatgcagagcatggatgagatcatgcagatcctggctgaggcgaccattccagcagctggtccccatggactcaatcagttcctgaacgacggccttgacctcgacgatgacatggacgacctggactcagataccgatcttgacctggaaagcagtggggaaatcgtgtatgctatttgacagcagcgaggcaatgcgtatcatcagtcgtgctcagatcgtttgttgcgccgcaggttaccgagataattagagagacaggggggaggtatctgctggagatgctgctcgtgtctgatgccgtgatgcccccctttttttcatcctgttatgtttggctgttgtttggttgtggtgcacctccagtgttttacaacagtttggcccttcggaattggttgtgctagaacctcgtccatctgagaagaccctttgtttttgcatccccagctaagagagtgaagtacttgtataattatactgtttgtgtcatatgtatttggtgtaggaaaataaagaaactccattgcccgttcttgttccttccgtgtctcacgaattttttcagaaccctctcaattttagtgtctttttggctgctgtatctcacggctgaatcaccaaggcacaatattttaaac

SEQ ID NO: 204571 - DNA, 3844 bp, Zea Mays
aagacatacaattaacaacgccctgttctgttgaggggaacatgtcgggaagatttaaagaagattaagcgtgcaatgcaacttgctgtttttgctgcttatcacctctccttggagacatcattccttgctgatgagggagcaacacttccgaaagttccttcaatatctgtgacaggtgcaccaaatatttctgctagtcctactgatcatggcacttctgatagtcttaaaaatgctgaagagacatatccacaaaattctactatcagccagatttttgaggttatctctgcatcttcaactttattaccactcgctggagtaagccaaggaatcatgcctgaatgtagagcatcaaaatttctagttgatcctctcaactctcaagatccgtcgaacttatgccatccaaatgtttcctgcaatggtgatttaatatctccatgttctgtcagtggttttagagcaacatatgttggcacacaacatggtggttcaaacaagtctttgcaatcttcaattgctgctgatgtctggcgtgatggtgcattaactttgaaacatagccaaccatgtcattcagaaaaccatagtagcaaccctgctgcagggaatacagatgacaaagacaagctttcagctggttacttatctggtactgacaacaatcagagtatcttagtttccctctcaagcacctgcattcccaaaagctttgcatgccagcgttctcatctcgttcggatcaagttttatggtagttttgataagccattagggaggtatcttcgtgaggacttatttgatcaggcatattgctgcccatcttgtaaggagccttcagaatcacatgtgaggtgctatatgcaccaacatggcagcctaacgattagtgtcaggcgccttcagtctcaaaagttgccaggtgaacatgatgggaggatatggatgtggcacagatgcatgaggtgcaagcttaaggatggaatgccaccagcaacacacagagtaatcatgtctgatgcagcttggggcttatcatttggcaagttcctggagctcagcttttcgaaccatatgactgctaacaggattgcaagttgtggccattctctccaaagggattgtcttcgcttttatgggtatggaaatatggcggccgccttccactatagtcccatgattactctgtctgttaaccttccgcccccagtgctagatttcaatactcatgctacacaagattgggtgaaaagagaggctgttgaggtatttcacacaatggacttgctgcacactgaggtatatgatgcacttaacaatcttgagaagagtatcattactgatgatgattcaaccaagacaagcatacagaggcaaatagttgagatgaaagatttgcttaatgtcgaaagaaatgagtatgaggttttgcttcttccagttataatggggagttctcattcattcaaaccaaatattgatattttggagcttaatcgtgttagacgtagtctcctcctagatgctcacacttgggaccgcaggttgtgcggcatagattcactcgaagcagatagccatatttccagaactgatccgtttaatctagagaaaacccaaggaatcaatgaagggagatctgatttgcttcagactgttaggaaacacggaggaacatatgaagaaccatgtccccaacactcttcagaaagcccaaggaaatctctcttgtctacagagggccatctgaatgataaaaaatatgtcatggttgagacagatttgccggttgggctagtggatggtgatgcaggtcttgatttgatcttcaacaaattgaatacatgtgaagaaggacgttgtctatcaaaatatcctagcaagacaggaccagtagagaggttaccttcacttgcatctattttagctgacaaaatagatatggcatggtctggatttggtgaattagactacaatcttccacatggtttgagcaaagcaaatgaaaatacatctttgaacttgtttggcaatccaagttacaagaaggctactggtccagtccgaatccattcatttgatactgtgttgagattacatcagcgagaacaaactggagtaatacctgcttcactccattcagcactgaaatcaattgattcctttagagacttgacaagccttgttaaggatccaatgacaaacatgcggagagccttttctcaaatatctcccaggacaagaggaaacttaaatactgttcttacacgtgctcccaagtatatcacatcagcttctcgtatggtgaatgatggggctcgactgcttctgcccaatattagctgtgaaggttctgtttttgtcactgtctatgatgacgagccaaccagtgtagtgtcatatgctatgacatcacaagaatatgctgaacatgtcacacataaaatgaatgcaaatactagcttttcagattttactagtagtaatggacttgatggatctctgtcctcacatgaagagctttcaaattttagaggagctcacttcagattatccttcgatgatgatgcatctcctactgatagtacaaagttttctgtcacttgctattttgcaaggcagtttgctgcacttagaaagaaatgttgtccaagtaatagtgattacatacgctcgataagtcgttgtaagcgatggagcgcgcaaggtggaaaaagcaatgtttactttgcaaagacaatggatgagagattcataattaaacaagtcaccaagacagagctggactcttttgtagaatttgctcctcattacttcaggcacttgacagaatcattgacttctagaagccctacttgcctggccaaaatattggggctttatcaggttagtatcaagaattcaaaaggtgggcgtgaggtgaagatggatctgatggtgatggagaacatactcttccaaagatcaatatctagggtgtatgatctgaagggttctgtgcgttcacgttataattctgatgcttctggtcacaacaaagttcttctagactctaatctcatagaagcactacatacaaagcctatttttttggggagtaaggcaaaacaaagattggaaagagctgtctggaatgatacatcatttcttgcgtctttggatgtcatggactactcccttttggtcggtgtcgacgaagagaaaaaagagctggtggttggcatcatcgatttcctgcggcagtacacctgggacaagcagctggagacatgggtgaaggcatcggggatcttagggggccccaagaatgagtctcccaccgtgatttctccaatccagtacaaaaagaggttcaggaaggccatgtcgaggtacttcctcgccgtccccgaccaatggacctcgaaaggtggttaaatcttctcgctgtttttagctgcattttttttgtcagcgaaagcatcactcgttcatccttggcaaattttgagcgaaagggtgacagacggctaggtattctttatttgcctgttgcttccgttttttataccaacaggtgacatgcaatagcttagagcagatgtgagaggacctctgacctggtggatggactgtgacattaagcatgatcattgcagtgtccggtcacatcttgagcgcttgatccaatgtaaatttgacggcgagccacggcgggttatttgacgccgagttgcgccgtactgaggaattgtattagaggattggaacactgatgttaattaatagacatgtaacagcgctctcaacacagttgctttagcgtgaatgtgtgtcctgggctcatattgccgactgc

SEQ ID NO: 204572 - DNA, 5524 bp, Zea Mays
ctgtcctgtatctctcgcaaatctcccacccgccccacataataagaaccgccgccgccgccgccgccgccgctcttctccaacctccgtctctccgagcatgcactctgcgttctcgtcctgccgtcctactcgctacgcggcgcggctctgaattggcatctcccgaccccgcctctcgcgcgccgtccccccgtccccgcacctgccgaagctgaaccccggtcccggcggcattgcgcgcgcgctctctctttctctctctcgctggaggcgggaccgcgggagagccgtctcactcagcggcgccgcgggccgctggccctgccgcacccgcgcagggtggttggtcccgtgtcgggtgtggtgaggcgctgacttggacgggacgcaatcagcggacgaaggaagcttcgggcgtggccgcgtcgcttcgcctcgtctcctgctacttgttcggaacttctccatctttccccacagttggttttgatcttagcgtgccgtatcgccctatcggggatggggttgctggagttcgcggtgggtaaggccagatcccttgccgccgccactgacctggagcagcggcacgtgcacaagggcgagctcgcgcggatcgagacgcggcggtgccaggaggcgggccatggcgtgaccacgcccaaggcccaggggccggcttcgcccgtcgggccgcccacgcccccgcgccgcctgaccgaggcgagatctggaggccaagccgatgccggcccgcgctctcatcctcccggctgtgatactaggcgagtggatgaggaggctgctgacgagtcaggggcccagtttgcagcctctgtgactgacttcttacatgacttctcagataccgaatctagtgttagtaactccatgtacagatcaatgaccccaagccccacagggagtcctacttgtgtggtgaggctggatgatgcttcagatcatgatgcaacaacattgactgactcagacgatgcacgtgagctagtcagcgctgctagcatctctggtgaaggagaactcgtcaatggatcaccacatatcgttgattttggtgatgctatttggtgcccaccaccaccagaagatgagagagatgatgttgaatcgaggatatttggatctgatgacgacgacgacgatgctttcttagaacctagttgtttcggtgataataaaatagccagtgggtacggtgcctttggtgcatctcaacaagatggtgttcagaatgatttgctgaagcactttcgggctctagttgcacagttactggaggcggaaggcattagtttttccagtgacgacaattcaaaaagttggcttgagatagtgtcctcgttggcatggcaagctgctaactatgtgaaacccgataccaagaaaggtggcagcatggatcctagtgattacgtgaagattaaatgcatagcatctgggaagccaactgatagcaattttgttagaggaattgtttgctctaagaatgtaagacacaaacggatggtctcagaacacaggagtgccaaattgctcattttaggaggtgcacttgagtatcaaaaagtttcaaataaattggcatccatagggactatactcgaacaggaaaaggagtatcttaaaactgttgtgagcaagatcgagtctaggcatcctaatgtccttctagttgagaaaagcgcctcatcttttgctcaggagctcttagcaaaagatatttctttagttttgaatgtgaagagacctcttttgaacagaatatcaagatgcacaggtggtcagattgcctcatcaattgacaacattgcctcagctaggcttggacaatgtgacttgttcaaggtggagaaagtcccagaacccttattagctgaacatggagaaaaggggtcaattaagactctgatgttctttgaaggctgtgtgaagcacttgggttgcacggttctgttgaggggaacatgtcgggaagatttaaagaagattaagcgtgcaatgcaacttgctgtttttgctgcttatcacctctccttggagacatcattccttgctgatgagggagcaacacttccgaaagttccttcaatatctgtgacaggtgcaccaaatatttctgctagtcctactgatcatggcacttctgatagtcttaaaaatgctgaagagacatatccacaaaattctactatcagccagatttttgaggttatctctgcatcttcaactttattaccactcgctggagtaagccaaggaatcatgcctgaatgtagagcatcaaaatttctagttgatcctctcaactctcaagatccgtcgaacttatgccatccaaatgtttcctgcaatggtgatttaatatctccatgttctgtcagtggttttagagcaacatatgttggcacacaacatggtggttcaaacaagtctttgcaatcttcaattgctgctgatgtctggcgtgatggtgcattaactttgaaacatagccaaccatgtcattcagaaaaccatagtagcaaccctgctgcagggaatacagatgacaaagacaagctttcagctggttacttatctggtactgacaacaatcagagtatcttagtttccctctcaagcacctgcattcccaaaagctttgcatgccagcgttctcatctcgttcggatcaagttttatggtagttttgataagccattagggaggtatcttcgtgaggacttatttgatcaggcatattgctgcccatcttgtaaggagccttcagaatcacatgtgaggtgctatatgcaccaacatggcagcctaacgattagtgtcaggcgccttcagtctcaaaagttgccaggtgaacatgatgggaggatatggatgtggcacagatgcatgaggtgcaagcttaaggatggaatgccaccagcaacacacagagtaatcatgtctgatgcagcttggggcttatcatttggcaagttcctggagctcagcttttcgaaccatatgactgctaacaggattgcaagttgtggccattctctccaaagggattgtcttcgcttttatgggtatggaaatatggcggccgccttccactatagtcccatgattactctgtctgttaaccttccgcccccagtgctagatttcaatactcatgctacacaagattgggtgaaaagagaggctgttgaggtatttcacacaatggacttgctgcacactgaggtatatgatgcacttaacaatcttgagaagagtatcattactgatgatgattcaaccaagacaagcatacagaggcaaatagttgagatgaaagatttgcttaatgtcgaaagaaatgagtatgaggttttgcttcttccagttataatggggagttctcattcattcaaaccaaatattgatattttggagcttaatcgtgttagacgtagtctcctcctagatgctcacacttgggaccgcaggttgtgcggcatagattcactcgaagcagatagccatatttccagaactgatccgtttaatctagagaaaacccaaggaatcaatgaagggagatctgatttgcttcagactgttaggaaacacggaggaacatatgaagaaccatgtccccaacactcttcagaaagcccaaggaaatctctcttgtctacagagggccatctgaatgataaaaaatatgtcatggttgagacagatttgccggttgggctagtggatggtgatgcaggtcttgatttgatcttcaacaaattgaatacatgtgaagaaggacgttgtctatcaaaatatcctagcaagacaggaccagtagagaggttaccttcacttgcatctattttagctgacaaaatagatatggcatggtctggatttggtgaattagactacaatcttccacatggtttgagcaaagcaaatgaaaatacatctttgaacttgtttggcaatccaagttacaagaaggctactggtccagtccgaatccattcatttgatactgtgttgagattacatcagcgagaacaaactggagtaatacctgcttcactccattcagcactgaaatcaattgattcctttagagacttgacaagccttgttaaggatccaatgacaaacatgcggagagccttttctcaaatatctcccaggacaagaggaaacttaaatactgttcttacacgtgctcccaagtatatcacatcagcttctcgtatggtgaatgatggggctcgactgcttctgcccaatattagctgtgaaggttctgtttttgtcactgtctatgatgacgagccaaccagtgtagtgtcatatgctatgacatcacaagaatatgctgaacatgtcacacataaaatgaatgcaaatactagcttttcagattttactagtagtaatggacttgatggatctctgtcctcacatgaagagctttcaaattttagaggagctcacttcagattatccttcgatgatgatgcatctcctactgatagtacaaagttttctgtcacttgctattttgcaaggcagtttgctgcacttagaaagaaatgttgtccaagtaatagtgattacatacgctcgataagtcgttgtaagcgatggagcgcgcaaggtggaaaaagcaatgtttactttgcaaagacaatggatgagagattcataattaaacaagtcaccaagacagagctggactcttttgtagaatttgctcctcattacttcaggcacttgacagaatcattgacttctagaagccctacttgcctggccaaaatattggggctttatcaggttagtatcaagaattcaaaaggtgggcgtgaggtgaagatggatctgatggtgatggagaacatactcttccaaagatcaatatctagggtgtatgatctgaagggttctgtgcgttcacgttataattctgatgcttctggtcacaacaaagttcttctagactctaatctcatagaagcactacatacaaagcctatttttttggggagtaaggcaaaacaaagattggaaagagctgtctggaatgatacatcatttcttgcgtctttggatgtcatggactactcccttttggtcggtgtcgacgaagagaaaaaagagctggtggttggcatcatcgatttcctgcggcagtacacctgggacaagcagctggagacatgggtgaaggcatcggggatcttagggggccccaagaatgagtctcccaccgtgatttctccaatccagtacaaaaagaggttcaggaaggccatgtcgagtgtccggtcacatcttgagcgcttgatccaatgtaaatttgacggcgagccacggcgggttatttgacgccgagttgcgccgtactgaggaattgtattagaggattggaacactgatgttaattaatagacatgtaacagcgctctcaacacagttgctttagcgtgaatgtgtgtcctgggctcatattgccgactgc

SEQ ID NO: 204573 - DNA, 483 bp, Zea Mays
aactgccggccttttcctatgaaattcagacacgaccacgcacggagcatttggaagtcatcctcgcccagtcgccccaccaccgcctccgtcgacgtcgtcctcgcctccgccgcgctcgcctcaccgccaccgccaccacggccttcctcgtctcatctccgccgtggcctcgccctcgatacgctactgacggggtgcccctcgccgtcgacacgtgacctccgtcatttgcatctcagctccaagatctactccagctgctggcctgtagctggcagtggtgactggcaggctgatctggttggacatggagagcgggctgctcttggcaccaggattggcaccatcaccggcacgcttgtctccaatctccatcgatataattgactgcattcggcttggttgtgcttgttttcagggtgaagacaagaagtgacccagcaatttccattttcttgttcagcagggaaattagagatg

SEQ ID NO: 204574 - DNA, 1369 bp, Zea Mays
ctccctaacacttgcgtacttctaccgcgatgctgctgaagctgctggtcaagtgaactcatgggtagaaaaaattacttctggtctcatcaaagagatcctgcccccaggttctgttgaccacaccaccaggcttgttcttggtaatgcgctctattttaaaggagcttggactgagaagtttgatgcatctaaaacaaaagatagcgagttccaccttcttgatgggagctcagtccaagcacctttcatgtccagtacagacaaacaatatatcgtggcttacaacaacttgaaggtgcttaagcttccataccagcaaggtgcggacaagaggcagttctccatgtacattcttcttccagatgcaaaagatgccatctggagcttggctgaaaagctgagctctgaaccagagttcctggagaaccatgtcccaatgcacaaggttccagtcggacagttcaaagtccccaagttcaagatatcctttggatttgaggcatctgagttgctcaaaggtctcgggctccagcttccgtttagtgctgaagcggacctgtcggggttagttgattcaccagagggacggaacttgtctgtttcgtccgtattccacaagtcatttgtcgaagtgaacgaggaaggaacggaggccgctgccgcatctgctgcaacagttgtgctccggtcgttcacgatgcctcaggatttcgtcgcagatcaccctttcatgttcctgatccgcgaagacttgactggtgtggtgctgtttgtcggccacgtggtgaatcccctccttgctccatagtgtgttgttcagaagtgtggccttggtgcggttccatcccctcacagatgtgtggctttgacagctgatcaagctttatgtgtaatctgccatgttttgtttttgaataaatagatgcttgatcgatgtatgtaaggctgcgagatgatagttcagaattggtatgtgtggtcatggactcatggtacttactgtttcattcttcctctctgatgtttctggttctagtgacctttttccagtgacatctgtaagactgataacatatagattctgttgtgaagcacgtatcggttactgatgattatatttactgtttactttcgagttccacatcctgcttgattctgatgttcagtctttttttatataaaaataatgaattaggtttgtgccaattgtttcacaatgacacggtgttcacgatgataaggcaggcagaaatgagtagtttggtacaaatctctttgaatgaaaatacgtgaccctgaaaactgaacaatccgtttattcgttcggttatttctatacctcattggaagggattgaaaaaaaata

SEQ ID NO: 204575 - DNA, 1766 bp, Zea Mays
ctccagtccactctctcccctcgtttctctcgatctctccagctctcccccctctgcctgcctcttcaacttgtctccagagtccagaaccgccagccgccggcccacttgctcccgagggccgttcgccgccgccgccgctgccgctgccgctgacttctcctgaggagctaactgcctaggccgcttcccttgcagcgccgcgccgaggagcgggggagaccgaaattggcgcgccttcgccgcgctgccgcctcgccgattcgaccgacacgttcctctcccgttcgggcaggcaggtgccgatcccgcgcgccggcctgcgcgggcgcggcggcgcgaggcgtgatgtgcagcggatcggagcgcgggcgtgatcgcgtctccgccgagtagaggccggtgaggcccgcgggtgccggtgtgccaggagggtgggtgggtggggttgttgcgcgtgctggcgtgctgctgcggacttgacgatgtacatagcgcgggagacttccaaggtgtggaggaaggtggccacggaggtatcggtggagctgcagctcctgcgcgagaagtgggggctccttctcgccggtctgatctttcagctgctcgaggagtgcattatttgcatcgacctggaccactgctccaggacttgggatttatggcccttccagagctcgggcaagacaaaggttatcttagtgagactatattttcttccatcttcatctcctttgtgttgtggacattccatccttttatttatcacagcaaacgtttctatactgtcctaatctggcgcagggtgcttgcttttttagttgcttcacaatttttaaggattattacattctattcgacccagctcccaggtccaaattatcattgtcgtgagggctcaaaactggcaactcttccaccacccaatagtgtacttgaagtgctcctgattaactttcctcgtggggtactttttggttgtggtgatttgatattttcatctcacatgattttcactctggttttcgttcgaacttaccaaaaatatggttcgaaaaggtttattaagttccttgcttggttcatggctataattcagagtctccttataattgcttctcgcaagcactactcggtcgatgttgttgttgcgtggtacactgtaaacttagtagtattctttgtcgacaacaagctgccagaaatgccggatcggacgagtggactacatttgcttccattaagctccaaagaaaaagagggcaggcagaaggaggagaaagacagtaaactgaaggacgagttccacaagttactgaatgggaaccatgcggatcctactgatcggcgacagcgggcacagatgaacgggaggcacgacgaagacatcaatcacgcgctctccgaggccactgccaacggcacgtaagggcccgtcggcatctgcttttcaccgggggctttgtccttggcgctcggaggagaatcctcgcgggggtcgagaaaacctgcctggtgtggtgccccggccgcctttttctgaattatgaagctgtccgagattccagcgatccagccattcacatcatgcatcttcctgaaccgctgttgcgttgcgttgcgcaagaatcagaatctcgtggcgttcctcggtacagtttgcaccatacttcattgcaatgacatttatcagaaaggcacggtggggaaatgatcttgtacatactgatccgctaaaacatgcgtgcattcgcctcggccctgca

SEQ ID NO: 204576 - DNA, 1639 bp, Zea Mays
ctccagtccactctctcccctcgtttctctcgatctctccagctctcccccctctgcctgcctcttcaacttgtctccagagtccagaaccgccagccgccggcccacttgctcccgagggccgttcgccgccgccgccgctgccgctgccgctgacttctcctgaggagctaactgcctaggccgcttcccttgcagcgccgcgccgaggagcgggggagaccgaaattggcgcgccttcgccgcgctgccgcctcgccgattcgaccgacacgttcctctcccgttcgggcaggcaggtgccgatcccgcgcgccggcctgcgcgggcgcggcggcgcgaggcgtgatgtgcagcggatcggagcgcgggcgtgatcgcgtctccgccgagtagaggccggtgaggcccgcgggtgccggtgtgccaggagggtgggtgggtggggttgttgcgcgtgctggcgtgctgctgcggacttgacgatgtacatagcgcgggagacttccaaggtgtggaggaaggtggccacggaggtatcggtggagctgcagctcctgcgcgagaagtgggggctccttctcgccggtctgatctttcagtatattcatggattagctgctcgaggagtgcattatttgcatcgacctggaccactgctccaggacttgggatttatggcccttccagagctcgggcaagacaaaggttatcttagtgagactatattttcttccatcttcatctcctttgtgttgtggacattccatccttttatttatcacagcaaacgtttctatactgtcctaatctggcgcagggtgcttgcttttttagttgcttcacaatttttaaggattattacattctattcgacccagctcccaggtccaaattatcattgtcgtgagggctcaaaactggcaactcttccaccacccaatagtgtacttgaagtgctcctgattaactagtctccttataattgcttctcgcaagcactactcggtcgatgttgttgttgcgtggtacactgtaaacttagtagtattctttgtcgacaacaagctgccagaaatgccggatcggacgagtggactacatttgcttccattaagctccaaagaaaaagagggcaggcagaaggaggagaaagacagtaaactgaaggacgagttccacaagttactgaatgggaaccatgcggatcctactgatcggcgacagcgggcacagatgaacgggaggcacgacgaagacatcaatcacgcgctctccgaggccactgccaacggcacgtaagggcccgtcggcatctgcttttcaccgggggctttgtccttggcgctcggaggagaatcctcgcgggggtcgagaaaacctgcctggtgtggtgccccggccgcctttttctgaattatgaagctgtccgagattccagcgatccagccattcacatcatgcatcttcctgaaccgctgttgcgttgcgttgcgcaagaatcagaatctcgtggcgttcctcggtacagtttgcaccatacttcattgcaatgacatttatcagaaaggcacggtggggaaatgatcttgtacatactgatccgctaaaacatgcgtgcattcgcctcggccctgca

SEQ ID NO: 204577 - DNA, 1569 bp, Zea Mays
ctccagtccactctctcccctcgtttctctcgatctctccagctctcccccctctgcctgcctcttcaacttgtctccagagtccagaaccgccagccgccggcccacttgctcccgagggccgttcgccgccgccgccgctgccgctgccgctgacttctcctgaggagctaactgcctaggccgcttcccttgcagcgccgcgccgaggagcgggggagaccgaaattggcgcgccttcgccgcgctgccgcctcgccgattcgaccgacacgttcctctcccgttcgggcaggcaggtgccgatcccgcgcgccggcctgcgcgggcgcggcggcgcgaggcgtgatgtgcagcggatcggagcgcgggcgtgatcgcgtctccgccgagtagaggccggtgtggaggaaggtggccacggaggtatcggtggagctgcagctcctgcgcgagaagtgggggctccttctcgccggtctgatctttcagtatattcatggattagctgctcgaggagtgcattatttgcatcgacctggaccactgctccaggacttgggatttatggcccttccagagctcgggcaagacaaaggttatcttagtgagactatattttcttccatcttcatctcctttgtgttgtggacattccatccttttatttatcacagcaaacgtttctatactgtcctaatctggcgcagggtgcttgcttttttagttgcttcacaatttttaaggattattacattctattcgacccagctcccaggtccaaattatcattgtcgtgagggctcaaaactggcaactcttccaccacccaatagtgtacttgaagtgctcctgattaactgtttattaagttccttgcttggttcatggctataattcagagtctccttataattgcttctcgcaagcactactcggtcgatgttgttgttgcgtggtacactgtaaacttagtagtattctttgtcgacaacaagctgccagaaatgccggatcggacgagtggactacatttgcttccattaagctccaaagaaaaagagggcaggcagaaggaggagaaagacagtaaactgaaggacgagttccacaagttactgaatgggaaccatgcggatcctactgatcggcgacagcgggcacagatgaacgggaggcacgacgaagacatcaatcacgcgctctccgaggccactgccaacggcacgtaagggcccgtcggcatctgcttttcaccgggggctttgtccttggcgctcggaggagaatcctcgcgggggtcgagaaaacctgcctggtgtggtgccccggccgcctttttctgaattatgaagctgtccgagattccagcgatccagccattcacatcatgcatcttcctgaaccgctgttgcgttgcgttgcgcaagaatcagaatctcgtggcgttcctcggtacagtttgcaccatacttcattgcaatgacatttatcagaaaggcacggtggggaaatgatcttgtacatactgatccgctaaaacatgcgtgcattcgcctcggccctgca

SEQ ID NO: 204578 - DNA, 1091 bp, Zea Mays
aaaaaacgtgcttcagctgggctttcggggttacatcaatatttctcttcctccacttcccatcctgttcgtgactcgtgatttcgccgccggaaagccgagggagagggagcgagatggggttcgtcggcgacacgatggagtcaatccgctccatgcagatccgccaattgctcacgcagatcatcagcctcggtatgattgttacctctgcattaatcatatggaaggggttgatagttttcacagggagcgagtcaccagttgtagtggttctctctggtagcatggaacctggatttaaaaggggtgatatcctgtttttgcatatgagcaaagatcctattcgcacaggagaaatagttgttttcaatatcgatggccgtgaaattccaattgtccaccgtgtaattaaggtccatgaacgtcaggacactgcagaagtggacatcctcaccaaaggtgacaataattttggggatgaccgactattatatgcacatgggcagctttggctccagcaacatcacattatgggacgtgctgtgggctaccttccatatgttggctggattacaattatcatgactgagaaaccatttattaagtacctgctgattggtgcactgggcttgctggtcataacgtcgaaagattagagtgtcaaacttcgcgcagtatagattttgctcttatggtgcaacatcagagctttccaggaaaccccctaggctagctatttgcaatgaaaaaatctgcgcaccaggacaaatttgggatagacgattgttgcttttgtttcatcttattacaaacgggcacacgtcaagccggcaacaggttccggtaatgtgctatgaacaagcaattaaaacggagattgatagggtgtgtttggttaggtttttggctttggtttcggcttggacttctctcccctaaaatccaaaagtcaaacaaaggactggatttagggagctgttttctctgaaagtcatttttctcacaatgtaaaacagaaagcatctatagacctaattttagcagcttttggatggaactatgaaaatatatatggaagaatttttaat

SEQ ID NO: 204579 - DNA, 2202 bp, Zea Mays
gctcgcggcactgcaaccgcagtggtcaaacgtgggaaattgaagcggaggaagatagagagaaaaagaggagacgagagagggagagagatgctgcaggtggaggaggcgctggcggcggtgctgtccgcggcggcgggccacgcggagccgcacgccgtgccgctgcagggcgcgctcgggctcgtcctcgcggaggacgtctgcgcgcccgatccgctccctcccttccgcgcctccatcaagggatgtgacatagagaaggattcgattgtgctcaagtctggtgagcatataggtcctgcagaaattgggctacttgcaacagtgggtgtaaccactgtcaaggtgtaccctcggccaacaatcgctgtattctccacaggggatgagctagtgcagccagccactgccaccctcagccgtgattcgtgattccaatcgagccatgcttctagcttgtgctattcagcagaaatgcaaagtggttgacctaggtattgcagaggacactgaagaaagtctcaaggagcatatggatgcagctttgcgttctaatgctgatataatcattacttctggtggtgtttccatgggcgacagagatcttgtcaaaccttgcctggcaaagatgggtaaaattcactttgagaagatccagatgaaaccaggaaagccgttaacctttgctgagatcaccacacaagacacgccaaagccatctaaaacagttcttgcatttggtttgcctggaaatccagtgagctgtattgtttgctttaatctttttgttgttcctgcaatccgtcttctctctggctggtcaaaccctcatctgcaaagagtgcatgtgcgcatatcacatcctttaagagcagacccacatcgtacagagtttcaccgtgcagcaattagatgggtgcttgatgatggatctggtcgacctggttttgttgctgagagtactggccatcaggctagtagccgtcttcttagtatgaaatctgctaatgccctgctggaaataccatccactggacaaatattggcagctgggacatctatccaagccatacttatttcagacataataacttcttcagataaactgcctactccttcaaatccgtatccatctcgtggtccttctgcaaaaagtatttccgcagatgtatctcagattgcatctccacaggatgctgaagttaaagtcgcaattctgactgtaagtgacactgtttcatcaggtgctggccctgataggagtggcccaagagctgtatctgtagtgaattcttcatcagagaaactgggtggtgcaactgtggttgccactgcagttgttcctgatgaagtggacaagatcaagggcattctggtacaatggagtgatattgaccatgttaacctcattctgacattaggtgggactggcttcacacccagagatgtcacaccggaagcaacaaaaatggtgatacagaaagaagcgcctggtctcacatttgttatgcttcaagaaagtttgaagattacaccattcgcaatgctatcccgggccacagctggaatcagaggatcaacacttatcatcaacatgcctggcaacccaaatgctgtggcagaatgcctggaagcactcctcccagcgctcaagcacgccctgaagcagatcaagggtgacaagagggagaagcaccctcgccacactccacatgccgcagcggcgcctgtggaccagtgggagcggagcttcagagccgcatcatctggtagtggtgggtgctcatgtgatccctgaggagccctgatcgactgtgaaataccaaaagagtggaaccaaatacgagacagtaggagagctctgtgtcctccgtgctccattgcattgcctgcgtgcctgcgtccagttcgatgttgaagttttgatcttgttctttggtatgttatatggagatgcgggagtccttgattgttacttgctcacgaacttctttcactgtgctacaaataatgtataatatgtaatctcattgactggccgtttgatgttttgtcatggtctaatagaggagccgcagtaatttgagtggcgtttgtccatgatagtctgacctcgtttttttttgtttggtttgtagaatgaaacgacctgtagatcgatcatcattctaatcctcaaatgttaataattaatacgag

SEQ ID NO: 204580 - DNA, 2290 bp, Zea Mays
gctcgcggcactgcaaccgcagtggtcaaacgtgggaaattgaagcggaggaagatagagagaaaaagaggagacgagagagggagagagatgctgcaggtggaggaggcgctggcggcggtgctgtccgcggcggcgggccacgcggagccgcacgccgtgccgctgcagggcgcgctcgggctcgtcctcgcggaggacgtctgcgcgcccgatccgctccctcccttccgcgcctccatcaagggatgtgacatagagaaggattcgattgtgctcaagtctggtgagcatataggtcctgcagaaattgggctacttgcaacagtgggtgtaaccactgtcaaggtgtaccctcggccaacaatcgctgtattctccacaggggatgagctagtgcagccagccactgccaccctcagccgtggtcagattcgtgattccaatcgagccatgcttctagcttgtgctattcagcagaaatgcaaagtggttgacctaggtattgcagaggacactgaagaaagtctcaaggagcatatggatgcagctttgcgttctaatgctgatataatcattacttctggtggtgtttccatgggcgacagagatcttgtcaaaccttgcctggcaaagatgggtaaaattcactttgagaagatccagatgaaaccaggaaagccgttaacctttgctgagatcaccacacaagacacgccaaagccatctaaaacagttcttgcatttggtttgcctggaaatccagtgagctgtattgtttgctttaatctttttgttgttcctgcaatccgtcttctctctggctggtcaaaccctcatctgcaaaggtagtaatcctcattgttacaatgttgtcagttttgttctcaccttacactattcaacgtattccttataactctataaccagagtgcatgtgcgcatatcacatcctttaagagcagacccacatcgtacagagtttcaccgtgcagcaattagatgggtgcttgatgatggatctggtcgacctggttttgttgctgagagtactggccatcaggctagtagccgtcttcttagtatgaaatctgctaatgccctgctggaaataccatccactggacaaatattggcagctgggacatctatccaagccatacttatttcagacataataacttcttcagataaactgcctactccttcaaatccgtatccatctcgtggtccttctgcaaaaagtatttccgcagatgtatctcagattgcatctccacaggatgctgaagttaaagtcgcaattctgactgtaagtgacactgtttcatcaggtgctggccctgataggagtggcccaagagctgtatctgtagtgaattcttcatcagagaaactgggtggtgcaactgtggttgccactgcagttgttcctgatgaagtggacaagatcaagggcattctggtacaatggagtgatattgaccatgttaacctcattctgacattaggtgggactggcttcacacccagagatgtcacaccggaagcaacaaaaatggtgatacagaaagaagcgcctggtctcacatttgttatgcttcaagaaagtttgaagattacaccattcgcaatgctatcccgggccacagctggaatcagaggatcaacacttatcatcaacatgcctggcaacccaaatgctgtggcagaatgcctggaagcactcctcccagcgctcaagcacgccctgaagcagatcaagggtgacaagagggagaagcaccctcgccacactccacatgccgcagcggcgcctgtggaccagtgggagcggagcttcagagccgcatcatctggtagtggtgggtgctcatgtgatccctgaggagccctgatcgactgtgaaataccaaaagagtggaaccaaatacgagacagtaggagagctctgtgtcctccgtgctccattgcattgcctgcgtgcctgcgtccagttcgatgttgaagttttgatcttgttctttggtatgttatatggagatgcgggagtccttgattgttacttgctcacgaacttctttcactgtgctacaaataatgtataatatgtaatctcattgactggccgtttgatgttttgtcatggtctaatagaggagccgcagtaatttgagtggcgtttgtccatgatagtctgacctcgtttttttttgtttggtttgtagaatgaaacgacctgtagatcgatcatcattctaatcctcaaatgttaataattaatacgag

SEQ ID NO: 204581 - DNA, 511 bp, Zea Mays
aaactatgaatgcaacagctaactttttaaaatatgtaggttgggttgggttcttctggattatctggttcaccgcaaggaagagcatggtcctgacgaagcactccttcggcatgacgagctcggcaatccaatcgtattccgcgtcccggcaagtgaagcagaagcctgtcgactgaggctagttggttgcgtcctgtatgaagcggatatatctatctatgtgaatcacggttttgctgtttgtttgtttgtaagagtgtagaagacagcttgcttgttgcggcagctctgtttctctcggtgactaggtgtataatgctagctctgaactttggcagcatgtacgttcggcatggcggtcaatgctgttatttaaaggatagtgagcagatgttaatgtttatagcaaataaaagcatgttaatgtttattaaatttatcttgaatgaacttattatttctttattatttaggccttgtgactgtttcagctctagaaaaaatttag

SEQ ID NO: 204582 - DNA, 982 bp, Zea Mays
gaatttgtatcggaattttatatctttcatttgagaagatataaatttgaggtttaaattttatgaatctttacaagctcatagctaaaaaacgataataccattttgcatagcagattttatatactatttattcgcaatcaaagaaaaaagaaaaaaggttgatatttatccgttccatccctatcagggccatatatgattacgaatctgttggggaaagtgaagaatgtttgcgaatctgttgggggaagtgaagaataggctgaattgtcgggacaatcacgcttatagcattgactggccttctgaccttcatgttcttcctattggttgccactgctaatgcgatcattgtctcagtcttgatgtcactggccgctgccggaggattcttggccatcttctttgcttgcttggttgcagtgtatattggagcagtatcagttgctatctttgtcatttctgcgactgttatctcagcagttgttggaattttggttgctaccggttgggttgggttcttctggattatctggttcaccgcaaggaagagcatggtcctgacgaagcactccttcggcatgacgagctcggcaatccaatcgtattccgcgtcccggcaagtgaagcagaagcctgtcgactgaggctagttggttgcgtcctgtatgaagcggatatatctatctatgtgaatcacggttttgctgtttgtttgtttgtaagagtgtagaagacagcttgcttgttgcggcagctctgtttctctcggtgactaggtgtataatgctagctctgaactttggcagcatgtacgttcggcatggcggtcaatgctgttatttaaaggatagtgagcagatgttaatgtttatagcaaataaaagcatgttaatgtttattaaatttatcttgaatgaacttattatttctttattatttaggccttgtgactgtttcagctctagaaaaaatttag

SEQ ID NO: 204583 - DNA, 2227 bp, Zea Mays
aatccagcacagcgcatatccccatccgttcctgttcccctcggcgacgccagtacggcagtacgccacgccagtgcccagttgcattgactcctccccggtccccacatcttgccgccaatggatgtcgacgggcccgcccccgccgacgcctctgccaggcccgccaccaacggcgaggccccctccggcgcccgcgaggtcgacgtcggcgaggaggacacgctcgccggcgtcctccgcagcttcgtcgacggcgtctggtacccggacgagcctctgctccggcggctccgggcggcgtcctgcgacgccgcgccgcgcctgaggggggcgtcccggaactccgcgcgggacctgcttgagtggaccaggcggggcagcggcctccgcgccatcctcgtcatctcggtgggcgcgcgcctccttgatccgtcacatgagcatgggttttcttgccctgtttactaaatctggctctatcttctttagtttattttctgtaggtgattgcgtagcggttaactgtgccatggtcactattgcaatgttggtttagatttgtgctttttagatctcaggggcaaggatgaaagtgggtatccgaattgttagacaaatttaatattttaaaatagataggtatggaattttatgttaatctttttttatgttatcaagcatattattacagataagaataaaattttgtataaattgttttatgtattatttgctcctcacaaccgaaaaggtgaaaaaatatctgaatttgtatcggaattttatatctttcatttgagaagatataaatttgaggtttaaattttatgaatctttacaagctcatagctaaaaaacgataataccattttgcatagcagattttatatactatttattcgcaatcaaagaaaaaagaaaaaaggttgatatttatccgttccatccctatcagggccatatatgattacgaatctgttggggaaagtgaagaatgtttgcgaatctgttgggggaagtgaagaataggctgaattgtaatccctctgtcctgaaacctaatagatttaggttttctctaaaccaaacaaccataagtttaactaaattaacaattacaaaataagtattaacatctacgacctcaaataggtaaactataaaaatagatttcatattccttctaaaaattagatttcatagggtagcagtgtttttaatagtactcatttaataacgttgtttctaaaaaacttatctgacttaggttagtttgactttagacaactcaaaattaactgcatttgaagtcgaagggagcatgttgtaagcagaaacgaaaacatggtgaattacttctgctagcaatagaacatggtagattgcttttgcgtgtagttttgatcccataaactcttacatgatacctcgtttttttatggcatccattttaaaaattcttgaaaattgacagtaaacaatttttctaattttatctttgtttgatctggcaggtcgggacaatcacgcttatagcattgactggccttctgaccttcatgttcttcctattggttgccactgctaatgcgatcattgtctcagtcttgatgtcactggccgctgccggaggattcttggccatcttctttgcttgcttggttgcagtgtatattggagcagtatcagttgctatctttgtcatttctgcgactgttatctcagcagttgttggaattttggttgctaccggttgggttgggttcttctggattatctggttcaccgcaaggaagagcatggtcctgacgaagcactccttcggcatgacgagctcggcaatccaatcgtattccgcgtcccggcaagtgaagcagaagcctgtcgactgaggctagttggttgcgtcctgtatgaagcggatatatctatctatgtgaatcacggttttgctgtttgtttgtttgtaagagtgtagaagacagcttgcttgttgcggcagctctgtttctctcggtgactaggtgtataatgctagctctgaactttggcagcatgtacgttcggcatggcggtcaatgctgttatttaaaggatagtgagcagatgttaatgtttatagcaaataaaagcatgttaatgtttattaaatttatcttgaatgaacttattatttctttattatttaggccttgtgactgtttcagctctagaaaaaatttag

SEQ ID NO: 204584 - DNA, 681 bp, Zea Mays
agtagttacaaggcaacatgtatacgtgcatctagagaggctttttgcagaaaataaggaccagcctggtgtatctctgcccagctgagcacatccctccaaaaattgaggtggacctgacaaatcttgatgtcggagatagggtattgatgcatgacattcccgtccatccatcgctcaagttgctgagtaaaaacgagaccatgcccgtctgcaagatcttggcctcaaagccagacgagtaggaggcgctgcaaatacttcagagctgataacattgtacctttaggtggtacagccctccagcagctccgtccctagttcttggcttgctttttggtcatctgccccctaggtttcaatgtgatagtggattcagacaagctatgggcttcaagtaaagatacgaaggaacaaaatgaagaaatatcactggagagacattgtctgtaccaaccgctatagaataacatcctttctcattcagtttgggttcagggacacatgacatgtaagacgactatcctttgctgtggcctgggtgaattcattctctaagctactcttgcagcggctcacaattcatcgtcctgactgcatgcattgtactgtcatgattctacgtattgaatgttgtattcatgcaaacgatccggtagatgagtgttgccctgtacgggc

SEQ ID NO: 204585 - DNA, 1267 bp, Zea Mays
acggttatttcgtatcagcaatagcatacgccccacgtccccacgcggccacgccttctttcctctctgcccccaccacgaaactccacgacgacgcgtccgcgcaccaggcaggcacgaccaccaccgtggcaccgtccaccggagccgagcaacgcgaggagttgagccgatggaggtggcgtcgggggatgaggatctggaatcgctgctccagaacttccatcgcgtgtcccaggggtacaaagatgcacttatgcaggtccaggttttaagagtaaattgcagcactgagttcaaaaggcgggaagctcttgaatcacatattacagatcttaagaaagataatgagcggttaagaaggcaatacacagaaactttattcaaggtcaccaaccaggtgaaattccgcgcagaagctcaaagcctgaaggaagagctggacaaggcaaatagtagattgttatccatggaagaggaacacaagagggaaactgagcaacttaagcacagcagtgaaatgaacatcaatgccctggagaacaagctcagccacgcccttgtacagcaagcaagagatgaagctgcaatgaagcaactgaagttggagctgagtgcccataaatctcacatcgacatgttaggtagcaggttggagcaggttactaatgacgtgcattcgcagtataaaaatgagatccaggatttgagggatgtggtttctgttgaacaagaggagaaaaaggacattcacaggaagcttcagaatgtggaaaacgatgaggatcacgaggatgaagcaggcggagcagcaaagggattctgtctcggtccagcacgtggagacgctgaagcagaaggtcatgaggctccggaaggagaacgagtccctgaagaggaggctggcgagctctgaagtctgaactggagtgcacatgaaaactgcaactgctttccttcacgccgtagttttatctcatactgtaggatgtagaaaaatccactgctccaaaaacacatatcacttccagatgctttaaaactagcaatgataggtatgttttcactgaaagttattatcaccaatcgacacactcataaccttttcatatgaaattatataaagataaactctatgtccaagatatagagttcaaagaactttttagttgacaacattttcatataagacaatttggatgttcgaatattcaatataaagatcacatgcctattaaactatcttgggtaaaaaatataatcaaca

SEQ ID NO: 204586 - DNA, 2841 bp, Zea Mays
cccgcttcctacagccctccggtcgactcgggttcccacttcgccgccgctcccccgtttccttcacctcttctcctgcagtcctgcgcaccttcctccctcccagagtcccagtcaaaccctgctcggaagcaaacggacttcggatcctcggctttaccactcgcgtaccctgctggaggttgttttgtatcatggagagtacagacaagaatgacaaaagaaatgctgtcacagaagagtcttctaatcctggacaaaattgtgaagatgacggggatttttcaatgaaaactgaaatgttaaatgtagaagaagcaccaagtttctcgaatgacaaattaaacaacgaatcagaagtgcagattcaagagggaggtaatgattcagaagagggcttaaacggacaaatgaatgaaaggacaagctcagatgtcatggaatgtgcaagctcaaacgagatcacaaaagagaatctttctgaagataaaactgaagagccagtatttgatggaactgaggttcttgaaatagaagaaatgaggcgttcttccaatcaatctggggaacttgactcagaggctcaggggtctgtactcaatgaccgggctgttgcaataaaaaattttgttaaagaaaggagtgcaattgcagtttcaacatttatgcggcgcctttctggcaaaaaggatgagaatgaatttaaggctgaagctgacaagactattggttcagaatacatggactgcgagaaaaccaggacagatgctgaatccaatcctaaagaggtgcaacagaaatctgtggaaagaactgtctggaacccactgaacttcattaaaattggccgggattctgatacttttgtaactggggaagcgttgaatgaaaatgtgcctggtttgttggagataccaccattgaagggtaggataataatatacacaaaactgggatgtgaagattgcaaaaaggttcgtctattcttgcttcggaaaaggctcaagtatgttgagattaacattgacatcttccctggtagaaagttggaattggagaagaatactgggtcatccactgtaccaaaagtgtattttaatgacctactaattggagggttaattgagttgaggaaaatggaagattctggcatacttgatgagaatatcgatgttctgttcaatgaggaatccccatattctgctccattaccccccttacttggagaagatgatgaatcaggaagtgggaagattgatgagctggcaaccattgtcaaaaaaatgagagagtcaatcactcctaaggatagattctataagatgagaagatttagcaactgctttcttggtagtgaagctgtggatttcatatcagaagatcaatatttggagagagatgagttatccatgtaggcagtggaatttgcaaggaagcttgcaagaaaatacttctttcgtcatgttctagatgaaaatgtcttcgaagatggaaaccacatatatcgtttcctggatcatgatcccatagttatgactcaatgttacaacatccctaggggcatcatcgatgttgcaccaaagcccattgctgaagtagcatcaaggctgaggttgctatcctgtgccatttttgaagcttatgtatcagccgatggtagacatgttgactaccaaagcatccaaggttctgaggaatttaaaagatatattagaacagttgaggagctccagagggtggaaattgattatttatcacgtgaagagaaacttgctttcttcataaatctctacaatatgatggctatccatgcattagtgacatgtggccatcctgctggaccattggacagaaaaaagttttttggagattttaagtatatcattggtggatgtgcttattcactgtcagcaatccaaaatggcattctacgtggcaaccaaaggccaccatacaacattgccaaacctttcgggcagaaagaccgaagatccaaggtggcccttccataccatgaacctcttgttcactttgctttgatatgtggcaccaaatctggacctgcacttaggtgttactcaccaggggatatcgataaagaattgatggaagctgcacgtgatttcgtgaggaatggaggactgattgttgatcctgaagccaaaattgcatctgcaagcaagattttgaaatggtatagcacagattttggtaagaacgagatggaagtgctaaagcatgctgcgaactatcttgagcccgcagagtcagagcagctcttggaactgctcgccagcactcaactgaaagtcatgtaccaaaattacgactggagcatcaacatttagaagtagcttgatgtctatccatatgttctttttacatttgcgtacctattacacaaagttccgtggattggaattctctttctgaagcaggacgaacgtctgacagggtggtgcttatcatttttctgaattccgttcagttaactaaatgagaatcgccgacgccgtcttccctaccggagctattaagatttacaaacggtggtgatgttatcagcacggccggtgatgtggagcgagcgagcatgcgtgaacgctgctgcagcgcgcatgattgcttggaacaattaacttctcgccattacgagcgagcgtttgagctgcacgtattttgttttgttgactggctcgatctgaaaaaaaagctgattctacgattttcctcttaccttttaaactctccaaacagtttaaattacctgtctcccatggtttataatggcattttgaactcaaaaccgttgaaattacctctactatggtttaaagtggc

SEQ ID NO: 204587 - DNA, 2854 bp, Zea Mays
cagaactgcagaaggcagacccacgtgactctttctcccgtttctctcgtcagtttctccgctcgccccgcggttcccgcttcctacagccctccggtcgactcgggttcccacttcgccgccgctcccccgtttccttcacctcttctcctgcagtcctgcgcaccttcctccctcccagagtcccagtcaaaccctgctcggaagcaaacggacttcggatcctcggctttaccactcgcctcgcggacttcggggtttagtttgggacccgttgctccggagttcttcttaaggtaccctgctggaggttgttttgtatcatggagagtacagacaagaatgacaaaagaaatgctgtcacagaagagtcttctaatcctggacaaaattgtgaagatgacggggatttttcaatgaaaactgaaatgttaaatgtagaagaagcaccaagtttctcgaatgacaaattaaacaacgaatcagaagtgcagattcaagagggaggtaatgattcagaagagggcttaaacggacaaatgaatgaaaggacaagctcagatgtcatggaatgtgcaagctcaaacgagatcacaaaagagaatctttctgaagataaaactgaagagccagtatttgatggaactgaggttcttgaaatagaagaaatgaggcgttcttccaatcaatctggggaacttgactcagaggctcaggggtctgtactcaatgaccgggctgttgcaataaaaaattttgttaaagaaaggagtgcaattgcagtttcaacatttatgcggcgcctttctggcaaaaaggatgagaatgaatttaaggctgaagctgacaagactattggttcagaatacatggactgcgagaaaaccaggacagatgctgaatccaatcctaaagaggtgcaacagaaatctgtggaaagaactgtctggaacccactgaacttcattaaaattggccgggattctgatacttttgtaactggggaagcgttgaatgaaaatgtgcctggtttgttggagataccaccattgaagggtaggataataatatacacaaaactgggatgtgaagattgcaaaaaggttcgtctattcttgcttcggaaaaggctcaagtatgttgagattaacattgacatcttccctggtagaaagttggaattggagaagaatactgggtcatccactgtaccaaaagtgtattttaatgacctactaattggagggttaattgagttgaggaaaatggaagattctggcatacttgatgagaatatcgatgttctgttcaatgaggaatccccatattctgctccattaccccccttacttggagaagatgatgaatcaggaagtgggaagattgatgagctggcaaccattgtcaaaaaaatgagagagtcaatcactcctaaggatagattctataagatgagaagatttagcaactgctttcttggtagtgaagctgtggatttcatatcagaagatcaatatttggagagagatgaggcagtggaatttgcaaggaagcttgcaagaaaatacttctttcgtcatgttctagatgaaaatgtcttcgaagatggaaaccacatatatcgtttcctggatcatgatcccatagttatgactcaatgttacaacatccctaggggcatcatcgatgttgcaccaaagcccattgctgaagtagcatcaaggctgaggttgctatcctgtgccatttttgaagcttatgtatcagccgatggtagacatgttgactaccaaagcatccaaggttctgaggaatttaaaagatatattagaacagttgaggagctccagagggtggaaattgattatttatcacgtgaagagaaacttgctttcttcataaatctctacaatatgatggctatccatgcattagtgacatgtggccatcctgctggaccattggacagaaaaaagttttttggagattttaagtatatcattggtggatgtgcttattcactgtcagcaatccaaaatggcattctacgtggcaaccaaaggccaccatacaacattgccaaacctttcgggcagaaagaccgaagatccaaggtggcccttccataccatgaacctcttgttcactttgctttgatatgtggcaccaaatctggacctgcacttaggtgttactcaccaggggatatcgataaagaattgatggaagctgcacgtgatttcgtgaggaatggaggactgattgttgatcctgaagccaaaattgcatctgcaagcaagattttgaaatggtatagcacagattttggtaagaacgagatggaagtgctaaagcatgctgcgaactatcttgagcccgcagagtcagagcagctcttggaactgctcgccagcactcaactgaaagtcatgtaccaaaattacgactggagcatcaacatttagaaggtggtgcttatcatttttctgaattccgttcagttaactaaatgagaatcgccgacgccgtcttccctaccggagctattaagatttacaaacggtggtgatgttatcagcacggccggtgatgtggagcgagcgagcatgcgtgaacgctgctgcagcgcgcatgattgcttggaacaattaacttctcgccattacgagcgagcgtttgagctgcacgtattttgttttgttgactggctcgatctgaaaaaaaagctgattctacgattttcctcttaccttttaaactctccaaacagtttaaattacctgtctcccatggtttataatggcattttgaactcaaaaccgttgaaattacctctactatggtttaaagtggc

SEQ ID NO: 204588 - DNA, 2851 bp, Zea Mays
gtcaaaagtccacgcgatcctctgcactcagtctcagacaggcccgatccgcagaactgcagaaggcagacccacgtgactctttctcccgtttctctcgtcagtttctccgctcgccccgcggttcccgcttcctacagccctccggtcgactcgggttcccacttcgccgccgctcccccgtttccttcacctcttctcctgcagtcctgcgcaccttcctccctcccagagtcccagtcaaaccctgctcggaagcaaacggacttcggatcctcggctttaccactcgcgtaccctgctggaggttgttttgtatcatggagagtacagacaagaatgacaaaagaaatgctgtcacagaagagtcttctaatcctggacaaaattgtgaagatgacggggatttttcaatgaaaactgaaatgttaaatgtagaagaagcaccaagtttctcgaatgacaaattaaacaacgaatcagaagtgcagattcaagagggaggtaatgattcagaagagggcttaaacggacaaatgaatgaaaggacaagctcagatgtcatggaatgtgcaagctcaaacgagatcacaaaagagaatctttctgaagataaaactgaagagccagtatttgatggaactgaggttcttgaaatagaagaaatgaggcgttcttccaatcaatctggggaacttgactcagaggctcaggggtctgtactcaatgaccgggctgttgcaataaaaaattttgttaaagaaaggagtgcaattgcagtttcaacatttatgcggcgcctttctggcaaaaaggatgagaatgaatttaaggctgaagctgacaagactattggttcagaatacatggactgcgagaaaaccaggacagatgctgaatccaatcctaaagaggtgcaacagaaatctgtggaaagaactgtctggaacccactgaacttcattaaaattggccgggattctgatacttttgtaactggggaagcgttgaatgaaaatgtgcctggtttgttggagataccaccattgaagggtaggataataatatacacaaaactgggatgtgaagattgcaaaaaggttcgtctattcttgcttcggaaaaggctcaagtatgttgagattaacattgacatcttccctggtagaaagttggaattggagaagaatactgggtcatccactgtaccaaaagtgtattttaatgacctactaattggagggttaattgagttgaggaaaatggaagattctggcatacttgatgagaatatcgatgttctgttcaatgaggaatccccatattctgctccattaccccccttacttggagaagatgatgaatcaggaagtgggaagattgatgagctggcaaccattgtcaaaaaaatgagagagtcaatcactcctaaggatagattctataagatgagaagatttagcaactgctttcttggtagtgaagctgtggatttcatatcagaagatcaatatttggagagagatgaggcagtggaatttgcaaggaagcttgcaagaaaatacttctttcgtcatgttctagatgaaaatgtcttcgaagatggaaaccacatatatcgtttcctggatcatgatcccatagttatgactcaatgttacaacatccctaggggcatcatcgatgttgcaccaaagcccattgctgaagtagcatcaaggctgaggttgctatcctgtgccatttttgaagcttatgtatcagccgatggtagacatgttgactaccaaagcatccaaggttctgaggaatttaaaagatatattagaacagttgaggagctccagagggtggaaattgattatttatcacgtgaagagaaacttgctttcttcataaatctctacaatatgatggctatccatgcattagtgacatgtggccatcctgctggaccattggacagaaaaaagttttttggagattttaagtatatcattggtggatgtgcttattcactgtcagcaatccaaaatggcattctacgtggcaaccaaaggccaccatacaacattgccaaacctttcgggcagaaagaccgaagatccaaggtggcccttccataccatgaacctcttgttcactttgctttgatatgtggcaccaaatctggacctgcacttaggtgttactcaccaggggatatcgataaagaattgatggaagctgcacgtgatttcgtgaggaatggaggactgattgttgatcctgaagccaaaattgcatctgcaagcaagattttgaaatggtatagcacagattttggtaagaacgagatggaagtgctaaagcatgctgcgaactatcttgagcccgcagagtcagagcagctcttggaactgctcgccagcactcaactgaaagtcatgtaccaaaattacgactggagcatcaacatttagaaggtggtgcttatcatttttctgaattccgttcagttaactaaatgagaatcgccgacgccgtcttccctaccggagctattaagatttacaaacggtggtgatgttatcagcacggccggtgatgtggagcgagcgagcatgcgtgaacgctgctgcagcgcgcatgattgcttggaacaattaacttctcgccattacgagcgagcgtttgagctgcacgtattttgttttgttgactggctcgatctgaaaaaaaagctgattctacgattttcctcttaccttttaaactctccaaacagtttaaattacctgtctcccatggtttataatggcattttgaactcaaaaccgttgaaattacctctactatggtttaaagtggc

SEQ ID NO: 204589 - DNA, 617 bp, Zea Mays
ctcaagtcacacgacactgcagatcagcgttcaccaaaagaagcacatatactacgcaacaagatcgactcgtcagagtccaaattttcctgcgtgttcgttgtcgtgttccgtgcccattgagataaaaacagcacctgctgacttccgcttccctacaacaaaccaaacaaggcattgttttactcgctatgtcgagtaccacaggtgtttgaatgccaaaggggatgatgctggtgtttgcgaaaaatttgccaagtactacaggtccctttgccctggagaatgggttgagaaatggaacgagcagagggagcatgggacgtttccaggacctctctgaatgtaccgcccgagacctccagttggaccagtcaacaagttggccaggcagtcctactgttccattctgcattcctacttccagaatcgtaaatgccttttgtcccttgctcttcaaccagtcaccacaaaactgttagtgatgcctctcgtatgcagctctaataatttggctacagttgccccacatgcagccttgttttgtgtgtggactgtggacctcattttgtaaacgtctgaatggacttgcattttctttctatgtataaaaaaaa

SEQ ID NO: 204590 - DNA, 588 bp, Zea Mays
caccgctctgtccgcggattcggcacggcagcggccacggatgcggtggaccccgttcttcacgttccgttcctttgcgttcctggcagattgagataaaaacagcacctgctgacttccgcttccctacaacaaaccaaacaaggcattgttttactcgctatgtcgagtaccacaggtgtttgaatgccaaaggggatgatgctggtgtttgcgaaaaatttgccaagtactacaggtccctttgccctggagaatgggttgagaaatggaacgagcagagggagcatgggacgtttccaggacctctctgaatgtaccgcccgagacctccagttggaccagtcaacaagttggccaggcagtcctactgttccattctgcattcctacttccagaatcgtaaatgccttttgtcccttgctcttcaaccagtcaccacaaaactgttagtgatgcctctcgtatgcagctctaataatttggctacagttgccccacatgcagccttgttttgtgtgtggactgtggacctcattttgtaaacgtctgaatggacttgcattttctttctatgtataaaaaaaa

SEQ ID NO: 204591 - DNA, 2872 bp, Zea Mays
atggagttggattggatcacaatttctaccgacaggaaaagaggctgcagtggaggtggggttggtggtccgggtttgatcaagttcatcaccctcgtcaggccccagccctcgatcgcactcctcacttgtcctctcacctcacctcacctcacctcgcctcgacctcgagcagcgaaagggaggaactctggaccgagaaacaaaaggcaaaagcaccagcaggtgatcaactcccctcggcaacaactccggcctccactcgctgcggatgtttcactcacctgtgacgtgaggcggcacggcaggtagagcgattgcgattctatcggagcgctcatcaggatggatagcgccgcggactcgtcttcaccgaggtgccaccacggtcagtatcgacaggatgccggagaactcgaggaccagactagcaccagcaagatgccgtccagtgcttctgagcttccatgctccttgaagcgtgaggtccgagtccttgaaaagcgactggatgatcaattcgtcatgcgccgtgctcttgagaaagcactaggttacaagccttgtgctgttcatgcatcaagtgtgaactgcattccagagccgactgaggagctaatcaaggagatcgcagtgctcgagctagaggtcatatgcttggagaaacatctcctgacactataccgaaaggcatttgagcaacaattgtcccctgtgaactctgcttgtgacgcggaaaataacaagcagccagcaaggtctttttcaggcatactatctgaagcttcagtgctcagtttctcgaccccaaggaagcatcagccagtccagtccagtcgaatggtcctggcacgcaagtccacgcctacagcttctacaagcgaggctagcagtgaaaagatcaacatcggacgcagccattcctcgctcctgcaccgttctgtcagggtgtctccatccgcaaacaatcttgctagagctctgaaaccatgtcatacttcacctctatcttttgttgaggtacagaatgatatatctgaaatctctttggttccaaagtacttcaataggtttgctgcagggctgagttagtggtacattctgtcttgaactataagggattattatagctactatgcacctggacagagccgtagtcccttatattttataggatgaaggcagtacatgttgtatggtagtagcaaatttgacgtgctgaaatccatcctaacataatctgggccgatatgagcaggaagggaagtgcatggagcctggagttgtgagcttggcggacatcttggggaccagggttgcggaccatgttcctcaaacgcccaacaagatatccgaggacatgatcagatgcatcgcggccatatacataaggctgagagacgtcccttccgccgccgcgcagcatgccttcttcccctcaccgtgctcgtccttctcttcagcaagcggactgtcttccaaatacactgcagatgtatggagttggagccccaggtgcaggagagagagcttcactgaggcgtggcaggtgcaggacaacgagctaggcctaggcggtggtgaagcaagggactcggggctgcagtacgattctgtgatagaggtgtctgctctttgcaagggcgatcagaggtccgctgacgttaaggacatgctgcgcaagtatatgtcacttgtacagcttctagaaagtgtcgacctcggtggaatgaaaaacgaggagaagcttgctttctggatcaacgtgcataacgcgatgatgatgcatgcccatatagagtacgggatcccacagagcaacagcaaaaggatactgcttaccaaggtatcctacatcgttagtggccagagagtaaacgcggagctgatagagtaccagatcctgtgctgccgagcacactcttctggacagtggcttcggctgctgctccacccgaaatggaagtccggcagggacagggacgaggagctgcaaggcttcgccgtggatcggcccgagcctctggtgcacttcgcactgtcctccggtagctactcggatccagtggtgcggctctacagccccaagagcctgttccagcagctggaggcggcgaaggaggagcacatccgcgccaacgtcgccgtcggcgtgcgcgggcgggggcagcgcaagatcatcctccccagggccctggagctgtacgcgagggacgccgggctgggtgcgcaggaggtggtggccgcggtcgcgtgccacctgcccgacggcctccgggacgccgtgcgccggagcccgccggccgggcgggcgcgcggcggcgtggagtggaagccccacaacctggcgttccggtacctgctggccaaggagctggtcggcgggtcgcccgcgtgcgggcggcagcaacttaagaaatgcggccccccgatcggtgcgccgctgcgtgctgatcggtgatccgtcagcagatcgccgtgggtccgtggccgtgccgagccgagcccgaggtgcggtgcgggggtatcagggtctgtatgtacagagggagatggacaggaagatgatctgaatagtgtgcgctctgctgtagctagtttggatcattctgattggatgggattgaaatgaatatgagtgtatcctaacttgccctcaatcccatgaaaaataagtgtatccaaattagccttcaagtgtgaatagtgccacatgaattcttaccttaggacttgtttaggagctgtttaggagctagaggaatgaagagaattaaaaaggctaaaatcattttgatatttaattttaaataaagagaggattttaatctctctaatcctttctattcctcttgcccgtaaacatgcctta

SEQ ID NO: 204592 - DNA, 2634 bp, Zea Mays
atggagttggattggatcacaatttctaccgacaggaaaagaggctgcagtggaggtggggttggtggtccgggtttgatcaagttcatcaccctcgtcaggccccagccctcgatcgcactcctcacttgtcctctcacctcacctcacctcacctcgcctcgacctcgagcagcgaaagggaggaactctggaccgagaaacaaaaggcaaaagcaccagcaggtgatcaactcccctcggcaacaactccggcctccactcgctgcggatgtttcactcacctgtgacgtgaggcggcacggcaggtagagcgattgcgattctatcggagcgctcatcaggatggatagcgccgcggactcgtcttcaccgaggtgccaccacggtcagtatcgacaggatgccggagaactcgaggaccagactagcaccagcaagatgccgtccagtgcttctgagcttccatgctccttgaagcgtgaggtccgagtccttgaaaagcgactggatgatcaattcgtcatgcgccgtgctcttgagaaagcactaggttacaagccttgtgctgttcatgcatcaagtgtgaactgcattccagagccgactgaggagctaatcaaggagatcgcagtgctcgagctagaggtcatatgcttggagaaacatctcctgacactataccgaaaggcatttgagcaacaattgtcccctgtgaactctgcttgtgacgcggaaaataacaagcagccagcaaggtctttttcaggcatactatctgaagcttcagtgctcagtttctcgaccccaaggaagcatcagccagtccagtccagtcgaatggtcctggcacgcaagtccacgcctacagcttctacaagcgaggctagcagtgaaaagatcaacatcggacgcagccattcctcgctcctgcaccgttctgtcagggtgtctccatccgcaaacaatcttgctagagctctgaaaccatgtcatacttcacctctatcttttgttgaggaagggaagtgcatggagcctggagttgtgagcttggcggacatcttggggaccagggttgcggaccatgttcctcaaacgcccaacaagatatccgaggacatgatcagatgcatcgcggccatatacataaggctgagagacgtcccttccgccgccgcgcagcatgccttcttcccctcaccgtgctcgtccttctcttcagcaagcggactgtcttccaaatacactgcagatgtatggagttggagccccaggtgcaggagagagagcttcactgaggcgtggcaggtgcaggacaacgagctaggcctaggcggtggtgaagcaagggactcggggctgcagtacgattctgtgatagaggtgtctgctctttgcaagggcgatcagaggtccgctgacgttaaggacatgctgcgcaagtatatgtcacttgtacagcttctagaaagtgtcgacctcggtggaatgaaaaacgaggagaagcttgctttctggatcaacgtgcataacgcgatgatgatgcatgcccatatagagtacgggatcccacagagcaacagcaaaaggatactgcttaccaaggtatcctacatcgttagtggccagagagtaaacgcggagctgatagagtaccagatcctgtgctgccgagcacactcttctggacagtggcttcggctgctgctccacccgaaatggaagtccggcagggacagggacgaggagctgcaaggcttcgccgtggatcggcccgagcctctggtgcacttcgcactgtcctccggtagctactcggatccagtggtgcggctctacagccccaagagcctgttccagcagctggaggcggcgaaggaggagcacatccgcgccaacgtcgccgtcggcgtgcgcgggcgggggcagcgcaagatcatcctccccagggccctggagctgtacgcgagggacgccgggctgggtgcgcaggaggtggtggccgcggtcgcgtgccacctgcccgacggcctccgggacgccgtgcgccggagcccgccggccgggcgggcgcgcggcggcgtggagtggaagccccacaacctggcgttccggtacctgctggccaaggagctggtcggcgggtcgcccgcgtgcgggcggcagcaacttaagaaatgcggccccccgatcggtgcgccgctgcgtgctgatcggtgatccgtcagcagatcgccgtgggtccgtggccgtgccgagccgagcccgaggtgcggtgcgggggtatcagggtctgtatgtacagagggagatggacaggaagatgatctgaatagtgtgcgctctgctgtagctagtttggatcattctgattggatgggattgaaatgaatatgagtgtatcctaacttgccctcaatcccatgaaaaataagtgtatccaaattagccttcaagtgtgaatagtgccacatgaattcttaccttaggacttgtttaggagctgtttaggagctagaggaatgaagagaattaaaaaggctaaaatcattttgatatttaattttaaataaagagaggattttaatctctctaatcctttctattcctcttgcccgtaaacatgcctta

SEQ ID NO: 204593 - DNA, 2858 bp, Zea Mays
atggagttggattggatcacaatttctaccgacaggaaaagaggctgcagtggaggtggggttggtggtccgggtttgatcaagttcatcaccctcgtcaggccccagccctcgatcgcactcctcacttgtcctctcacctcacctcacctcacctcgcctcgacctcgagcagcgaaagggaggaactctggaccgagaaacaaaaggcaaaagcaccagcaggtgatcaactcccctcggcaacaactccggcctccactcgctgcggatgtttcactcacctgtgacgtgaggcggcacggcaggtagagatttcagcgttctttcgcaatatcgcaatggcgacggcctgcttgagctccgtctcagctcagctcccggcggagaagctgtagacctgtagcccccgcccccctgctaaccagccatgtctcgcaaccgctccaagaggaattagtcttagccaagaaagacggggttcttgtgttttagaagcggttccaggctaacgcccttggggattttgcactgcaagcgattgcgattctatcggagcgctcatcaggatggatagcgccgcggactcgtcttcaccgaggtgccaccacggtcagtatcgacaggatgccggagaactcgaggaccagactagcaccagcaagatgccgtccagtgcttctgagcttccatgctccttgaagcgtgaggtccgagtccttgaaaagcgactggatgatcaattcgtcatgcgccgtgctcttgagaaagcactaggttacaagccttgtgctgttcatgcatcaagtgtgaactgcattccagagccgactgaggagctaatcaaggagatcgcagtgctcgagctagaggtcatatgcttggagaaacatctcctgacactataccgaaaggcatttgagcaacaattgtcccctgtgaactctgcttgtgacgcggaaaataacaagcagccagcaaggtctttttcaggcatactatctgaagcttcagtgctcagtttctcgaccccaaggaagcatcagccagtccagtccagtcgaatggtcctggcacgcaagtccacgcctacagcttctacaagcgaggctagcagtgaaaagatcaacatcggacgcagccattcctcgctcctgcaccgttctgtcagggtgtctccatccgcaaacaatcttgctagagctctgaaaccatgtcatacttcacctctatcttttgttgaggaagggaagtgcatggagcctggagttgtgagcttggcggacatcttggggaccagggttgcggaccatgttcctcaaacgcccaacaagatatccgaggacatgatcagatgcatcgcggccatatacataaggctgagagacgtcccttccgccgccgcgcagcatgccttcttcccctcaccgtgctcgtccttctcttcagcaagcggactgtcttccaaatacactgcagatgtatggagttggagccccaggtgcaggagagagagcttcactgaggcgtggcaggtgcaggacaacgagctaggcctaggcggtggtgaagcaagggactcggggctgcagtacgattctgtgatagaggtgtctgctctttgcaagggcgatcagaggtccgctgacgttaaggacatgctgcgcaagtatatgtcacttgtacagcttctagaaagtgtcgacctcggtggaatgaaaaacgaggagaagcttgctttctggatcaacgtgcataacgcgatgatgatgcatgcccatatagagtacgggatcccacagagcaacagcaaaaggatactgcttaccaaggtatcctacatcgttagtggccagagagtaaacgcggagctgatagagtaccagatcctgtgctgccgagcacactcttctggacagtggcttcggctgctgctccacccgaaatggaagtccggcagggacagggacgaggagctgcaaggcttcgccgtggatcggcccgagcctctggtgcacttcgcactgtcctccggtagctactcggatccagtggtgcggctctacagccccaagagcctgttccagcagctggaggcggcgaaggaggagcacatccgcgccaacgtcgccgtcggcgtgcgcgggcgggggcagcgcaagatcatcctccccagggccctggagctgtacgcgagggacgccgggctgggtgcgcaggaggtggtggccgcggtcgcgtgccacctgcccgacggcctccgggacgccgtgcgccggagcccgccggccgggcgggcgcgcggcggcgtggagtggaagccccacaacctggcgttccggtacctgctggccaaggagctggtcggcgggtcgcccgcgtgcgggcggcagcaacttaagaaatgcggccccccgatcggtgcgccgctgcgtgctgatcggtgatccgtcagcagatcgccgtgggtccgtggccgtgccgagccgagcccgaggtgcggtgcgggggtatcagggtctgtatgtacagagggagatggacaggaagatgatctgaatagtgtgcgctctgctgtagctagtttggatcattctgattggatgggattgaaatgaatatgagtgtatcctaacttgccctcaatcccatgaaaaataagtgtatccaaattagccttcaagtgtgaatagtgccacatgaattcttaccttaggacttgtttaggagctgtttaggagctagaggaatgaagagaattaaaaaggctaaaatcattttgatatttaattttaaataaagagaggattttaatctctctaatcctttctattcctcttgcccgtaaacatgcctta

SEQ ID NO: 204594 - DNA, 2176 bp, Zea Mays
cagataccagatcctcacttagccataggtccgagtccttgaaaagcgactggatgatcaattcgtcatgcgccgtgctcttgagaaagcactaggttacaagccttgtgctgttcatgcatcaagtgtgaactgcattccagagccgactgaggagctaatcaaggagatcgcagtgctcgagctagaggtcatatgcttggagaaacatctcctgacactataccgaaaggcatttgagcaacaattgtcccctgtgaactctgcttgtgacgcggaaaataacaagcagccagcaaggtctttttcaggcatactatctgaagcttcagtgctcagtttctcgaccccaaggaagcatcagccagtccagtccagtcgaatggtcctggcacgcaagtccacgcctacagcttctacaagcgaggctagcagtgaaaagatcaacatcggacgcagccattcctcgctcctgcaccgttctgtcagggtgtctccatccgcaaacaatcttgctagagctctgaaaccatgtcatacttcacctctatcttttgttgaggaagggaagtgcatggagcctggagttgtgagcttggcggacatcttggggaccagggttgcggaccatgttcctcaaacgcccaacaagatatccgaggacatgatcagatgcatcgcggccatatacataaggctgagagacgtcccttccgccgccgcgcagcatgccttcttcccctcaccgtgctcgtccttctcttcagcaagcggactgtcttccaaatacactgcagatgtatggagttggagccccaggtgcaggagagagagcttcactgaggcgtggcaggtgcaggacaacgagctaggcctaggcggtggtgaagcaagggactcggggctgcagtacgattctgtgatagaggtgtctgctctttgcaagggcgatcagaggtccgctgacgttaaggacatgctgcgcaagtatatgtcacttgtacagcttctagaaagtgtcgacctcggtggaatgaaaaacgaggagaagcttgctttctggatcaacgtgcataacgcgatgatgatgcatgcccatatagagtacgggatcccacagagcaacagcaaaaggatactgcttaccaaggtatcctacatcgttagtggccagagagtaaacgcggagctgatagagtaccagatcctgtgctgccgagcacactcttctggacagtggcttcggctgctgctccacccgaaatggaagtccggcagggacagggacgaggagctgcaaggcttcgccgtggatcggcccgagcctctggtgcacttcgcactgtcctccggtagctactcggatccagtggtgcggctctacagccccaagagcctgttccagcagctggaggcggcgaaggaggagcacatccgcgccaacgtcgccgtcggcgtgcgcgggcgggggcagcgcaagatcatcctccccagggccctggagctgtacgcgagggacgccgggctgggtgcgcaggaggtggtggccgcggtcgcgtgccacctgcccgacggcctccgggacgccgtgcgccggagcccgccggccgggcgggcgcgcggcggcgtggagtggaagccccacaacctggcgttccggtacctgctggccaaggagctggtcggcgggtcgcccgcgtgcgggcggcagcaacttaagaaatgcggccccccgatcggtgcgccgctgcgtgctgatcggtgatccgtcagcagatcgccgtgggtccgtggccgtgccgagccgagcccgaggtgcggtgcgggggtatcagggtctgtatgtacagagggagatggacaggaagatgatctgaatagtgtgcgctctgctgtagctagtttggatcattctgattggatgggattgaaatgaatatgagtgtatcctaacttgccctcaatcccatgaaaaataagtgtatccaaattagccttcaagtgtgaatagtgccacatgaattcttaccttaggacttgtttaggagctgtttaggagctagaggaatgaagagaattaaaaaggctaaaatcattttgatatttaattttaaataaagagaggattttaatctctctaatcctttctattcctcttgcccgtaaacatgcctta

SEQ ID NO: 204595 - DNA, 876 bp, Zea Mays
cttgggcgcagtatataagctagcagccggcacctgaagcatctcaagtccacgcaccaccgaacagacagagaccgcggagcagagtggccgcccatcgccatgccgaagctgcagaggttcagaggagtgaggcagaggcactggggctcctgggtctccgagatccgacacccactcctgaagacgaggatctggctgggcacgtacgagacggcggaggacgcggcgcgggcgtacgacgaggcggcgcgcctgatcagcggccccgcggcgcgcaccaacttcccccttaccggcggcggcggcgggggcacgctctccccgacgctgcgcgcgaagctggagaaatgctgctgcacggcgctggcgcaggaggcgcagcacggcgcggacgtgccgcggacgggtgcgggtcggggcgacgacggcagtagccgccgcgatcgccggcgggacggcgacgaggaggatgaggaggccggcgtgaaagtcgagcccgacgccgacgccgacggcgaggagtacatcgaggagatgatcagggagctcacctactacggccctgtcgagatacagcaccacccgtcggccgccggcggcggcggcgcctgctcgagctcggcgatcgggtgactgacgagctgcctatagattgcttagccggctgtgcagtgcagtcgacgtcgttgtacagcgtttgtttcgctaggcatgcaggcacatttagcctggggcccgcccgacccggagggatgatgggccctttcctgttcctgttcctgggctggggattcggggttgagcgagagccagagcgggaaggggaccaaaggatctttcgggataagggctcctgatttggttcaaaaagaa

SEQ ID NO: 204596 - DNA, 1188 bp, Zea Mays
gtgggttccgtccgcgggaaaaccggggtcaatggagtagccttaatttcaggcctttcaggaccgccggactcttctcttgctgctcacacccgccgctctctctgggcatcttgcccttgtggtctctgtttcctcaaattggaaacgaattcaatcatccaaccaaaaatcctgtaggttccttgccactcccgtcaagcgcacggggacatatgcttgccttgttagcaagcctgtagcactacgtctttgtcgcactaggtctcataaaagttcatccctcttcttgcttcctcggtttgtttcacgggattgttccatgccgaccaatttatctttgggctcactcgtcggaatcttcattggtgccttcatggggatgtctacagaaagcggcatgttccgcggggctggtgtcggagcagtctcgggagcagtcttctccattgaggctgttgagtcctgcatcgagatttggaggtccagccattcgggaaaatacagcattctctatgtgctggacatcatctctagcctcttcagcggaagaattgtgtgggagaaagtcagtccagcgctaccagcgtgcagtgcaaagccagatgagtctaatgagcacaccgttcatcgacaacaatgacctttttgaaactggcagtacaggaggcatgtcaagggctctgattgataggatcccaaagatgaggttcagtgctgcaagcaattgtgacaaggaaactgatagcagctgctgctcagtctgcctgcaggattttggagcacagcaatttgtgagggccctgcctcagtgccaacacatattccatgtgcggtgcatcgacaattggctccttcggcacgcatcctgcccactatgccgggccggcgttcatattgaccatatacatatgtaaataaactcgcagggtggcacctggtgtattttcatagtgaatacccgtgctcctgttggatatcacaagtatagctggatgtatacataggttttctcctttttttttgttacttctccggtcttatgtggggctatgctttcagctgcacgtttttgtcgaagtaatacctggattggctggatatgtacatcttgagaacggattgactaacaagctccctgaattatggtcctgtgtgcttcaaaaactgctttcaaaaagaaaactg

SEQ ID NO: 204597 - DNA, 815 bp, Zea Mays
cattccacatcatgagagttccctcattatggctgcatcaccaccaaggaacttggcactgtgatgcgctcattggggcagaaccctactgaggctgagcttcaggacatgatcaatgaggttgatgctgatggcaatggaaccatcgactttcctgagtttctcaacctgatggcacgcaagatgaaggacaccgactctgaggaggagctcaaggaggccttccgtgtgttcgacaaggaccagaacggcttcatctccgctgctgagcttcgccatgtcatgaccaacctaggcgagaagctgacggacgaggaggtggacgagatgatccgtgaagccgacgtggacggtgatggccagatcaactacgacgagttcgtgaaggtgatgatggccaagtgagatatgcccgccgtttttaagctagttcctctcctgatggtagtaactagtctagttttggagactgactgcttttggttgtgtcttacgcctatccttgcgtcaatggacatatccgtttgttttcaaccaagggattttaccatgtctgtaatttcgctcaaatttggttcttgttgtattacatttgtgttatcttggtacaatgatcatgtctttctctttcaaatttaggtgttcagtttcctggtagaaatacgtggtagtggtatgcaggtattgctatatctggttttgattggtttgtcgttgtttcttgtgctgtgataagttcttgtagagaagtactgtacgtggtatgcagatcaattgattgttggccgtacggcaggacataggtggaagtataa

SEQ ID NO: 204598 - DNA, 931 bp, Zea Mays
tcttcctccctcccgttttcgtagcatcccatattcccatgtcatctacccaacccataggccatagctaccggaagatgagagctccagctcctcctgttcccgcgctgctctcccgctgctcctcgcctccctcctcggccccgctccgcctcctcacctcctctcgcacgccggccgccttccgcccgcctccggccgtcgcccgctctgtctccgtctccgtcgatgcgccggcggccgccacggagccggctgtcttgggcgcgccctcctcgatgccgcgccgtcgcctcatcctcctccgccacggggagagcaccgccgggggccgctccactagagacctctaagcaaggctgggagagctgacgcaatcagcgtttctaataaactccaacaaatgggatggataccggagcttatcctctgcagcgacgcaatgcgtacgaaggaaactcttaagatcctgcaagagcatgtccaaggattgtctgaagcagtagtgcacttcatcccaagtttctactccattgcagcaatggatggccaaactgcagagcatttgcagaaggcgatctgtgaatattcgagtgatgagatcttaaccgtgatgtgcatggggcataataaaggatgggaagaagcagcctctatgttttctggtgattcagtagcgctcgagacatgtaacgctgcgttgctggaagctgcaggcaaatcatgggttgaggctttttctgtggctggtctggggggatggaagcttcatggaattgtaaagccatgagttgtaactaaaagctaggtgtaatttctgtagctgtttcttaattcttgttaacttttgtgtagttgtttttacgtgccactgaagagcgtggataaatagatgagatgaatgaattcttccacgagaaaaaaataaaaa

SEQ ID NO: 204599 - DNA, 987 bp, Zea Mays
gtagaaacaagtaggcgagcaacgtcagctatcctttcttcctccctcccgttttcgtagcatcccatattcccatgtcatctacccaacccataggccatagctaccggaagatgagagctccagctcctcctgttcccgcgctgctctcccgctgctcctcgcctccctcctcggccccgctccgcctcctcacctcctctcgcacgccggccgccttccgcccgcctccggccgtcgcccgctctgtctccgtctccgtcgatgcgccggcggccgccacggagccggctgtcttgggcgcgccctcctcgatgccgcgccgtcgcctcatcctcctccgccacggggagagcaccgccgggggccgctccactagagatcatgacagacctctaagcaaggctgggagagctgacgcaatcagcgtttctaataaactccaacaaatgggatggataccggagcttatcctctgcagcgacgcaatgcgtacgaaggaaactcttaagatcctgcaagagcatgtccaaggattgtctgaagcagtagtgcacttcatcccaagtttctactccattgcagcaatggatggccaaactgcagagcatttgcagaaggcgatctgtgaatattcgagtgatgagatcttaaccgtgataattactcaggtgcatggggcataataaaggatgggaagaagcagcctctatgttttctggtgattcagtagcgctcgagacatgtaacgctgcgttgctggaagctgcaggcaaatcatgggttgaggctttttctgtggctggtctggggggatggaagcttcatggaattgtaaagccatgagttgtaactaaaagctaggtgtaatttctgtagctgtttcttaattcttgttaacttttgtgtagttgtttttacgtgccactgaagagcgtggataaatagatgagatgaatgaattcttccacgagaaaaaaataaaaa

SEQ ID NO: 204600 - DNA, 4750 bp, Zea Mays
aggtatcctgcaacaacaaacagcaaaatatcgcactaataagcaagcaagcaagcaagcaaattccttgtagtttgttttttttccctaaaagaagaagatcaggtccaggtactacatgctgctcttatatcgatcagattactcaaggattgcgctatgcagattactgcaggaaaattatttccagtggatggaatatgctgcaagtgcaaggttgcaagctgttcaatcaccatcctatatacactaaaaataataatcacaataaaaacagaggaggaatgaggatcaccttttttttttacttgagcaaactttgctgaacaatcaccatcctatatacactaaaaataataatccagaacctatacgcatttccggtcaacacttggcttgagcgagctggttggcatgaactacaagataaaagtagtggtacgagcaatccaatcaaggtgctcccactgtttcaacctataaagtgaagtatatgtaacccagacaatcaaatagttgatatacagacagaactttctacatatcccttcaccaccttgccagaaaagcctttggaatggcaaatcctttattacccagacaaaccgaactaagcacacacaatcaaaaagacgtagaaacaagaaacaggtcttcaacccggccagaaggcacttcgcagttctatcattttttaatcgttttattactttattttaggtcaaggtatataagtgttttgatgattaacggcaacataagattattgtgactaacgtgtgttttgcagaggcttagatcacaacgatggagattggtttgagcaatccatggtcttcatgcccctccttatgaatttcgttgtggtttttaaaggatgaaagataagaataagaatggactagttttaagtgtcgatgggagttgagagacatttagagtactttaagacgttgttatttcctttaaccgtactataaaagagggtgtgaacgagtagctagacctagagaagtctagtgagttctatgtggcttaggagagacccacgacaagtacggaccaacccaattccaaatattcaattaccagctgtgtgtttgctagggatttctggtacaggatcttctcagagcttaaactcgaaccgggggttttcgaatgaaaacgaaacaaaattggcccggcccacgacattgggggcaatccaggctcagcccaactactctctcgtcctcttgttccactgtttcccaccccaaaatactccaccaccgcacccactagggtttccgcaccgcattgcagaacctcgccgcctccacccgcaccacaccaccggcgatgtccacagcggcggcgcagggcggcagcgacaagccggcgctccggaggcccgtcttcaccaaggtcgaccagctcaggccgggcaccaacgggcacaccctcaccgtcaaggtcgtcagcgccacccccgtgcctgggcgcgcgcgcccaggcgcacccgccgccgccccatcccgcgcgccgcgcatcgccgagtgcctcgtcggggacgagaccggcgccatcgtcttcaccgcccgcaacgaccaagttgacttgctgaagcccaatgcgacagtgatcttgcgcaatgccaaaatagacatgttcaaaggatcaatgaggcttgcagtggacaagtgggggcggattgaggctgtagagccagccagtttcacggtgaaggaagacaacaacctgtctctaatagagtatgaattggttaatgtggctgagtaactgtccaatccaagcgtttctgccccctttatttcgtgccataagaaggaagtaccatgaatgaacattataaagcctcttgaagcgaagcgagtttatttgctacggtggggtagataaaggtcaaggctgtatggcctgtgttagaactttggataaattaagatgaattgcccttgcatctatgagattgttatccatctttgtactgctcgtgttgctttgatgcaagaaatctgaagcaggaaatgcgtacccagtgctctggacactggcgtctgttgtaattgtgtggctaccccaaaagtgtgcaattaatatctttcgacggggtgtgatttagtactgatttaaactggttttttggtatcaacaatcacaaacggaatgtcgtttggccaagaaaggaaaggaggaccctgtggttggcagtccactaatctgttccctgaatcctaaaaaaagcagtgcttgtgttggcggaggccaggccatgcccccggtttgaggagaggcctcgcaagcatctcaggcgacgcgaggggatcaggggacatgggcggcggcgagcatgaccatgagcccgatgagcctgagcctgccagggacaaggagcacgaacacgatgaggcgtcggtggaggcgctcttcgctgggcagtcgccggcgccgtggtggcggcaggtgacggtgcgttccgtgacggcgagtgtgttcgtgggcgccgtgttcagcttcatgtcgatgaggatggggctgaccatcggcctggtgccgtccttcaacatgtcggcgagcctggtgagcttcttcgtgatcagctcgtggacgcggctgctgggccgctgcggcgtggccacccagcccttcacccgccaggagaacgtggtggtgcagacctgcgtcatcgcctgcgccacgctgtcgctctacggcggcttcacgtccttcctgccggccatgtcgccgcccgtggcgaaatcggccggggccccggggacgggcaacaacgtgtacacgctgcatctcggcaagatgatggcgttcagcttcctcaccggcttcaccagcttgttcatcacgctccccttgaccaaggtcatgatcctggactacaagctgctgttcccatcggggtcggccatagctgggcttgtcaacagcttccacacgccagcgggagcagcaacagcaaaattgcagatagccactctgctgcgatctctaggcgggagcttcagctgggcggtgttccagtggttctacacgggaggcgacggctgcggcttccaggctttccctctcttcggcctcgaggcctacaagaagcgcttctacttcgacttctctccaagcctcgtgggcatcggcatgatctgccctcccatggtcaacttctcgctgctcttgggcgccgtcgtgtcctccgcgatcctctggcccatcctgcagggcaagcgaggggaatggtacgacgccgacgcctcgccatccagcctcagagggctgaacgggtacaaggtgcccatgggcatctccttggtgctcggggactgcctcttccagctggctgccgtcagcatcagggcagcgcggggcttccatcaccgccgtcagcatcagcaggatgaagatgacggtggtcagcagtccctgtcgtacgacgaccggcgcaggatccacaacttccagagcgaggggatgcccacccacgtgtcgctcgcgggctacgcgatcctggcaggcatcgccaccgtgttcctccccggcatcttcccgcagatcaggttctaccacgtggccgtgtgctacgccatggcgcccctcctggcgttctgcagctcctacgcttcgggcctcacggactggtccctcggcaccatctacggcaagctcgccatcttcatcttcggcgcgtgggtcggcgaggcgtctggcggcgcgatcgccggcctcgtggccggcggcgtggtggtggtcgtcatcggcaactcctccgagctcatgcacgacttcaagtcggcgtacctgacgctgacctcgccgctgtccatgttcgccagccaggtgatcggcaccacgctgggctgcatcctcaacccgctcctcttcctgggcttccaggagatggccggcggcgcggaccacctgggggaggccgggtcgctctacgccgcgcccatggccatggcctaccgcggcatcgcggacctgagcgtggaaggcatcaagacgctgcccaggcactccgtcatgctctgcgtaccttgcttcctcgtggcgctgtgcgtggatgccctggcggccgtcgccgcggccaacggctggaggatcaagggctacgtcccaaacatcatggccatggccatccccttctttgtggggccgaccttcgccatagacatgtgcctggggagcctcctagtcatcctgtggaggagaaggaacaagcaggcagcgaacctgctgtcggtcgtggtggcgtctggtttgatctgtggcgatgggctctgggcgctgccgtcttcgctgctggccatcttcaaggtggagccgcctatgtgcatgaagttcctgtccaactaccagactgagcagatgcggaagcacctcatcctagcagcagctgcacgccgaagaacaagttaattgttgtacccttacttgtttgagaacgaggaatgagaatggattgtttagtagctagccacacccacacactcctccttgttttccaagataaaataggcttgatagctcgatctagaatctagatagataaaacagcacacacgtctcttgcttcttgcaagcgtctaaatcaccagattatgctttatgattctacttgtacaaacatttagctcctgctatagtaaaactacacaatagtttatagtcaatgaaaaacatataaaaaggtcagacagagcatcatgcaaagagtgtatgaagtcgtcaatcg

SEQ ID NO: 204601 - DNA, 3197 bp, Zea Mays
cgactgtgatctgactgcaaaacgattctgcggaggaagatgagttgacttgctgaagcccaatgcgacagtgatcttgcgcaatgccaaaatagacatgttcaaaggatcaatgaggcttgcagtggacaagtgggggcggattgaggctgtagagccagccagtttcacggtgaaggaagacaacaacctgtctctaatagagtatgaattggttaatgtggctgagtaactgtccaatccaagcgtttctgccccctttatttcgtgccataagaaggaagtaccatgaatgaacattataaagcctcttgaagcgaagcgagtttatttgctacggtggggtagataaaggtcaaggctgtatggcctgtgttagaactttggataaattaagatgaattgcccttgcatctatgagattgttatccatctttgtactgctcgtgttgctttgatgcaagaaatctgaagcaggaaatgcgtacccagtgctctggacactggcgtctgttgtaattgtgtggctaccccaaaagtgtgcaattaatatctttcgacggggtgtgatttagtactgatttaaactggttttttggtatcaacaatcacaaacggaatgtcgtttggccaagaaaggaaaggaggaccctgtggttggcagtccactaatctgttccctgaatcctaaaaaaagcagtgcttgtgttggcggaggccaggccatgcccccggtttgaggagaggcctcgcaagcatctcaggcgacgcgaggggatcaggggacatgggcggcggcgagcatgaccatgagcccgatgagcctgagcctgccagggacaaggagcacgaacacgatgaggcgtcggtggaggcgctcttcgctgggcagtcgccggcgccgtggtggcggcaggtgacggtgcgttccgtgacggcgagtgtgttcgtgggcgccgtgttcagcttcatgtcgatgaggatggggctgaccatcggcctggtgccgtccttcaacatgtcggcgagcctggtgagcttcttcgtgatcagctcgtggacgcggctgctgggccgctgcggcgtggccacccagcccttcacccgccaggagaacgtggtggtgcagacctgcgtcatcgcctgcgccacgctgtcgctctacggcggcttcacgtccttcctgccggccatgtcgccgcccgtggcgaaatcggccggggccccggggacgggcaacaacgtgtacacgctgcatctcggcaagatgatggcgttcagcttcctcaccggcttcaccagcttgttcatcacgctccccttgaccaaggtcatgatcctggactacaagctgctgttcccatcggggtcggccatagctgggcttgtcaacagcttccacacgccagcgggagcagcaacagcaaaattgcagatagccactctgctgcgatctctaggcgggagcttcagctgggcggtgttccagtggttctacacgggaggcgacggctgcggcttccaggctttccctctcttcggcctcgaggcctacaagaagcgcttctacttcgacttctctccaagcctcgtgggcatcggcatgatctgccctcccatggtcaacttctcgctgctcttgggcgccgtcgtgtcctccgcgatcctctggcccatcctgcagggcaagcgaggggaatggtacgacgccgacgcctcgccatccagcctcagagggctgaacgggtacaaggtgcccatgggcatctccttggtgctcggggactgcctcttccagctggctgccgtcagcatcagggcagcgcggggcttccatcaccgccgtcagcatcagcaggatgaagatgacggtggtcagcagtccctgtcgtacgacgaccggcgcaggatccacaacttccagagcgaggggatgcccacccacgtgtcgctcgcgggctacgcgatcctggcaggcatcgccaccgtgttcctccccggcatcttcccgcagatcaggttctaccacgtggccgtgtgctacgccatggcgcccctcctggcgttctgcagctcctacgcttcgggcctcacggactggtccctcggcaccatctacggcaagctcgccatcttcatcttcggcgcgtgggtcggcgaggcgtctggcggcgcgatcgccggcctcgtggccggcggcgtggtggtggtcgtcatcggcaactcctccgagctcatgcacgacttcaagtcggcgtacctgacgctgacctcgccgctgtccatgttcgccagccaggtgatcggcaccacgctgggctgcatcctcaacccgctcctcttcctgggcttccaggagatggccggcggcgcggaccacctgggggaggccgggtcgctctacgccgcgcccatggccatggcctaccgcggcatcgcggacctgagcgtggaaggcatcaagacgctgcccaggcactccgtcatgctctgcgtaccttgcttcctcgtggcgctgtgcgtggatgccctggcggccgtcgccgcggccaacggctggaggatcaagggctacgtcccaaacatcatggccatggccatccccttctttgtggggccgaccttcgccatagacatgtgcctggggagcctcctagtcatcctgtggaggagaaggaacaagcaggcagcgaacctgctgtcggtcgtggtggcgtctggtttgatctgtggcgatgggctctgggcgctgccgtcttcgctgctggccatcttcaaggtggagccgcctatgtgcatgaagttcctgtccaactaccagactgagcagatgcggaagcacctcatcctagcagcagctgcacgccgaagaacaagttaattgttgtacccttacttgtttgagaacgaggaatgagaatggattgtttagtagctagccacacccacacactcctccttgttttccaagataaaataggcttgatagctcgatctagaatctagatagataaaacagcacacacgtctcttgcttcttgcaagcgtctaaatcaccagattatgctttatgattctacttgtacaaacatttagctcctgctatagtaaaactacacaatagtttatagtcaatgaaaaacatataaaaaggtcagacagagcatcatgcaaagagtgtatgaagtcgtcaatcg

SEQ ID NO: 204602 - DNA, 990 bp, Zea Mays
gatatatctgtgttactacaatatatattggagggggaagtttgagaatctacaaaagtgatgtacaacaaagaatttttgagatcattggtatctcgcctgaacaggcagaggagaaatttggctaccttttagaatgcttcgatatgggtgctcctccacatggaggcattgcctatggattggatcggttggtgatgcttttggcgggtgagagctcgatccgagatgtgattgctttccccaagaccacgactgctcagtgtgcactcaccaaagcaccatcagctgtagaaccacagcaactgaaggatctcgccttccccaaacctacttcgtgagacgctgttcaagtgttcatgacaaaaattccgtgctctcaaggacagctatagtttgcttctagttttcgagtgtattggcctattctatttttgcatagtatagaatgcgcagtttttggaccgtaataaatttatagaagatgtttaacacgccaaagttctggaagagcattgttttaattttgccgtagcgaaaatcataagtagtgctcagaagattgggaaggagtaggcccggtttatcttgttcattcatgattccccttgtggagtgaagtggaatgctaaagatagaaaagtgttccgtaggatctcgtcttagcccattgacaaaactagtccaagaaacccagattgctaagtctcgagtatgtcaatcaagccctaatgtttccattccgtcggaccaactagcctaactgcctaacctttcatagaatttatcatttatgcccaagggacaagaggttttgaactctctagtagttccaagaagtatgctcatttccttggatgtgtattcactaatgttgtgactggaagggctatttattcaaagatgattagggtgcgctcagcatgagccaaattgaaatggcaagatagaaatctaccgtcggtggagatggaaagttttatatattcg

SEQ ID NO: 204603 - DNA, 2686 bp, Zea Mays
gtttggcagggctctacttggacggggtgaggagaggcgaggagagcagagcaggcagccgacgacttccccacgcggaggcgttgcttcccggtcgtccaacgcctggcatcccttccttctcctcacccagcagcagccggtcggcctcggctagatctcgccggccgcctccaattggttgtccactgtggccgggccgaggggtacttatctataggcccgcagatctgcgcctgcgcccgtgggaatctccgcacctcgctatccgtctcttggatagatcgatcttccgtcgctggttccccttcgccccacacgagtacttccaaggaactggaacttccagccggcacggggattcgagcttctgctctatcagcaactccactgggcgctgagggtctgtagcagagcggtgcgatcggggcagaagggagccatgatgagggggcaggcgtggctggcgctgctggtcgtggtggcgctggccttggcggacgcggcggcggggaggttcgtggtggagaagaacagcctcgaggtgacctcccccgacgagctcaagggcaagtacgagtgcgccatcggcaacttcggggtgccgcagtacgggggcaccctgcacggatgggtcgagtaccccaagtccaaccggaaggcgtgccagagcttcgaccagttcgacatctcgttcaagcccaagcaggctgggggacgacccatcttcgtcctcgtcgaccgcggagaatgtttcttcacaaccaaggcatggaatgcacaaaatgctggagctgctgcagttcttgttgtggatgacaagtcggaacctctaatcacaatggacaacccagaagaaggcaaagagcacctagaaaaccttaagaaatccgcggaaaatggcgatatgctcagcgttcttctggactggagagaatcccttccccatcccgatgagcgtgtagagtatgagttctggacaaacagtaatgatgaatgtggtcctaaatgtgatatgcaaatggacttcgtgaggagctttagaggaactgcacaaattcttgagaaaaagggttacactcagtttactcctcattatatcacatggtattgtccagaagcttttgttgatagcaagcaatgcaaatcacagtgcatcaatcatgggagatattgtgcaccagacccagatcaggattttagccaagggtatgatggaagaaatgttgtggttcaaaacctacatcagatttgtgtattcaagattgctaatgagactggaaagccatggctgtggtgggattatgtgcatgatttcgcacttaggtgtccaatgaaggataagaaatacaataatgactgtgcccatgatgttatcaaatcacttggattggacatcgagaatataaacaagtgtgttggagaccctgaagccgatgtggaaaatgaaattctaaaggcagaacaagatgcccaaattggtcatggtaaaaggggagatgtcacaatactaccaacccttgtcatcaacaacaagcaatatagaggtaagctggacaaagttgctgtcctgaaagcgatctgttcaggatttgaggagacaactgaacctgctatttgtttgagcgaagagattcaaacaaatgagtgtttggagaacaatgggggttgctggctggacaaagctaataatgttactgcatgcaaggataccttccgcgggcgtgtttgtgagtgccctattgtgagaggtgtaaaatttgttggtgatggatatacccattgtgaagcttccggtgttggtaggtgtgagatcagtaatggagggtgctggcaggaaactaaagatgggaaaacaatctctgcctgctcaaacgaaatatctgaaggttgtaaatgtccaatgggtttcaagggtgatggagaaaaaagttgtgaagacattgatgaatgccaagagaaactttattgtcagtgcaagggttgcagctgcaagaatacgtggggaagctatgaatgcagctgtggtgatgacaatatgctatacatgagagagcatgacacttgcatcagcaaagagggaactgccactactgttggctggagcttcctctgggttattttctttggacttgtttttgccggggttggagcatacgctgtgtacaaatacaggctgcggagttacatggattcagagatccgtgccatcatggctcagtacatgcctctggataaccaagaaggagcaaaccagcatcaggtcgtgcacgccaatgatatctgaagctgcactccttttctgaagcagaaatagagggggcgtgcaacatttcacttgtgctgctgcatcattgggtcatgggttttacaggtataggtcaactaggctcaaagatacacaggttatgcgagatcaagatctactgtaccatgaattaagatttaagagagagacgttgtgcgcctcttgttacgacacttgatgaacagcatagggaatgataccatcatagttttagtagtccttcgttgccttcagtttgtcttcaaagagttcttgttgcctcttcacatacatgtaaacactgtaaataccgttacctgaataaagcttcagcctgctaggctacaagcagggttcactgtacgtgtccgtacatgtgatttattacagatttctttc

SEQ ID NO: 204604 - DNA, 2716 bp, Zea Mays
gtttggcagggctctacttggacggggtgaggagaggcgaggagagcagagcaggcagccgacgacttccccacgcggaggcgttgcttcccggtcgtccaacgcctggcatcccttccttctcctcacccagcagcagccggtcggcctcggctagatctcgccggccgcctccaattggttgtccactgtggccgggccgaggggtacttatctataggcccgcagatctgcgcctgcgcccgtgggaatctccgcacctcgctatccgtctcttggatagatcgatcttccgtcgctggttccccttcgccccacacgagtacttccaaggaactggaacttccagccggcacggggattcgagcttctgctctatcagcaactccactgggcgctgagggtctgtagcagagcggtgcgatcggggcagaagggagccatgatgagggggcaggcgtggctggcgctgctggtcgtggtggcgctggccttggcggacgcggcggcggggaggttcgtggtggagaagaacagcctcgaggtgacctcccccgacgagctcaagggcaagtacgagtgcgccatcggcaacttcggggtgccgcagtacgggggcaccctgcacggatgggtcgagtaccccaagtccaaccggaaggcgtgccagagcttcgaccagttcgacatctcgttcaagcccaagcaggctgggggacgacccatcttcgtcctcgtcgaccgcggagaatgtttcttcacaaccaaggcatggaatgcacaaaatgctggagctgctgcagttcttgttgtggatgacaagtcggaacctctaatcacaatggacaacccagaagaaggcaaagagcacctagaaaacatcactattccctcagtgcttataacaaagaaattgggggaaaaccttaagaaatccgcggaaaatggcgatatgctcagcgttcttctggactggagagaatcccttccccatcccgatgagcgtgtagagtatgagttctggacaaacagtaatgatgaatgtggtcctaaatgtgatatgcaaatggacttcgtgaggagctttagaggaactgcacaaattcttgagaaaaagggttacactcagtttactcctcattatatcacatggtattgtccagaagcttttgttgatagcaagcaatgcaaatcacagtgcatcaatcatgggagatattgtgcaccagacccagatcaggattttagccaagggtatgatggaagaaatgttgtggttcaaaacctacatcagatttgtgtattcaagattgctaatgagactggaaagccatggctgtggtgggattatgtgcatgatttcgcacttaggtgtccaatgaaggataagaaatacaataatgactgtgcccatgatgttatcaaatcacttggattggacatcgagaatataaacaagtgtgttggagaccctgaagccgatgtggaaaatgaaattctaaaggcagaacaagatgcccaaattggtcatggtaaaaggggagatgtcacaatactaccaacccttgtcatcaacaacaagcaatatagagttgctgtcctgaaagcgatctgttcaggatttgaggagacaactgaacctgctatttgtttgagcgaagagattcaaacaaatgagtgtttggagaacaatgggggttgctggctggacaaagctaataatgttactgcatgcaaggataccttccgcgggcgtgtttgtgagtgccctattgtgagaggtgtaaaatttgttggtgatggatatacccattgtgaagcttccggtgttggtaggtgtgagatcagtaatggagggtgctggcaggaaactaaagatgggaaaacaatctctgcctgctcaaacgaaatatctgaaggttgtaaatgtccaatgggtttcaagggtgatggagaaaaaagttgtgaagacattgatgaatgccaagagaaactttattgtcagtgcaagggttgcagctgcaagaatacgtggggaagctatgaatgcagctgtggtgatgacaatatgctatacatgagagagcatgacacttgcatcagcaaagagggaactgccactactgttggctggagcttcctctgggttattttctttggacttgtttttgccggggttggagcatacgctgtgtacaaatacaggctgcggagttacatggattcagagatccgtgccatcatggctcagtacatgcctctggataaccaagaaggagcaaaccagcatcaggtcgtgcacgccaatgatatctgaagctgcactccttttctgaagcagaaatagagggggcgtgcaacatttcacttgtgctgctgcatcattgggtcatgggttttacaggtataggtcaactaggctcaaagatacacaggttatgcgagatcaagatctactgtaccatgaattaagatttaagagagagacgttgtgcgcctcttgttacgacacttgatgaacagcatagggaatgataccatcatagttttagtagtccttcgttgccttcagtttgtcttcaaagagttcttgttgcctcttcacatacatgtaaacactgtaaataccgttacctgaataaagcttcagcctgctaggctacaagcagggttcactgtacgtgtccgtacatgtgatttattacagatttctttc

SEQ ID NO: 204605 - DNA, 881 bp, Zea Mays
atggaggacacaatcatggcgccgtcgacctggagaaaactgaaagggaccatgctcgtgaaaagagcagtagaggagttctacatcaagtcaaggttgctcctaagagatccagaaaaggcattgacactatttggcaagcaggatgagagtgtactgcagggagttacacatgtgatatgttgtactggaactacagcatttccatctaaacgttgggatggagagaatactccagaacgtgtagattggaatggcatcagaaatcttgtaagtgccttgccacagacaatcaagagactggttcttgtgtcatctattggtgttacaaaatacaatgagataccatggagcatcatgaatctgtttggtgtgctcaagtacaagaagatgggagaagactttgttcgcaattcaggaataccattcacgattatcatgtattcaggcgacaagcttgtgggggaagttagtagacttgtggtggcagaagcttgtatccaagctttagacattgaatctactgaaggacaaatatatgagattaattcaatgaaggtcgcgcgcagggcgtatcactcacctctttgctcgagccaagctgtgagcttggaagtggcggccacggccacgggcacgggcgccaagcccagccgctttgttgtagagtataggtaccgattttgttgcaggcttgcagatactacccagaataaaatgcagaaagatcattttcaaagatgcagaatggagcgccaattggccaatttggaaaggttcagaataatttatgtactcctaagaatggtgagatattggttgcttccacgcaagacttcttgacctcatctttcctatatatgttttcgaattagattggg

SEQ ID NO: 204606 - DNA, 1743 bp, Zea Mays
ccggtaccggccggcatgagctccacctcatcgggccgccgcgccccctcatcttcggcggcggtcgcctcgtcgccgggacagaagcgggcgagggatgaggccagcagcgggtccccatccgaccccgacgccgccaaaaaccctcgccgcgcttttgcctcctccccgttcgccgacttcggcacctacatggctgcgaagaacagcaagctcgctgcgcagttcgatgccgacgccaacacctcaggcacggacgccggcggtctattcgatggcgtctccatcttcgtggacggcttcacagtcccttctagccaggagctgaaagagattatgctgaacaatggaggccggtttgtcaactacttttccaggcacacggtaacacacattgtttgcagcaacctgcctgatagcaaaatgaagaatctgagagcattcagcagaggacttcctgttgttaagccagcatgggtggtggattccctggcagagaaccggctcctcaactaatagttcttcaagccgaaagcagatgaagctttcttctttcttttctgagaaacaaaatgaaatatgccacaagggggaacaaaacaaccaaaataaggatattgagttccaaccttcatctgctcaggagggatcacagtatcaaagtggggattgtgaaagtgaagcttcaatggatactttggagctatcaaaggactcgttgtcctcagatgaacagaaggcatcagcatttgaagaaagagagagcggagatttcacggttgatgagggtgaatacgattatgaaactgcctgttcggagagccgtaatgacacagatggtaaccttggtgtgcctcaatcccctaatgcaaagtcaaggtgttcaaacttattcagtacaagatctacaggcagtcatttgtccttgtcattggagaaaagtgcagctaaaccttctggccgaccacattcaaccctaacagatccaaattttgttgagaactatttcaagtactctcgactgcacttcattgggacatggagaaaccggtatcggaagcgcttctcaaatttgctagaagctaaaggcattaagttgagtgctgatcattcagggaagaagaaaacaatcattcatattgatatggattgctttttcgtgtctgtggtcatcagaaatatgccagagctgcatgataaaccagtagcagtttgccattcggacaatcctaaaggaacagcagaaatatcgtctgcaaactatcctgctcgaaactatggtgctgctattttattttccattaattgagacttataatttagttatgtgaacacatttgaagagataaaggctggcatcctcattggtgcattccagggataaaggctggcatgtttgttagagatgctaaagctcggtgccctcacctaatgatcgttccttataactttgatgcatatgaggaggttgctgatcagttctatggtactttgcacaaacattgcagtaaggttcaggctttgagttgtgatgaagcttttttggatatgactgaatgcttacatgacaatcctgaggaagtaacacagagaataagaagtgagatttttcatgcaacaaagtgtactgctagtgcaggaattgctgaaaacatgctcctagctcgattggctactagatctgcaaagccgaatggacaatgctttattccatccgaaaaggaattgtgaagagaatacact

SEQ ID NO: 204607 - DNA, 1882 bp, Zea Mays
tacagacggaactgggttctgatgttaacttgtatgctttggtgtttggagaatctgttttgaatgatgcgatggcaatttctctttacaggacaatgtcatcagtcagaagtcatgcagcaggcggcgagaacttttttatgatgattctccaatttctcgaaacctttgttggttcaatgtcatcaggtgtgggagttggatttatctctgctcttctattcaaatatgctggattggacgttgataatctgcagaacttggagtgctgcctttttgttctctttccttacttttcgtacatgttagcagaaggacttggcttgtcagggattgtttctatattattcacagggatggtaagcgctattgcaattcatcatattatattattcatgattgtactgagattgtacctgacacatttcatatttatcctcaggttatgaagcattacacatattccaatctttcagacaactcacagcgctttgtttctgccttttttcatttactatcatctttagctgaaacatttgtgttcatctatatgggtttcgatattgccatggaagagcatagctggtcacatgttggcttcatcttcttctcaattatattcatagttgttgcaagggctgcaaatgtcttttcttgtgcatacttggttaacatgtctcggccagaacatcgccgtatacctgtaaaacatcaaaaagcactttggttcagtggtcttagaggggccatggcttttgcacttgctctccaatctgtgcatgaacttcctgaaggacatggaaaaacgatattcaccaccaccactgccattgttgttttgacggtacttctcattggagggtcgacaggaactatgcttgaatctttggatgttgttggagatgaaaacacatcaagagaaaattacgaggacaacaatggttacatgcctccaagttatgaagaaggaacatcctctggaggaggattgagaatgaaactcaaacagtttcacaaaagcacaacatcattcactgcccttgacaagaactatctcactccattttttaccagtcagacagatgatgataacgatgacgacttcagtcagcaaccccaaaaccgaaggctagctttttatgatcaatagcggaatttgatactctacatatcaagctaaatacacggagcagaactgacgtgcatgactgtctatgtgtgatttggtcgaacaaaatatagcaggagcatacttagttgagtagcatatggcagagcatatctgtataccgtaggacaaaaatcataagggttcgaatcagttgttcccatgggggacgaggatgatgatagccaggcagcatgtatatatttctaggcttccttaagaacttagtggggctccagatgaaaagcagtgtgttgttggaattttatagaccctaccttgtgttaggttaaattttaataaacccgaccgtttgtccgctaagtcggctattatgctcttgttgtaattgacgcgttgcaccagttgccccactggctggttgcaccagtgggaaattgacgcgtaccatatataatgttgccatggctgattataaaaattctgcaaagcactgaaagcaaatatcatcccaggtcagggaagtatgctgatgtttattattttaacgttaacatttactcctattctaacaaagtagttcagttttgaaatggttggccggtttaagctggaactagaatttattgcaagtaccatgtagggattgagctggaaagttgttctccagttctgctactgcaagcaagcaaagtgaaggaggtacacaggcataagttatttcttaaacctaagttctgcatgccacatttg

SEQ ID NO: 204608 - DNA, 2745 bp, Zea Mays
gttcttctggaccgatgactttttctggttggttccaagttccaacatgacaggcacgaaggcaagtcgagcagacagcaacatctagcacgaagcaccggccttgtacgcatcctcccttcgcatcgaggaatcgcgggcccaccgcggcaccaaggccccccgcattccgtcccgccgcggcgtcgctcccttgttctctcccgagccgtccgcgaaccaacccgtgctacctccgattcttcgcctcgtcgttctttctagaacctccgctccgcctaatcccgaacgagactagggaggttccagcgccgccggtgggggagatggcgctggagctgagcctggcctcggcttcgccgccggcgggcggcggcttggcgcagccgccgcccctcgccccacccgggaaggagcagcaagtggccggcgtggggattctactgcagatctccatgctcgtgctctcgttcgtcctcggccacgtcctgcgccgccaccgcttctactacctccccgaggccagcgcctcgcttctaattggcttagttgttggtggcctcgctaatatttcaaatacagagaccaacacaaggacgtggttcaacttccatgaagagttcttcttcttgttcttattacctccgataatattccagtcgggtttcagcttatctccgaaaccattctttgcaaactttggggctatcgtaacttttgcaattcttgggacattcattgcttctgttgtaacaggagttcttgtctatcttggtgggctgacatttctaatgtacaaacttccactggttgaatgccttatgtttggtgctcttatatctgcaactgatcctgtcacagtgctatcaatattccaggaactgggttctgatgttaacttgtatgctttggtgtttggagaatctgttttgaatgatgcgatggcaatttctctttacaggacaatgtcatcagtcagaagtcatgcagcaggcggcgagaacttttttatgatgattctccaatttctcgaaacctttgttggttcaatgtcatcaggtgtgggagttggatttatctctgctctctattcaaatatgctggattggacgttgataatctgcagaacttggagtgctgcctttttgttctctttccttacttttcgtacatgttagcagaaggacttggcttgtcagggattgtttctatattattcacagggatggttatgaagcattacacatattccaatctttcagacaactcacagcgctttgtttctgccttttttcatttactatcatctttagctgaaacatttgtgtaagcatcaggagcacttgtagtgtgtaatggcctaattggaaaatataaccgtgcactttcttattttcttttaggttcatctatatgggtttcgatattgccatggaagagcatagctggtcacatgttggcttcatcttcttctcaattatattcatagttgttgcaagggctgcaaatgtcttttcttgtgcatacttggttaacatgtctcggccagaacatcgccgtatacctgtaaaacatcaaaaagcactttggttcagtggtcttagaggggccatggcttttgcacttgctctccaatctgtgcatgaacttcctgaaggacatggaaaaacgatattcaccaccaccactgccattgttgttttgacggtacttctcattggagggtcgacaggaactatgcttgaatctttggatgttgttggagatgaaaacacatcaagagaaaattacgaggacaacaatggttacatgcctccaagttatgaagaaggaacatcctctggaggaggattgagaatgaaactcaaacagtttcacaaaagcacaacatcattcactgcccttgacaagaactatctcactccattttttaccagtcagacagatgatgataacgatgacgacttcagtcagcaaccccaaaaccgaaggctagctttttatgatcaatagcggaatttgatactctacatatcaagctaaatacacggagcagaactgacgtgcatgactgtctatgtgtgatttggtcgaacaaaatatagcaggagcatacttagttgagtagcatatggcagagcatatctgtataccgtaggacaaaaatcataagggttcgaatcagttgttcccatgggggacgaggatgatgatagccaggcagcatgtatatatttctaggcttccttaagaacttagtggggctccagatgaaaagcagtgtgttgttggaattttatagaccctaccttgtgttaggttaaattttaataaacccgaccgtttgtccgctaagtcggctattatgctcttgttgtaattgacgcgttgcaccagttgccccactggctggttgcaccagtgggaaattgacgcgtaccatatataatgttgccatggctgattataaaaattctgcaaagcactgaaagcaaatatcatcccaggtcagggaagtatgctgatgtttattattttaacgttaacatttactcctattctaacaaagtagttcagttttgaaatggttggccggtttaagctggaactagaatttattgcaagtaccatgtagggattgagctggaaagttgttctccagttctgctactgcaagcaagcaaagtgaaggaggtacacaggcataagttatttcttaaacctaagttctgcatgccacatttg

SEQ ID NO: 204609 - DNA, 2073 bp, Zea Mays
agggtctggggccggtcagtgttgtgccgcccgttgaaaccaccacgtaacgtctcggacggctagacgcggtccacgctagctccttgctatctccgtcctactcctcctcatactttaccgcaaagcgcgcaccacgaattgcacctacccatttcgctaatctccctccacgagccgaccaaatcgaatcgaatcgcgcgcagcgcgcccgcgcagcgattgccggcgatggcgagcctcaccctgccgccggcgccccccaacccacggcaggacgccatcgacctccaaaaggccttcaaagggtttggctgtgacagtacaacagtgataaacatacttactcatcgcgattcagtgcagcgtggactcattcaacaggaatacagggctatgtatcatgaggaactctcccatcgcatttcatctgaactcaatggaaaccacaagaaagctatgttgctgtggattcttgatcctgctggacgtgatgcaactgttttgagagaagctctaagtgttgacactatggatctgagagcagccactgatattatatgttccaggacgccatcacagttgcaaataatgaaacagacttattatgctagatttggtacttatcttgagcatgacattggtcaccacacatctggcgatcaccagaagcttttacttgcctatgtggggattccacgctacgaaggtcctgaggttgatcctaccattgtgacacatgatgcaaaggatttgtacaaagctggtgagaaaaggctgggtacggatgagaagacctttatccgcgttttcactgaacgcagttgggcacacttggcatctgtttcgtctgcctaccatcatatgtatgaccggaaattagagaaggttatcaagagcgaaacatctggaaactttgaattcgcacttttagctatcctcagatgcgcggaaaacccagcaaagtattttgcaaaggtactgcgcccatgttgttttcagtaaagaaatattgtagattttgaaatcctgtgcaggcaccataggtgtataaaatcactgattgatttagagtcgagttatgttttgctgatagatttagccatagccaacagctgttctttcttacgaaattataatttaacatttggtgaagcaaagatcactagttgatatgacactgatataaagtttgctgtaccatctagagttgatctttttatttcttatttcaattatatgtaacttgccaccattccaaagtgttattttctgctaatgctgcgaaatgagcatgttcaagattgctcttgtatcttcggtgccgaatacagctcttacgaaaggccatgaaaggtctaggcactgatgacaagacacttataagggttgtggtgacgaggactgaaattgatatgcaatatatcaaggcagagtacttcaagaagtataagaagccattagctgaggctatccactccgaaacatcaggaaactatcggacattccttctttcacttgttggtcctggacattaggttatgtttcgaccatgggacatgatattccatccatccaccctaaatgcagcgacctacctggaaaacttatgatgttgccatttgtcagtggtgactcgtggattcgtctaacttccacatatgcggtatctagtatgcttgactaaagtattcgtgtttaaatttgtatctgggtttcttgttggaaaattctgtgcgggggcacaacagctgttgttggtcacgctaggcttgacttgtgtctccatgacatcaataatattatgtcatgttcgtgtgtggtcattccactattagagaaagcaccatatgtaccggttgggaattggctttaaagaggagattttagtaccggttcttggtatgagctgatactaaaagttacatatttagggctagtttgggaaccacattatttgaaggaattttcatttttcaagggaaattagtttattttcttatgggaaaatagaaatctttcggaaaaacgaggttcccaaactaggcttaacattagttcattccactggag

SEQ ID NO: 204610 - DNA, 2729 bp, Zea Mays
gcaatgcgggtccctgcctcggcccaggcggcggcggcggcggggcagccttgctcgatctgttgccgccgttcacacggcccggcgttccgtcggggttcgcccgaggtagcagccgccgtggatacgtgtgctcgcttgcgcgatttcagcccgatgcctgcgcagcggtcgcggccgaggaaatgacccgtttaattgcatcttgtacaagtcttggggcgtttggtgggagagtttatttttttctcgttgatttccgttatcggggggcttccatcttggttcagttctgcaggctgtgtttgtgatcagtgtgactgagaggggagggtttccagtcagtcatttatgaatcctgaggcctgtgcttactagagggagggcaaggctcgttgggatccgggatgaaggggagaaatgactcggggcacagcaagaggccggttgtgctgtgctgtgtgatgattgtgtgcctatgtctcctcttcttgtatttctcgggctccaatggacaggctgggagcgccgcatttgagtacgggaccaaattctcacggtcacttggatggggcagtgatgatggtgaggatggctctgaagagtccatttttggaaccggggatgcagatgatgtcaagcccaagagctttcctgtgtgtgatgaccggcactctgaactgatcccctgcttggataggaacttgatatatcaaatgaggctgaagctggatttaaacctgatggagcactatgagaggcattgccctccacctgaaaggcgttttaattgcttgattcctccaccacatggctataaggttcctataaaatggccaaaaagtcgtgatgtagtgtggaaagcaaacattccacacactcaccttgcaaaagagaagtcagaccagaactggatggttgaagctggtgaaaagatcaagtttccaggtggtggaacccattttcaccatggagctgacaaatatatatcaaatattgcaaatatgctaaatttcaaggataacaatataaacaatgatgggatgcttcgtacagttcttgatgttggttgtggagttgctagttttggaggatatcttctttcttctaatgtgatagcaatgtctttggcaccaaatgatgtgcatcagaatcagattcagtttgcactcgaaagagggatccctgcatatcttggtgttttgggaacaaaaaggcttccgtacccaagtagatcatttgaactagcccattgttcacgttgtaggatcgattggcttcaaagagatgggattcttctgcttgaactagatagattgctcaggcctggaggttattttgcttactcctctcctgaagcatatgcacaggatgaggaggatctccgaatctggaaagaaatgagtgcccttgtagaaaggatgtgctggaaaatcgcagagaaaagaaaccaaactgttatttgggtgaaacctctggacaatgattgttacaagaggcgagcacatggtacaaagccacctctatgcaaaagtggcaatgatccagattcagtatggggagttccaatggaagcttgcattactccgtatcctgaacaaatgcacagagatgggggaactgggctagctccctggcctgcccgattgacagccccgcctccccgtcttgctgatttgtacattactgctgacacatttgaaaaggacacggaaatgtggcagcaaagagtagaaaactattggagtttgctgggcccaaaggtaaaaccagacactattagaaacatcatggacatgaaggcaaactttgggtcatttgctgctgcactcaaggagaaagacgtatgggtgatgaatgttgtgccacatgatggaccaagcaccctcaagataatctatgatagagggctgataggcagcaatcacgactggtgtgaagccttctcaacctatcctcgaacatacgatcttctccacgcatgggcagtcttttctgaccttgataaaagaggctgcagtgccgaagacctgctccttgaaatggatcgtatcctcaggccgactgggtttgccatcgtgagggacaagggcaccgtcattgagttcatcaagaagtacctccacgcacttcactgggaggcattgactgtcgtggacgctgagcccagcccagaatcagaggagagcgaaatgatcttgataatccggaagaagctgtggctaccaaaagcaggcccgcaggattccggcacgtagttcttctcgtacctgttcctctcccagcacctgcagctcagaagccaggcgcagctgcaccatccaaaatggttcgacacttgtagctcctgagatagagtcagtcatgatttctagccctaccgcccacatgaagataggttgtttacgaggatactgcaagtagtatgtagcaggcttggattaaaaaaaaggcccttttttgtcgcgacagatatggattggtgtttgttatctagtttggttaggaaataaacattctttttcttttaggtgtttcgtgtcctttttttttgaagtctgctatagtctgtagcaagtgtatttggtgttttcttgaaagaactactgcgctcacatttttgggatatgtgctttgccctagagcctcaaggctgcgggtcctcagctcgaaactactcgtgcaaatctcaaccgggagagcacttcaatataaacaggtaattttac

SEQ ID NO: 204611 - DNA, 1930 bp, Zea Mays
atgggaccatcgcttcaacactgttcctataaaatggccaaaaagtcgtgatgtagtgtggaaagcaaacattccacacactcaccttgcaaaagagaagtcagaccagaactggatggttgaagctggtgaaaagatcaagtttccaggtggtggaacccattttcaccatggagctgacaaatatatatcaaatattgcaaatatgctaaatttcaaggataacaatataaacaatgatgggatgcttcgtacagttcttgatgttggttgtggagttgctagttttggaggatatcttctttcttctaatgtgatagcaatgtctttggcaccaaatgatgtgcatcagaatcagattcagtttgcactcgaaagagggatccctgcatatcttggtgttttgggaacaaaaaggcttccgtacccaagtagatcatttgaactagcccattgttcacgttgtaggatcgattggcttcaaagagatgggattcttctgcttgaactagatagattgctcaggcctggaggttattttgcttactcctctcctgaagcatatgcacaggatgaggaggatctccgaatctggaaagaaatgagtgcccttgtagaaaggatgtgctggaaaatcgcagagaaaagaaaccaaactgttatttgggtgaaacctctggacaatgattgttacaagaggcgagcacatggtacaaagccacctctatgcaaaagtggcaatgatccagattcagtatggggagttccaatggaagcttgcattactccgtatcctgaacaaatgcacagagatgggggaactgggctagctccctggcctgcccgattgacagccccgcctccccgtcttgctgatttgtacattactgctgacacatttgaaaaggacacggaaatgtggcagcaaagagtagaaaactattggagtttgctgggcccaaaggtaaaaccagacactattagaaacatcatggacatgaaggcaaactttgggtcatttgctgctgcactcaaggagaaagacgtatgggtgatgaatgttgtgccacatgatggaccaagcaccctcaagataatctatgatagagggctgataggcagcaatcacgactggtgtgaagccttctcaacctatcctcgaacatacgatcttctccacgcatgggcagtcttttctgaccttgataaaagaggctgcagtgccgaagacctgctccttgaaatggatcgtatcctcaggccgactgggtttgccatcgtgagggacaagggcaccgtcattgagttcatcaagaagtacctccacgcacttcactgggaggcattgactgtcgtggacgctgagcccagcccagaatcagaggagagcgaaatgatcttgataatccggaagaagctgtggctaccaaaagcaggcccgcaggattccggcacgtagttcttctcgtacctgttcctctcccagcacctgcagctcagaagccaggcgcagctgcaccatccaaaatggttcgacacttgtagctcctgagatagagtcagtcatgatttctagccctaccgcccacatgaagataggttgtttacgaggatactgcaagtagtatgtagcaggcttggattaaaaaaaaggcccttttttgtcgcgacagatatggattggtgtttgttatctagtttggttaggaaataaacattctttttcttttaggtgtttcgtgtcctttttttttgaagtctgctatagtctgtagcaagtgtatttggtgttttcttgaaagaactactgcgctcacatttttgggatatgtgctttgccctagagcctcaaggctgcgggtcctcagctcgaaactactcgtgcaaatctcaaccgggagagcacttcaatataaacaggtaattttac

SEQ ID NO: 204612 - DNA, 1995 bp, Zea Mays
gtcgcttccgcaggggcagccgcagcaccgcagctacctacctacccacacacgcgattcacgcaagcacacgcagccgctccttccgtcctcaaaccacaggcggaccctgacgagacgtacaagaacctccaccaggccattgagcccttgaccgtgtacgcaaacgaacacgaagcctagctcctccccaatggcctcccatcctcctcctgcggagccgtcttctaagtcaaacaaggggcagagcgagcacgaggagatccacgtctcctcgggcggcgttctggcttacaccgacgacgatgactgcgagagcaggcgccccttgctgctcaggactcccgcctccgccgagtgctactccgtctccgccgccgtcttcccgtttctctttccagctttgggaggccttctgtatggctatgacattggggcaacatccggtgcaaccatatcgctcaagtcgtcgacattcagtggtactacttggtacaatttgtcatctgtgcaaacgggtcttgtgtagcacccaatttcactatcatggtggttggccgctttttatatggcataggaattggattggctatgcatgctgctccaatgtatattgcagagactgcaccgagccagataagaggcatgctcatttctctaaaggagttctttattgttcttgggatgcttcttggttatatagcaggaaatctctatgttgaagtggtttctggttggcgttacatgtatgcctccagtacaccattatgtctcataatgggagttggaatgtgctggttaccctcatcacctaggtggctcctgttatgtgccatacaagggaaggggaatctgccagagacaaaagaaaatgcaacccggtgcttatgtcggttgcggggtcaagcttcacctgatttggtctcagagcagattgacttgattctagaggaactttcatatattgatcaagagaagcaagctagcttcggtgagatctttcaaggaaaatgtcttaaagcaatgataattggatgtggtttggtgttctttcagcaggtcactggtcaacctagcgttctatactatgctgctacaatttttcagagtgctggattctctggggcatctgatgccactcgtgtgtcaattcttcttggcttactgaagctaatcatgaccggagtagcagtccttgtggtcgacagacttggcaggagaccattgcttattggaggtgtcagtggaattactgttgccttatttttgctgtcctcctactacactttactgaaagatgcctcctatgtggctgtaatagcgcttctactatatgttggttgttatcagctctcatttggtcctattggctggcttatgatctcagaggttttcccgctgaggctgcgagggcgtggactgggcgttgctgttcttgtcaattttgcgtccaacgctctggtcacctttgctttctctccactggaggatttgattggaacgggagcgctcttctctggattcggggtgattgcagtggcatctcttgcattcatattctggatcgtccctgagacaaaaggactcaccctggaagagattgaagcgagtttgtagttgactgatccagacgtcacgttcttccgtcctagtttcactgaactgaagggacttctggtatccttctgtagtttgctgccgtagttagccttctataaacgttctacaagctgttgtagcaataatacttctttccttccgggtataaaccgagatggtcggttgctgcaaagtgtgttctttaccgcagttcatccgattagtcacaattaattttcctgatcgccccctgcacttaactaggcaccatgactcaatcagagcgacgttgattattcaactagtactcgatattttcaaaatggttgctaatggaaagaaaagaaagaaaatgatcttctctctagatcatgatcaagaaaagattaccaggag

SEQ ID NO: 204613 - DNA, 1651 bp, Zea Mays
cttggaaccaggcccggtcgctgcggggtgggaaatatcccggacacacgcaggcaataggccgttcatggattagggcaacagccacgaagggcacgccgcatgcgcacggcaactgtggcacggagaccggattcctcacgcctgctggcgtcgatctcctccggaggctgcttctcaccgcttatccctgcaccagtttgagttggagaagacgaacttccaccgtcttgggaccctatatcctctcctttagggggtctccaagattaaacatgcttgcaagggggtctcctagatttaacatgctcttatctaaaggtgcacaaaagaaaaaatctcctatagctactgcttcaaagacacatggaggctctccaaaagggaaaacaagagcaaattggaattctatgttagagaagacccttgttgacttgttacatgaacacaatacacctgaatataagggtaacaatggttggacacctgatgcatggaacaagattgccaaggaatttcaagagagggaaagatatgcaggtttctcaaaagttcaaatccaagaaaaggaaaaggagttaaagagagattacaggatgttgaaagatgcgaggaaacaaagcggagtttcttgggatgagaaaaggtgtatgattcaagttgatccaccgatatgggacaacataatcaaatcatttccaagggctaaaaaattccgcaacaaatcttttcctttgtttgaagctttgggagagctacatgatggtaatactgctgaagggacctacaacttcacttctactcaaccaaatggtccagatctcacacaaattgggtctggagatgttcctatcaatatagaagaccgtgaagatgtgggagaccctttggcagatcacagacaaaatgaagtagaagacaaagtgtatgaagttgaaggggttgatgtaaatgctgataggcaggatgaaaggtcaaaaaggacttttgttgtttcaaggaatgaagaagaaaaaggactaaagaggccaaagaagagttccaacatagaggtattgatggagaggtacctaaacattagaagcaaacaagctgaagatgaaacgacccaattggcaagagaaagggaggcaagaggaggtgatgatttctcaattaagaattgcatagcagttctaaacacattggaagtcacaaaagaggagaaggtcaaagcatataaggtgttcaaggaccctgacaatcgacagatattcttgagtgcatgcaatgatgatagagaggctgcattgatgtggttgagggatgagatggcttagcagataacagagttgtgttggaaggagggttcatcggagagtggccactaacatattctgcaaactgttgatccatatatttcagatgagagagtgggattagctgagcctgcagaaggaatacagactgtgccctcatgggaaaaaactagacaatttgaacttgttgctttgagttgcttgtactgacttgcctgtgaaaaaactttgctttggtccgaagaacactgaaaaaactatgctttggtctgctctgaatctagatttaaatttctttgattctgattctgaaatgatggttgagtctgcttgaataaattctttggatgtat

SEQ ID NO: 204614 - DNA, 1526 bp, Zea Mays
cttggaaccaggcccggtcgctgcggggtgggaaatatcccggacacacgcaggcaataggccgttcatggattagggcaacagccacgaagggcacgccgcatgcgcacggcaactgtggcacggagaccggattcctcacgcctgctggcgtcgatctcctccggaggctgcttctcaccgcttatccctgcaccagtttgagttggagaagacgaacttccaccgtcttgggaccctatatcctctcctttaggtgcacaaaagaaaaaatctcctatagctactgcttcaaagacacatggaggctctccaaaagggaaaacaagagcaaattggaattctatgttagagaagacccttgttgacttgttacatgaacacaatacacctgaatataagggtaacaatggttggacacctgatgcatggaacaagattgccaaggaatttcaagagagggaaagatatgcaggtttctcaaaagttcaaatccaagaaaaggaaaaggagttaaagagagattacaggatgttgaaagatgcgaggaaacaaagcggagtttcttgggatgagaaaaggtgtatgattcaagttgatccaccgatatgggacaacataatcaaatcatttccaagggctaaaaaattccgcaacaaatcttttcctttgtttgaagctttgggagagctacatgatggtaatactgctgaagggacctacaacttcacttctactcaaccaaatggtccagatctcacacaaattgggtctggagatgttcctatcaatatagaagaccgtgaagatgtgggagaccctttggcagatcacagacaaaatgaagtagaagacaaagtgtatgaagttgaaggggttgatgtaaatgctgataggcaggatgaaaggtcaaaaaggacttttgttgtttcaaggaatgaagaagaaaaaggactaaagaggccaaagaagagttccaacatagaggtattgatggagaggtacctaaacattagaagcaaacaagctgaagatgaaacgacccaattggcaagagaaagggaggcaagaggaggtgatgatttctcaattaagaattgcatagcagttctaaacacattggaagtcacaaaagaggagaaggtcaaagcatataaggtgttcaaggaccctgacaatcgacagatattcttgagtgcatgcaatgatgatagagaggctgcattgatgtggttgagggatgagatggcttagcagactgttgatccatatatttcagatgagagagtgggattagctgagcctgcagaaggaatacagactgtgccctcatgggaaaaaactagacaatttgaacttgttgctttgagttgcttgtactgacttgcctgtgaaaaaactttgctttggtccgaagaacactgaaaaaactatgctttggtctgctctgaatctagatttaaatttctttgattctgattctgaaatgatggttgagtctgcttgaataaattctttggatgtat

SEQ ID NO: 204615 - DNA, 3443 bp, Zea Mays
tagggctacaattcgcccccttcccgcacaacgcatcccccttcctcctccccgtcgatggtgttgtcttctctctcaccctaggacaagggagacactatcgctcctctgccaacgatgtcgagtgctcccccacacgtacggagttgttccaaagactcctgtacttcccctgcaagcctcggcggtgaccatcatcgatctatggacctcggtgagtggaggtcacggatctactccaccggtgtcgacgaggtttgtttccccgtcctggagaagcgacgacgcaatagatcttcgtgcactgcagagtcgtctcccccaagccgcaaaggaatcactccactccatcctcgttctttgaatcgatctggtaaaccttggcctttcccccaaatcttcccgctgtccttccaccccctcgcctccataaccccacccactgtactgcttttgtttcacttgctttctgttgaatccatgctacatttgactgtgaattcaggaaatcattaagtataatcgaagtcccgttgatttctggttttgtaggacattatgatctgttttcttgatggtacataaactgagtttttatagttgttagatgcttgttgtattcgtttgtttagttcagactgcagaggttcaacaacagcaggcttagggtatgtgttgatcttaactccattttcattagcccattagaagcaatgtgttattttttggttacattattatcttttggccgtgaatggcaccaatacataattagttggtatgcacagacaactttgtaagcctgacttggtgatagctatggtattatgtaatccaccttagtacacaacactagctgttcatgcatttacttatctgtcatgatatactccaattatcctagtacatctaaataatctggtaaggtatattacatcattcatttgagttgtacactaataaacaaatgttatccatgtgtagagccttgtggtgaaatacttgtcacttgtgtccgtcatcttgtttgttggtttgtttatctatctttttgcaagctcgtccaagagccggccaaaagcaagcaagaagagatgttgatttacttataggttgtagttttaggtgtatctggtggttttgccagaggaactcttagtagtttgagctgagtgaaagcttttaagtttacaattactgaccacaccatgaattacaacgacgtgagcatcagttttgaaggtttagcaaactctggcattttctgactttcatgctgtccatcttccaaatgaagcccttttggaggcaaatctagttttatctgctctatgttatgtcaatactgattttgtatatttgtaagtgctgtggcaatactgattagttatgattattgaaaatatataatttaatggatatgatatacatatttatccttctttaagacactctatttttgtgtgagtgcagtggcaaatgttttcggctgttggccatgaatttatttagtattttatttgatctcatgagattagaacatacatctctagaagctttgaaggacattccttagtcgatatgcccaaatgatggttttcttgaccaggtgacatttgctattcaaccattaattactaagtaaccttgaagtataatttatttagtatgctattcagcctttactaagtaatcttgaagtataatttatctgcactgattgatttttgttctgtgctaccagctaaccagggtcattaaaatgtagtgttggccatttttaactatgtcagctcacctagaaaattttccttaaccaagcatcccatatacaacacaatgtcctctagagaaaacatttgaattctttgtcttggaacaatgtctcggtctgcaggtctggttctcaaatacaatcgtcaagtcttgcgagcatttctttgagcctcattctctaccaatgaagcactttcctgtcactagaactgaactatagtcttcatagtttcactacactcaatttgggaattgtatatcataattgtacttttcttttctttttctatatactaaattttcttgtttttattaacacaattgtgaaggcttatcattacacgtccatgtgtcattgtgctcacttggatcttactaaagacaaagtatgggctgagaaagttcattggcatttgagtttgcatggctggccttattttggtcgtattttctgatgtgtgttcttcttatcgagcaagtatgaacaagcttcattttttatacatatggaattgcactattacagttctgatgtcatactgaatgcattttcttgaaaaaatgataatatgaatttacaacaacgaatgttcatctcacagtatttacatagatgagaataatgtccatattacctcactatgacatggttaaataaaatttatcacaggaaatgaaactgtcagctatgaaaacccaaagccaactgctggaatacattgccttgtctttgtagtctcctgctagtttatccagcaaacagtttatgcataagggtcttcttttggttaattagggttcttttggtcagttatcatatgatcacttgttgctttattaggatcctgtctggggaatcttcatccttttcacccttcacctgtttttgtttcgaatacaaatttgtatgttttgaatgggattgctaaagtgatattacagttactttctgtcggtttaaagtctgatgataaatggagtgtggagtatggactactaccatttattcctactgcaaaatcatttaaaatggatatagttttggccatgttactacaattgcaacgatggataagttatccctgcttgttctttatgggtatgtgttctagattctagaagattaatgcttgaacccatctaacaatgttgtggctttaaccgatttcaggtgtggatctgatttgtaatggcttattaggatttaggccaggtgtgatctgattgaagaggactatagtctatagatcatatgctcatttcaacatcaagggcaatttgattcaattaagtctaggatgatgattttcagtacctaggatgaagtttcagagctgccacctaatttcagagctgcaagatttctacagaattggaagactatgctaccaaaaaagctttcctaatttacctaagatgaagttcagtattgtttaggacgagtcatatgtttatgtctttgtgtctccaaaaatatttgtacacgtatcaagtggtgattattttaagtttcgctactctatatattggctattttatttcaatgagaaatggtttgtccattgcaaccgtgtggagtttctcatttttattaatggcaaatgctgatgtatattcatttttgttgaataaatggtttatttcttgaaacatgtatatgtgttccc

SEQ ID NO: 204616 - DNA, 3433 bp, Zea Mays
tagggctacaattcgcccccttcccgcacaacgcatcccccttcctcctccccgtcgatggtgttgtcttctctctcaccctaggacaagggagacactatcgctcctctgccaacgatgtcgagtgctcccccacacgtacggagttgttccaaagactcctgtacttcccctgcaagcctcggcggtgaccatcatcgatctatggacctcggtgagtggaggtcacggatctactccaccggtgtcgacgaggtttgtttccccgtcctggagaagcgacgacgcaatagatcttcgtgcactgcagagtcgtctcccccaagccgcaaaggaatcactccactccatcctcgttctttgaatcgatctggtaaaccttggcctttcccccaaatcttcccgctgtccttccaccccctcgcctccataaccccacccactgtactgcttttgtttcacttgctttctgttgaatccatgctacatttgactgtgaattcaggaaatcattaagtataatcgaagtcccgttgatttctggttttgtaggacattatgatctgttttcttgatggtacataaactgagtttttatagttgttagatgcttgttgtattcgtttgtttagttcagactgcagaggttcaacaacagcaggcttagggtatgtgttgatcttaactccattttcattagcccattagaagcaatgtgttattttttggttacattattatcttttggccgtgaatggcaccaatacataattagttggtatgcacagacaactttgtaagcctgacttggtgatagctatggtattatgtaatccaccttagtacacaacactagctgttcatgcatttacttatctgtcatgatatactccaattatcctagtacatctaaataatctggtaaggtatattacatcattcatttgagttgtacactaataaacaaatgttatccatgtgtagagccttgtggtgaaatacttgtcacttgtgtccgtcatcttgtttgttggtttgtttatctatctttttgcaagctcgtccaagagccggccaaaagcaagcaagaagagatgttgatttacttataggttgtagttttaggtgtatctggtggttttgccagaggaactcttagtagtttgagctgagtgaaagcttttaagtttacaattactgaccacaccatgaattacaacgacgtgagcatcagttttgaaggtttagcaaactctggcattttctgactttcatgctgtccatcttccaaatgaagcccttttggaggcaaatctagttttatctgctctatgttatgtcaatactgattttgtatatttgtaagtgctgtggcaatactgattagttatgattattgaaaatatataatttaatggatatgatatacatatttatccttctttaagacactctatttttgtgtgagtgcagtggcaaatgttttcggctgttggccatgaatttatttagtattttatttgatctcatgagattagaacatacatctctagaagctttgaaggacattccttagtcgatatgcccaaatgatggttttcttgaccaggtgacatttgctattcaaccattaattactaagtaaccttgaagtataatttatttagtatgctattcagcctttactaagtaatcttgaagtataatttatctgcactgattgatttttgttctgtgctaccagctaaccagggtcattaaaatgtagtgttggccatttttaactatgtcagctcacctagaaaattttccttaaccaagcatcccatatacaacacaatgtcctctagagaaaacatttgaattctttgtcttggaacaatgtctcggtctgcaggtctggttctcaaatacaatcgtcaagtcttgcgagcatttctttgagcctcattctctaccaatgaagcactttcctgtcactagaactgaactatagtcttcatagtttcactacactcaatttgggaattgtatatcataattgtacttttcttttctttttctatatactaaattttcttgtttttattaacacaattgtgaaggcttatcattacacgtccatgtgtcattgtgctcacttggatcttactaaagacaaagtatgggctgagaaagttcattggcatttgagtttgcatggctggccttattttggtcgtattttctgatgtgtgttcttcttatcgagcaagtatgaacaagcttcattttttatacatatggaattgcactattacagttctgatgtcatactgaatgcattttcttgaaaaaatgataatatgaatttacaacaacgaatgttcatctcacagtatttacatagatgagaataatgtccatattacctcactatgacatggttaaataaaatttatcacaggaaatgaaactgtcagctatgaaaacccaaagccaactgctggaatacattgccttgtctttgtagtctcctgctagtttatccagcaaacagtttatgcataagggtcttcttttggttaattagggttcttttggtcagttatcatatgatcacttgttgctttattaggatcctgtctggggaatcttcatccttttcacccttcacctgtttttgtttcgaatacaaatttgtatgttttgaatgggattgctaaagtgatattacagttactttctgtcggtttaaagtctgatgataaatggagtgtggagtatggactactaccatttattcctactgcaaaatcatttaaaatggatatagttttggccatgttactacaattgcaacgatggataagttatccctgcttgttctttatgggtatgtgttctagattctagaagattaatgcttgaacccatctaacaatgttgtggctttaaccgatttcaggtgtggatctgatttgtaatggcttattaggatttaggccagattgaagaggactatagtctatagatcatatgctcatttcaacatcaagggcaatttgattcaattaagtctaggatgatgattttcagtacctaggatgaagtttcagagctgccacctaatttcagagctgcaagatttctacagaattggaagactatgctaccaaaaaagctttcctaatttacctaagatgaagttcagtattgtttaggacgagtcatatgtttatgtctttgtgtctccaaaaatatttgtacacgtatcaagtggtgattattttaagtttcgctactctatatattggctattttatttcaatgagaaatggtttgtccattgcaaccgtgtggagtttctcatttttattaatggcaaatgctgatgtatattcatttttgttgaataaatggtttatttcttgaaacatgtatatgtgttccc

SEQ ID NO: 204617 - DNA, 2723 bp, Zea Mays
ggctacaattcgcccccttcccgcacaacgcatcccccttcctcctccccgtcgatggtgttgtcttctctctcaccctaggacaagggagacactatcgctcctctgccaacgatgtcgagtgctcccccacacgtacggagttgttccaaagactcctgtacttcccctgcaagcctcggcggtgaccatcatcgatctatggacctcggtgagtggaggtcacggatctactccaccggtgtcgacgaggtttgtttccccgtcctggagaagcgacgacgcaatagatcttcgtgcactgcagagtcgtctcccccaagccgcaaaggaatcactccactccatcctcgttctttgaatcgatctggtaaaccttggcctttcccccaaatcttcccgctgtccttccaccccctcgcctccataaccccacccactgtactgcttttgtttcacttgctttctgttgaatccatgctacatttgactgtgaattcaggaaatcattaagtataatcgaagtcccgttgatttctggttttgtaggacattatgatctgttttcttgatggtacataaactgagtttttatagttgttagatgcttgttgtattcgtttgtttagttcagactgcagaggttcaacaacagcaggcttaggtggcaaatgttttcggctgttggccatgaatttatttagtattttatttgatctcatgagattagaacatacatctctagaagctttgaaggacattccttagtcgatatgcccaaatgatggttttcttgaccaggtgacatttgctattcaaccattaattactaagtaaccttgaagtataatttatttagtatgctattcagcctttactaagtaatcttgaagtataatttatctgcactgattgatttttgttctgtgctaccagctaaccagggtcattaaaatgtagtgttggccatttttaactatgtcagctcacctagaaaattttccttaaccaagcatcccatatacaacacaatgtcctctagagaaaacatttgaattctttgtcttggaacaatgtctcggtctgcaggtctggttctcaaatacaatcgtcaagtcttgcgagcatttctttgagcctcattctctaccaatgaagcactttcctgtcactagaactgaactatagtcttcatagtttcactacactcaatttgggaattgtatatcataattgtacttttcttttctttttctatatactaaattttcttgtttttattaacacaattgtgaaggcttatcattacacgtccatgtgtcattgtgctcacttggatcttactaaagacaaagtatgggctgagaaagttcattggcatttgagtttgcatggctggccttattttggtcgtattttctgatgtgtgttcttcttatcgagcaagtatgaacaagcttcattttttatacatatggaattgcactattacagttctgatgtcatactgaatgcattttcttgaaaaaatgataatatgaatttacaacaacgaatgttcatctcacagtatttacatagatgagaataatgtccatattacctcactatgacatggttaaataaaatttatcacaggaaatgaaactgtcagctatgaaaacccaaagccaactgctggaatacattgccttgtctttgtagtctcctgctagtttatccagcaaacagtttatgcataagggtcttcttttggttaattagggttcttttggtcagttatcatatgatcacttgttgctttattaggatcctgtctggggaatcttcatccttttcacccttcacctgtttttgtttcgaatacaaatttgtatgttttgaatgggattgctaaagtgatattacagttactttctgtcggtttaaagtctgatgataaatggagtgtggagtatggactactaccatttattcctactgcaaaatcatttaaaatggatatagttttggccatgttactacaattgcaacgatggataagttatccctgcttgttctttatgggtatgtgttctagattctagaagattaatgcttgaacccatctaacaatgttgtggctttaaccgatttcaggtgtggatctgatttgtaatggcttattaggatttaggccaggtgtgatctgattgaagaggactatagtctatagatcatatgctcatttcaacatcaagggcaatttgattcaattaagtctaggatgatgattttcagtacctaggatgaagtttcagagctgccacctaatttcaggccagatttattttccagagccgctagatttcagtttcagagctgcacgatgaatccacacttgattctattttctcttgactttcagagctgcaagatttctacagaattggaagactatgctaccaaaaaagctttcctaatttacctaagatgaagttcagtattgtttaggacgagtcatatgtttatgtctttgtgtctccaaaaatatttgtacacgtatcaagtggtgattattttaagtttcgctactctatatattggctattttatttcaatgagaaatggtttgtccattgcaaccgtgtggagtttctcatttttattaatggcaaatgctgatgtatattcatttttgttgaataaatggtttatttcttgaaacatgtatatgtgttccc

SEQ ID NO: 204618 - DNA, 1075 bp, Zea Mays
caattcgcccccttcccgcacaacgcatcccccttcctcctccccgtcgatggtgttgtcttctctctcaccctaggacaagggagacactatcgctcctctgccaacgatgtcgagtgctcccccacacgtacggagttgttccaaagactcctgtacttcccctgcaagcctcggcggtgaccatcatcgatctatggacctcggtgagtggaggtcacggatctactccaccggtgtcgacgaggtttgtttccccgtcctggagaagcgacgacgcaatagatcttcgtgcactgcagagtcgtctcccccaagccgcaaaggaatcactccactccatcctcgttctttgaatcgatctgtggcaaatgttttcggctgttggccatgaatttatttagtattttatttgatctcatgagattagaacatacatctctagaagctttgaaggacattccttagtcgatatgcccaaatgatggttttcttgaccaggtgtggatctgatttgtaatggcttattaggatttaggccagattgaagaggactatagtctatagatcatatgctcatttcaacatcaagggcaatttgattcaattaagtctaggatgatgattttcagtacctaggatgaagtttcagagctgccacctaatttcaggccagatttattttccagagccgctagatttcagtttcagagctgcacgatgaatccacacttgattctattttctcttgactttcagagctgcaagatttctacagaattggaagactatgctaccaaaaaagctttcctaatttacctaagatgaagttcagtattgtttaggacgagtcatatgtttatgtctttgtgtctccaaaaatatttgtacacgtatcaagtggtgattattttaagtttcgctactctatatattggctattttatttcaatgagaaatggtttgtccattgcaaccgtgtggagtttctcatttttattaatggcaaatgctgatgtatattcatttttgttgaataaatggtttatttcttgaaacatgtatatgtgttccc

SEQ ID NO: 204619 - DNA, 932 bp, Zea Mays
aaccttttcactgatccagcgaaggcatactgccgccgccgtttctgcatctcccatcttcgcaacgccggcgctccatcttgcgctccctccctcactcgctctcggtacgcaggcggcggcggcggcggcggtggcggctctcagattcgggctctcagcgacggcgtcagcagcttccactcccgcctctcgccagttgcctcgcgccctcgcctccgtaaaacacctcatccccaaatgaagcacatattcaagattgctgcaatactggtagcaatctctgctatctggattgctctccttgaaacctccactgttcctcgaagttatacttggctgcttcccatctacttggtagtggctcttggatgctatggcctttttatggttggatttggacttatgttcttcccaacttgtcctcgagaagctgtactactgcaacaggatattgtggaggcaaaggaattcttaggaaagaggggtgttgatgtgggctctgagtgagatcaattttaagtggttgacatacatgtctgttttgaaggatcaccattctgttccttggaataggttgcttttttgggtactgtagataggaaacatataattccactatgttcagctattactaacacggtttttgtgagttggcatgttatagttctgcttttgtcaatgatggggctcacattgacttgccggtgtttttcaagttttaaagactgaactgttctaggaatatttggtttctatcttgatttcccgtcagtggaccatttaccaattctgctgttcagtatgtcaccttatgcgttatgacatcacttgtactcgcaagtcccttcgaggattcagtgtttgaatttctctgcagtacttgcaaagtttctttcattcaatatggcatgttacaaactacagttaac

SEQ ID NO: 204620 - DNA, 491 bp, Zea Mays
atgtggtgggtgggcaacttgctgctgtcccaacaatttgggggccagcacactgcacgtctttgtgttccagagaagatttcgagtctgcgattgaggcagcggcgtgttgacaggagacggcgggaggcgctcaacaggctcgttgacctgaaaggaatcgttagggtcttctaccgggcccggccgctggttcacacgaacagcttgcatgcccaatcacctgttaccgttgagcaggagaggatcacggtcagggcagccgggatcaaggagttcggcgctgatagggttttcggccaggagtcaacacaaggtctgtacgcctgtctttctttatttcttactcacttgttccagtgtgtggtccatgcagatgatatgtttgaagaagtgaaaccgatcctcaggtctacactcgacggccacaacatatgcatcctcgcgtacggccagaccgggacggggaagacctacacaatggaaggaac

SEQ ID NO: 204621 - DNA, 1369 bp, Zea Mays
tttgaaaaacggccgacacgaaggcccctcgggtgcgttttttttacgctgtcaatgcataacctgcgttggcattccgcctgctggacttcctcgtgctgtgtctctgtctgtcgctctcgctctcagacgactgggccgccgccgcttggtgctgaggctttcgttggtctcttcggcggcgacgagcacccaccagcagttctgtagaaatggctgatggtgaggacatccagcctcttgtctgcgacaatggcaccggaatggtcaaggctggttttgctggggacgatgcaccaagggcggttttccctagcattgttggccgtcctcgccacactggtgtcatggtagggatgggacagaaggatgcatatgttggcgatgaggcacagtccaagagaggtattctcacgctcaagtacccgattgagcacggtattgtgagcaactgggatgacatggagaaaatctggcatcatactttctacaacgagcttcgtgttgcaccagaggagcaccctgtgttgctcactgaggctcctttgaacccaaaggccaacagggagaagatgacccaaattatgtttgagactttcaatgttcctgccatgtatgttgcaatccaagcagttctatcactctatgctagtgggcgtactactggtattgttctttgactctggtgatggtgtgagccacactgtgcccatttacgaaggatatgcccttcctcatgccattcttcgtttggatcttgctggtcgggacctcacagactccctcatgaaaatcctgactgagaggggttactccttcacaacctctgccgagcgagaaattgtaagggacatcaaggagaagctggcatatatagcccttgactatgagcaagagttggaaactgccaagaacagctcctcagttgaaaagagctatgagctacctgatggccaagtaatcaccattggtgcagagagattcagatgccctgaggtcctcttccagccatccatgattggtatggaggctgccggaatccatgagacaacatacaattcaatcatgaagtgcgacgtggatatcaggaaggacctctacggcaacattgtgctcagtggaggttcgactatgttcccgggaatcgctgatcgtatgagcaaggagatcacttcccttgcaccaagcagcatgaagatcaaggtcgttgcaccgcctgagaggaagtatagtgtctggataggagggtccatcctagcctcgctgagcactttccaacagatgtggatatctaaggaggagtacgatgagtctggcccggcaattgttcacaggaagtgcttctaggtaacgacgaggaacttgtgaa

SEQ ID NO: 204622 - DNA, 1498 bp, Zea Mays
ttcattcacactgcactcaccgtcatggcatccaccaaggacttctcgttcgtctctgccttcaggtccaacaaatactttttcatgtggatcctctctcttttgaaatgtgaactgacttctttgctcaagtcacttaacctctggtctgaccagttcattatattgttactgagcttggttgatgtatggtgatgggtactacagtaaaagcagtttataattccaagataagaaattctggtgtttcagtttaggccatggagacacaccattgttgtgcaattttgtttagtggtggtgctagatgcacctggattttcatatgtttcatttggagaccggaaactttatgccatttttagtgatgttgcaggctgccctttgtgctcaagttcttccaagacgtcaagcgtgtgcgagaacaaggagctatagatgatcgtgacactttcctccatgcagtgcgagatcccctatgttttcactcaaggtttggtgaaatgggtggaatggggggtggccgtgctgctcggaacagaccaatgcaaggtgatgatgagagctacaatctggtactcaatttcaaggaagctatgtttggtgtggagaaggagattgagataaccagattggaaggctgttacacctgcgatggaagtggtgccaagccaggtacaaaggcaacgacatgtaaaacttgtggagctcagggccaggagaggaggccctcctgggacctttatgtcttcattgatgttctctctgatcctattcttaagcgagatgggacaaacattctctacacatgcaaggtttcttacattgatgcaatccttgggacaaccgtcaaaatccccactgttgacggaacagttgaccttaagatacccttagggactcagccaggcacagctctggtgatgtccaagaaaggtgtcccgcttctcgggaagtcaaatgcccgtggagaccaactggtgcgtgtccaggttgagattccgaagcgtctgagcagcgacgagaagaagctaattgaggagcttgcaaacctgaacaaggctcaaacaaccaatagcaggagatgattgtcgcacaaggcttcgtaggacaacgtgcttgtgtggtaggcaattttgatgcaaactgcagcgatgattggatggaaagagttggtagtgataaactcttctacgaactacatacaacaaggggtacactggagcaaaaatgtgtcgttccacatctgtaaccttgtttttaagctattaaagttgagtcagtgaactggacgtttttgcaatagcttagcatatgcactatgcgactttattagccttttttgttgttatacgacttttgtattcttgaaagccttaggcaaaatatctgatggtggaatcaggtttagacttgacatttctttcacaaatgctgcaccatgcattcatggaatctgtaagctgtaccatggaaatgttaactgtagttttattgt

SEQ ID NO: 204623 - DNA, 3564 bp, Zea Mays
cacccacccggcccctgtcgcgtttccgtagttcctgtcctgtccgcgagccgcgtcagcgtcagtgcgtcaccggcctcccgtccgtcgccgccgccgggggcccatccacatccgccgccgcgggcccgtccgtccaccacaacgccgccatccgcggccgaaggcgctcccccgtccgcccgccaccacgccaccgcctcgcccctgtccgctgccgcgccgccgtcagctcggccccgtccgcaaccgtggccccatctacatctgtcgtcaccgccgccctcccatcacacgccgccatccgtccccttcggaagcagtgaagtgcttgcgcatcctctacctctctttgataaaactgggcttgggcccgctccaccacgaaggaacaagggaagggaaaggaagcagcaagcgctccgccgacctccccggtcgccgcaccgcttccctcccacgtcgcagacgccgcgcccgtcgcccgactcggaagaacggtcctggcccggcgctcgctcgcccgccgttagcttgtacccctcctgctcggatccaagaacgattccggtatcgacggcggcggcggtgttcctgttgtcaccggcgcgtttcgtctcgtgcgtctcgttctgtaactggaaaagaagccgcatcattttctttttttactcttagttatttctgatttatttgggtcctgctctttctcatctagttttggggcctgctcccggggttcttgagttgttaatgtcaagtgagaaaccgactgtaccagacattgttttaatcccccaccgtccggttcttttttgcacatgccgttgattcaatagttgtccttcactctgacacccggaggaaaataaaaaggaaaggaaaaataagtgttgaggcagtgaagggcaaaaagatcaaatttacgtttagcgaaggtagctgtgtgagaatttgttaattctgaagttgagtgttaggagagtttgtgagggctgtggaatgtcgaaggtgaagaacaataatggttatcatggagtcactgagccaatctcgctgagtggaccgactgagaaggaccttatgcagacagctgaggttgaaaagtacctttcagatgcaggactctatgagaggcaagatgaggctatcttgcgagaagaggttttaggcaagctggaccagactgtgaaagcttggattaagaaggctactaggatcagcgggtacatggccctggtgccgacattgacaccctatgtgttggtccaagacatgcaactcgaaacgagtacttcttcagatggcttcatgatatcctagctgagatgccagaagtttctgagttacatccagtaccagatgctcatgtgcctgttctgggattcaaaattaatggggtctcaattgaccttttgtatgctaatcttgctcatgcagtgattcctgaggacctagatctttctcaggactctatactgcataatgtcgatgaacagactgttcgtagtctaaatgggtgtcgagttactgatcaaattctaagattggttccaaacattctgagttttcgcacaaccttaagattcataaggtgttggggaaagcgccgtggggtttactcaaatgttatgggatttctgggtggtataaactgggcaattcttgtgggtcgcatctgtcaattgtacccaaatgcatcaccaagcatgttgatatcccgttttttccgagtctacagcaaatggaagtggcctaatcctgttatgctttgccatattgaggaaggttatcttggtctccctgtttgggatccaagaagaaattacagagacaggggccatcaaatgcctattattacacctgcttacccttgcatgaattcgagctacaatgtatctgttagtactaggtatgtgatggtccaagaattcacgcaagcatttgagatttgtcaggccatagatgaaggaaaagcagactgggatgcattgtttgagccatatccattttttgaatcatataaaaattatctagaagttaatatcacagcgagaaatgaagatgacctcaggaattggaaaggatgggtggaatctcgccttcgcactcttgtattaaagattgagcgttattcacatgagatgatccttgcacacccatatcccaaagatttctcagataaatccaggcccttacatatcttttacttcatgggtctttggagaaaacaaactacccaagctcaagaaactgagcaattcgacatcaggggaattgtaaatgagtttaagaatactatttgtgcatatcaacaccggaaagaaggaatggacattgaagtgtcccatgtaaaaagaaaagaaatccctttgtttgtttttcctggtggagtgcgtccttctcgtacttctagaacaacgcacaagaacagccgtgccattccaacacgtgatgtttcagctgatgatcaagtgggaaacctattgggcgttgccagttgtagtgatgctcaacatgtaccatgtaaaggcagctatatgaaacaaccagaaccagattttgctggaggctttcagttgccaggaagtatttctctgttgccccctagcttacccaataaagtagttctgaatgggtctgctaattttcatgcagaatctattgagagtgaacatccagaacactatcaggaaattcaaaaagggaatgtgcaggcagtgctgcaaacaacttgctgaagttatccccagctattccagccacacctgatgaacttgatgagctgatatcctatcaaactaatcagaaagatgtaaatgctgaaaataacttggagatcggttctgaaaataacttggaacaaatatgcagtctgaggccccaagaatctaataataatctgaagcgtaaagccaatcaagagctcgagccacttgagcttgccgtcccatccactggtgctgcgccgcaatcgacaggaactgccccaagaaaaccactcaggttgaggttaacgactttggggaaaccgaagccagctgaaggaacttcctgaatggaattgcccaggagccaacatacctagagcttgtttttccttgtattgaagcaaggatatgtggaagcgctcggcacatagcctgctttggcactgcgagttgaaacgaaatggaaaacggaggccgcctgacgtaaatgagtgcgattgtaataaattgtatgtagttcatagctgggttggtatcagagttcaccatttcgtttttgctgtagcgaatttcgtttttttaaccaaagtttgactcttatattttttgaatttggaaccaaaatccataaaaaacctgaccgaaattcgcatcttggtcaacagcgagcagcgaaaattggaaatttcaccaaaattcggtgatttccgagaaacgaatccgtggttgggcatagatgtacgcagcggtacattttctcgacgacttagctatgcttgtaattgcaatgatgttcaaacggaagtggatatcgtctttgaagcattatgatgttctctatgtaagctaccga

SEQ ID NO: 204624 - DNA, 1414 bp, Zea Mays
gttctcccaatcgcggctaagtctccgcctccagagacagatgtcggcggcgacggaggttgcgccagttcagcaaccgagccatccggcggcggcggggtggctcggcctcggtctgctcttccagatcctgctccggatcatccgctcctcctgggcgcagcttctctccttcgtgcgcctgcgccaccggctcctcccagttaccgcgtcgcctgagctggccttcgtgcagctcccacccgaggcgcctgctgacgcgtcgcctccgccgcttcggcggctcatggtcgtgcttgacttggatgagactttagtttgcgcgtacgagtcatcgagccttccttctactatgcgcacacatgctgttgaggcaggattgcatcgctttgacatggagtgcgtattgtctgaaaaggatactgagggaaggcagaggataaatcgtgtaactgtctttgagcgtcctggcttacatgagtttttgcagcgaactagcgaatttgctgaccttgttctctttacagctggtttggaagggaatacagagagcatgtaaaagacctttcttgtttgtccaaagatttccagagaattgtccttgttgacaacaacccatacagtttcttactgcaaccattgaatggaataccatgcgttacgttttcggctggacaacctgttgacgaccagcttatgggaacgatgtttccgcttctcaagcatctcgctctccaaaaagatgtgaggcctgcattgtatgaagcatttcacatgccagagtggttccaaagacaaggaatcccacaaattgaacaggcagtctaggaattgcagctaccacattggacaattgaaagtctcaaaaacctgctactgtacagtagaactcttttagctctcccctaccagcgttattaattcccttgacggagtctcagcagcacaaccaccgtggcatcctgctcgtagccgccaggcgtggcgggagggcgaggttggagtctgcgtgctgcatcaatccaagcagtcgacgcagactggttcgcagcacggcgcaacccattcatggcacgtcacttccctaggagctggaccacttcatcttcatccgtgcatggcctttcatcaatggcaacaacttctattagaggccgagtgaagcacttccagagccgaaccaaacggataacgtttttagttcctctgtagtagtaacagttagcactgttagtagctagttgcattaccattcccgcactccctcttgaaacaaacagcaccatggttgtagtgctcccaaccattatttaggtcaagaaccagaaatccggttgaaaacacagtgcatcagattaaacgacaaaggcaaatctatgaattccattttgctataccatgagttggatcaaca

SEQ ID NO: 204625 - DNA, 2827 bp, Zea Mays
cctaaatctctcaccccgcgcgtctctcttctttccctctgtctaccgcacgcgcccgtggctagctgccagccgcgcgcccgccgccaccccgcgcccaccccactgcgcgccggctggcgcgccgccacccagcgcggcccgccctcgccaccctgtggccccgccaccgccccgctgccccaccgttaaggcaggtgatgcggccgacaagggggcggcgtccaggaacccacaaaatcacgtcgtggtggggaggcacgggattcggatccggccgtggccacacccggaccccatcgaggtgatgcgggcgcaacggatcatggagcgtgtgcaggaggaacagcgccgctggtacggcgtcaaggagccggggcaggtgctcgccgtcaccccgacctactcacgcgcgttccaggcgctccacctcaccggcctcctccactcactccgtcggaatccttgcgcatactggcaaggcagaccaactgctgctcagcgaggaggacaagcagaatatgcctcttccagtccatggccctgcttgcaagtcctcagggcatctgattggatggcacacgttcaactcattgcccttctctaggaagacggccacagttgttggtgaagcagcccctattctgcccagggatttctagtgggctagttttgtgttgaactcgaggatgctgtggaaggaggctgacggcaagcctgactgggtgaaggatcttgatgctgtgggcgagaactttgaggagcgctggttaaaggcatcaaagcgcagtgccgctaagaaactgtcaaaattgtcgaggtcgcataatgattcgctgctgtggatcaacaagatacctgatattatttctattgacgacgaaatctattcaaatgacgatgatccagagagatgggacatgcagattttccgatcaattgattcgaattctgtcaagggttttccaaaagatccacgggaggccactagtaagaatcttgtttgtgggaaaatgtactgattgatatgagcgtgcatacaacatatgtgaatgccatccgaggtgctcaacatttcatctatattgagaaccagtacttccttggctcttcatttaactgggattcacatagagatgttggtgctaataatctgatacccactgagatagcactgaaaattgcaaacaagatttattcgaatgagagattttcagcttatatagtagttccaatgtggcctgagggcaatcctactggtactcttacgcaaagattctttattggcagaaaatgacaatgcaaattatgtatgagataatctataaggccatgaaagaagtaggactagatggtacatatgagccacaggattacctgaatttcttctgccttggtaaccgtgaagccgaggacactacttgcacatctagtggaccattctcaaccagtaacccacagaaaaatacaattatgctgcagcttggatatccaatcaggaccaagctcggaataataggagattcatggtgtatgtgcactcgaaaggcatgattgtggatgatgaatatgtgataattggatccgctaacatcaaccagagatccatggaaggaactagagatacagagattgcaatggctgcataccaaccccagcatacattggcaaatatgctttctgctcctcgtggatagattttcgggtacaggaaaatacagtgtacgtgttgaaactgttatcctgccccaggttgggatagacggtggtacattcgtgttggtagaactgtgagaagaaaagatgggaaaactttgctttcttggctgtgatgattatctgctcaaacaagacatgcaaattgcaaaactcttaaaggatagtattagttctatttgttcatatagttctacagctagttgtttcttgctttgttcatggattgcaatactggataagatcatgatggatgttgtgtgtgttttaatcaccatttctaaaatttattctattggtaagacgattctaagatataggtcggagatggattccttgcatatacataaatagataaagaagcaaccggtttataacaaaaatatgtcttctattttgcctgttgcccaattctcttttagtgtagcctacttacaataattaaaagaagagttggtgtctgtttgagtagacaactaagtgcatatataagtacgtgcatgattttgattactaattgtgattttgatgatctttcttttgaagacggtctaacatataagcgcatgatttagatgaacggaattactattgtgccatttctgaagaatcttactgatttctcttgccttcttagaacaacatgggaagaagtgatgatgacagtccatcgccgccaagaggtcacaagagaagaacttgcagcccaagtcctcgtggtagttatggaggccatggcaagcgccccacaactaatcttatggtgacgaatcttggtccggattgtaggattctaactctcatcaagtgactcctcccctcacgatgactttgcggacagatgtctcaattatagtggtggagctacgaacaacaatccgatgtcctgatcgagagcgatggagctaatgtttgaacttgtgtgtttgaacttgtgaactaaaaatgtgaactatggatgtgaatttatgtgaatttgtgaaattatgtatttgaacttatgtgaatttgtgaacttatgtatttggacttgtgtgaatttgtgatatgaatatatatccatgtgtttgaaatttgtattgtatgtgatattctgtgttgcatgtgattt

SEQ ID NO: 204626 - DNA, 2805 bp, Zea Mays
ctaaatctctcaccccgcgcgtctctcttctttccctctgtctaccgcacgcgcccgtggctagctgccagccgcgcgcccgccgccaccccgcgcccaccccactgcgcgccggctggcgcgccgccacccagcgcggcccgccctcgccaccctgtggccccgccaccgccccgctgccccaccgttaaggcaggtgatgcggccgacaagggggcggcgtccaggaacccacaaaatcacgtcgtggtggggaggcacgggattcggatccggccgtggccacacccggaccccatcgaggtgatgcgggcgcaacggatcatggagcgtgtgcaggaggaacagcgccgctggtacggcgtcaaggagccggggcaggtgctcgccgtcaccccgacctactcacgcgcgttccaggcgctccacctcaccggcctcctccactcactccgtcggaatccttgcgcatactggcaaggcagaccaactgctgctcagcgaggaggacaagcagaatatgcctcttccagtccatggccctgcttgcaagtcctcagggcatctgattggatggcacacgttcaactcattgcccttctctaggaagacggccacagttgttggtgaagcagcccctattctgcccagggatttctagtgggctagttttgtgttgaactcgaggatgctgtggaaggaggctgacggcaagcctgactgggtgaaggatcttgatgctgtgggcgagaactttgaggagcgctggttaaaggcatcaaagcgcagtgccgctaagaaactgtcaaaattgtcgaggtcgcataatgattcgctgctgtggatcaacaagatacctgatattatttctattgacgacgaaatctattcaaatgacgatgatccagagagatgggacatgcagattttccgatcaattgattcgaattctgtcaagggttttccaaaagatccacgggaggccactagtaagaatcttgtttgtgggaaaatgtactgattgatatgagcgtgcatacaacatatgtgaatgccatccgaggtgctcaacatttcatctatattgagaaccagtacttccttggctcttcatttaactgggattcacatagagatgttggtgctaataatctgatacccactgagatagcactgaaaattgcaaacaagatttattcgaatgagagattttcagcttatatagtagttccaatgtggcctgagggcaatcctactggtactcttacgcaaagattctttattggcagaaaatgacaatgcaaattatgtatgagataatctataaggccatgaaagaagtaggactagatggtacatatgagccacaggattacctgaatttcttctgccttggtaaccgtgaagccgaggacactacttgcacatctagtggaccattctcaaccagtaacccacagcttggatatccaatcaggaccaagctcggaataataggagattcatggtgtatgtgcactcgaaaggcatgattgtggatgatgaatatgtgataattggatccgctaacatcaaccagagatccatggaaggaactagagatacagagattgcaatggctgcataccaaccccagcatacattggcaaatatgctttctgctcctcgtggatagattttcgggtacaggaaaatacagtgtacgtgttgaaactgttatcctgccccaggttgggatagacggtggtacattcgtgttggtagaactgtgagaagaaaagatgggaaaactttgctttcttggctgtgatgattatctgctcaaacaagacatgcaaattgcaaaactcttaaaggatagtattagttctatttgttcatatagttctacagctagttgtttcttgctttgttcatggattgcaatactggataagatcatgatggatgttgtgtgtgttttaatcaccatttctaaaatttattctattggtaagacgattctaagatataggtcggagatggattccttgcatatacataaatagataaagaagcaaccggtttataacaaaaatatgtcttctattttgcctgttgcccaattctcttttagtgtagcctacttacaataattaaaagaagagttggtgtctgtttgagtagacaactaagtgcatatataagtacgtgcatgattttgattactaattgtgattttgatgatctttcttttgaagacggtctaacatataagcgcatgatttagatgaacggaattactattgtgccatttctgaagaatcttactgatttctcttgccttcttagaacaacatgggaagaagtgatgatgacagtccatcgccgccaagaggtcacaagagaagaacttgcagcccaagtcctcgtggtagttatggaggccatggcaagcgccccacaactaatcttatggtgacgaatcttggtccggattgtaggattctaactctcatcaagtgactcctcccctcacgatgactttgcggacagatgtctcaattatagtggtggagctacgaacaacaatccgatgtcctgatcgagagcgatggagctaatgtttgaacttgtgtgtttgaacttgtgaactaaaaatgtgaactatggatgtgaatttatgtgaatttgtgaaattatgtatttgaacttatgtgaatttgtgaacttatgtatttggacttgtgtgaatttgtgatatgaatatatatccatgtgtttgaaatttgtattgtatgtgatattctgtgttgcatgtgattt

SEQ ID NO: 204627 - DNA, 1618 bp, Zea Mays
cgcctcccttgcccgccattaactgcctctccctcgctcctctcgctcgctcggctcactccctctccaaagcggcagcctcacgcagtcacgcgctccaccacgccacctccctccacccctcactatatactcactcctgctgttttccgtccatccgcccaccggttcgcagcccgcgcctcaaaaccctagccccgggcggatcgcggggcgcctccgcggtgccagcgacgcggctcgtttgatccgattgttggtcgagccccgccctcgctgccgcgcttcgctccggctgtgcaggtgcagcggcgtgagcaccgagcacactcgcgaatggggaactgctggggtgcgcggatcaaggatgggagccctcaccctggcgcctcaggcctggcactgggattgctgttgctgtgaaaagactcaaccatgagggtttgcaagggcaccgagagtggttggcggaagttaattacctaggtcagttctgtcatcccaaccttgtcaagctgattggatactgcttagaggatgagcaccgactgctagtatacgagttcatgccccgtgggaacatggaaaaccatctgtttaggagaggctcatacttccaacctctgtcatggaaccttagaatgaaggttgcactgggagcagcaaaaggactagcttaccttcatagtgcagaggcaaaagttatttaccgagattttaagacttcgaacatcctccttgacacagattattctgcgaagctttctgattttggattggctaaggatggtcctgtcggtgagaagagccatgtgtccacaagagttatgggaacatatggttatgcagctcctgagtatctttcaacaggtcacctaactgcaaagagcgacatctatagctttggggtagtgcttctggagatgctgtcaggccgccgcgccatcgacaagaaccgcccccagggtgagcacaatctcgtggagtgggctcggccttacctcacacataagcgcaagatattccggatcctggatacgaggctggaaggtcaatacaatctgaacggtgcacaaacaattgctgcccttgctctcgaatgcctatcctacgaagctaagatgaggccgactatggacgctgtggttgctattctagaagagctccagggctctggtgaagccgagaagaagcttcaagaacccaaggccggaaccaaacaggcacctgctgctgtgagtgctagcatgagcagcagccgcaagcctcgccggaaaagtctgggagacacaaaggagactgttggtgttccagatcccaaaccattggcccattctcgttagcaaggaaaagcattgcctggtcaagtcgttagctagactgtagctcgcttgtgaatatgctatggtctgtgtatgtatgttcagagggtaatcgggcttttggcaacagtcttttcgtctttatcatgagctgctcggttcagcctgactggaacctgtatgccgaaacccatggcatcagagagagggggagagagctcatgttccgagtctttaacttatgtcttcgctacacaggctgcatttgttccaggtcatataggatgttcagtagg

SEQ ID NO: 204628 - DNA, 1501 bp, Zea Mays
aattgttactgcctatagctgtctgaatgttctcaaagagtagtggtaaggatgggagtaggcttagcggctgtagtagtcgagcctcttcagcttctatgccaccaagtgcgaagactgaatgtgaaatcctgcgatccgccaatgttaagatcttcaccttcaataatctcaaggcagccacaaggaatttccgtcctgatagtgttctaggtgaaggagggtttggatctgtctataaaggatggatcgatgagaacacattatcaccttgcaggcctggcactgggattgctgttgctgtgaaaagactcaaccatgagggtttgcaagggcaccgagagtggttggcggaagttaattacctaggtcagttctgtcatcccaaccttgtcaagctgattggatactgcttagaggatgagcaccgactgctagtatacgagttcatgccccgtgggaacatggaaaaccatctgtttaggagaggctcatacttccaacctctgtcatggaaccttagaatgaaggttgcactgggagcagcaaaaggactagcttaccttcatagtgcagaggcaaaagttatttaccgagattttaagacttcgaacatcctccttgacacagattattctgcgaagctttctgattttggattggctaaggatggtcctgtcggtgagaagagccatgtgtccacaagagttatgggaacatatggttatgcagctcctgagtatctttcaacaggtcacctaactgcaaagagcgacatctatagctttggggtagtgcttctggagatgctgtcaggccgccgcgccatcgacaagaaccgcccccagggtgagcacaatctcgtggagtgggctcggccttacctcacacataagcgcaagatattccggatcctggatacgaggctggaaggtcaatacaatctgaacggtgcacaaacaattgctgcccttgctctcgaatgcctatcctacgaagctaagatgaggccgactatggacgctgtggttgctattctagaagagctccagggctctggtgaagccgagaagaagcttcaagaacccaaggccggaaccaaacaggcacctgctgctgtgagtgctagcatgagcagcagccgcaagcctcgccggaaaagtctgggagacacaaaggagactgttggtgttccagatcccaaaccattggcccattctcgttagcaaggaaaagcattgcctggtcaagtcgttagctagactgtagctcgcttgtgaatatgctatggtctgtgtatgtatgttcagagggtaatcgggcttttggcaacagtcttttcgtctttatcatgagctgctcggttcagcctgactggaacctgtatgccgaaacccatggcatcagagagagggggagagagctcatgttccgagtctttaacttatgtcttcgctacacaggctgcatttgttccaggtcatataggatgttcagtagg

SEQ ID NO: 204629 - DNA, 1813 bp, Zea Mays
ctaagacatcgcagtcgcagacccgatctgcttatatatactcccatccgttccattcctgcttgttcttccaatcccccctcccccggcgtgcgctccctcctgtctctcttggcgacgactgggcaacggtcgcagctgtatgttcgagcccttcgccgacgacgttcaccaccaggaattttctcagctgtgccaatgatgggttgcttcactgttctcagatccaagaagaagaaaagccattttgataatcctcttgtcccaagcaagaaatcagttgatgcaagggaaagtacgtcctctagacttccggagccagaagttcatgtgccatctttgcaatcagctcctcctagttttaggaacagggtcaagatatccgagtcatcaaatgaagtttcaaacagaaacagcagggctcgcgtgctgtctgctccatcagcccttattgtggttgatcagtttggctttccatattcggaataccgagatcaagatgactccagggataaggaaggtttgacaaaggggcatcgcttttcaaatcctttgccccttcctcttccttcacgcgaaggacattcttttaggaactctggtagcttcaaagccagcaacgtaagcgggccattggagatgtctggccctctcccattgcctctaaagaaatgtgatggacttagaatcttctcttatgaggagatttcatctgcctgccaacgattttctagtgatcagtgtgtttcagaaacacttggttcaacatcatacaaggcaacatttagagatgaatttattgatacgaggaccactgaagcaacagtagctcgattactcccctccactcagagtttgaaggagtttaaaacgcaagcgaccacattggcatcgcttcagcatcccaatttatgtaaactgattggctattatgcaaaagaagattctaatgaaaggatgttggtctatgaacggctttatcatggaagcttagataagctactctttggaagatcagatggtcgtttcatggactggtctaaacgtttgaaggttgccctgggtgctgccagaggtctagctttcttgcatgatgaaggaccctttcaggccatgtacagcgagttctcaactttgaacatccaaatagataaaggtttcactgctaagctttcaggatatggttgtgttggcttcaataccgaggagatatctaatgcacctgtgtctgcagcaaacctttcggtggagaccttggagaagggtttactcactcccaagagcaacgtctggagctttggagtcgtgttactggagctaataactggaaggaagaaccttgatcccaattattccaaagaagaacgcaatattgtcaactggagtaggcctttccttactgatgacagtcgcttgtctcttatcatggactcccgtataaaagggcgctttcccactaaggctgctcggatagtagcagacatcattttgaaatgcctgcgtaaggatccatcggagaggcctaccatgagggatgttgtggaggccctagcaagagtccaggaaataaaggttccgtgcagatatcctctgcaagaaccttctgctgcaccaagaaaagtgatgttgaaatctacatccctcaatgggattgtgcctcaccatcctgtcataaccttctctccatcgccgccttcacataaccagcacttgatttcaccaaggtcgtcgacatctgccttgtttcatccaagggcatgctcttctaccctggacgatccgagtgcaggcggtggcaggacgataaaaatct

SEQ ID NO: 204630 - DNA, 1713 bp, Zea Mays
cagaggcgaagctagcaaccaaatcaagatggctcctgacatcgactggggtaaaaatatacgcataatattggatgtcggatgcaaaagcgctggctttggtattgctctactcgagaaagatgtgataacactatctttaggccttacaaatgaccaaacagaccttgcgcaagttgcccttgaacgtggcatccctgcaacagttggcagtctgggatcgcgaagattacccttccctagtggtgcatttgatgctattcactgtggtgaatgcaatataccatggcattctaatggtggaaaacttctcctagagataaatagaattcttcgtccaggaggatacttcatcatctcaagcagaagtgctgacctggagagtgaagaaggaatatcagcttcaatgaccgcactttgttggaatgcaatagcttacaatagtgacgatgtcagcgaggctggagtaaagatatttcagcgaccagtctcaaatgaggtatatgatctgagagcaaaaaaggatcctccattttgcaaggaagagcagaacaaagctagtgcatggttgaccttgcctttttaggtatactaatatcaaacattgcctgcacaaagcacctgttggtatcgaagaaagaggcagtgactggcctgaggagtggcccaagaggctcgagagtttccctgagtggcttggggaaacagaaacaagggtggcttctgatcataaccattggaaggctgttgttgagaaatcttatctggatggattgggcattgactggtcaaatatccgtaacataatggatatgagggctgtatatggaggatttgcagctgcactggcatctaaaaaggtttgggtcatgaatgttgttcctgtgcatgctgcagacaccctacccataatctacgagcgtggcctgatcggtgtgtatcatgattggtgtgaaccatttagtacatatccaaggtcctatgatcttttacatgctgaccatttattctcacgcctgaagatcagatgtaagcaacctgtctcaattgttgttgagatggaccgtattttgaggcctggaggttgggctatcatccgtgataaactcgagatccttgacccattggagacaatcttgaaatcactgcattgggaaattgtcatgaccttcagaaaggacaaggagggtatcatgtctgtaaagaaaacaacatggcgtccataaactgagctcagattcacaaggctccagcataccattttttgcactatactgctgtcgatttccccggattgtgagacagccattttgtgaatctggggtagatgtacaatatttgttcattcatctcatgacaatatgctcgccgcatctctgtcgggtagtttaagcccagttggatggttggttgtggttagcgttacattgatcaattctttgaagcagcatccaagacgaccagctctagtttcagaaaaagagggcccttcgattccataaacagggttgtacgagatacaagattgtttcttgttgtttaaaaatgtaacaatatagatatatgtaaaggttgtcactgaattaactgcttggtgatgttgtaagttgcaacaatccgtgaagattcaatgcatgaattttcttattgcaaattgtgagcaaacagcaaaagagtttccgatgtatattctgctgtcatttgagaccgttc

SEQ ID NO: 204631 - DNA, 2234 bp, Zea Mays
gccgttcacattgtggggaaacgtacggccattcccgttccccgccgcccctcgcctccgctgcacgcgatcgacgatccacagccaccacctctgcgttccccaccggagcatcttcaccaatcaccactgggctggctcccgcgttccccactggatttctgcacccagcgcttcttctgaaatttagaaggcggtggaaccgtcaaatcaaatggagggatcctcttacgcgtcaaggagctacagcgaactagctgccgcagcttccggaggtggaaggacgctgagggtaataccgctgcggcatccgctgggttctctgtcgacgtcttccacgtcgccgtggtggcgggcggtggtgggaagggctcggggcatggggccgcttgattgggcggaggcggccttgccgtgtgtggcgtggacacggaactacagatggaagcaggacctccaggccgacctcgcctcgggcatcaccgttggagtcatgcttgtgccccagttctcctggcctccgtttgtgatgggatcaatttttcttgcgattcttctaattatgaaaaatacaggaaaatccaataaaagattgcattttctaagagtttctggtcctcttacggctgttgtgcttggaacaatttttgtgaaaatctttcatccaccagccatatcagtggttggtgaaataccacagggtcttcccaggttctccattcctcaaggatttgagcatctaatgtcacttgtgccaactgctgtactaatcactggtgttgctattttggaatctgttggtattgctaaagctttggcagcgaagaatgggtatgagttggactctaacaaagagttatttggtctgggaatagcaaatatctgtggttcattcttctctgcatatcctgccacaggctccttttctaggtcagcagtgaatcatgaaagtggggcaaaaactgggttatctggaatcataatgggcataatcattggtggtgctctcttatttatgaccccattatttactgatataccccagtgtgcattggctgcaattgtgatttctgctgttactggcctggtagattatgaagaggccatcttcttgtgggctattgataagaaagatttctttttatgggcaatcacatttatcacaacattagtttttggcattgagattggcgtccttgttggggttgcattctcattggcctttgtgattcatgagtcagcaaatccacatatagctgtcttgggccgtttacctggcactactgtgtacaggaatacattgcagtaccctgaggcttatacgtataatgggatagtagtggttcgaattgatgcaccgatctactttgccaacattagctacatcaaagacaggttgcgtgagtatgagctcaatcttccaagttcaaacaagggacttgatgttggaagggtgtattttgtgatcctcgagatgtcccctgttacatatattgattcgagtgctgttcaagctcttaaagacttgcaccaagaatacaaagcacgccatattcagattgccatagctaacccgaaccggcaagtgtaccttctgttgtcaagatcgggcatcattgacttggtaggagctgggtggtgctttgtgcgagtgcatgacgccgtgcaagtgtgcctacagcacgtgcagaattcatcttcaaatgcgttgaagctacccgtgcaggcatcaggcgtgttgaccgattctgtttcgactcctaaaccagagcagcagcatcaaaagcagcacggcctcttcaaggacctatggaaggcacaggacagtaacgcggatgctggtggtgaggtgcagccactgctccggcaaaaccttgtgtaatactcctacaaaatacggagtacttcctgggatggactcacgccctcgctggcctatacatatacgtgtttatttatttgtctatgttgttgttaacatggtatcgtggtgaacaaaagaaactgaacatgccattgttactgtggtgtggcgttttttgtacacttttgatacctaaatggaactcctatgatttgggtctggaaagggtgtgtgaagatgttttgttccaggttttggagttccgctcccagattggcttgacaagcatgttaattccatgaactctcttccacaaaaacagtacagctgattatcagttttatgtttagaatgagaaaatagccctggc

SEQ ID NO: 204632 - DNA, 4446 bp, Zea Mays
tgacttgccactgcctggtgttgctggggctgcttttctcttctcctttggggctctgaatgaagactgaagaaatcgaaagagaggaaagctacgcctgagtcggggaacgcctacgaagcagacaagctaggttttactgcttcattgagcacaaagatccgctgacctcttgctcttgatatgccaccaagagtacaaccagccaacatgtatattccttggtgttcaagctggattgtctttgttgacgtcagagctgactatgatttttggcatagcactcggattcaacctcctgtttgaatatgatgatctcatcacagggatatgctttgcaacagtggtacctaatctgctaccatatgctatatcccacctgggaaagaagatggaagggacaataaatgcctgcatagcaggatttgcacttcttagttatgtgcttggcttattggttagccagccacaaattcctctcacgatgaatgtaatattccccaagatcagtggtgagagtgcttactctctgatggcgcttcttggtgcaaacataatggcacacaacttctacattcattcatcagttgtccagggtcagaaaaagtcatctgcagttggtcttggagccttatttcacgaccaccttttttcaatattgttcatttttactggaatctttatggtgaactatgttctaatgaactctgcagcagcggaatctactaatactcttctcattaccttccaagatgttgtagagctaatgaatcagatatttgtaaaccctctggcaccaactatatttttagtggttcttctcttctccagccacatcatctcgctgacatctgctatcggtagccaagtgatttcacaccatttattcggtataaaccttcctctttctggacatcgtctcctactgaaggtttttgccatagttcctactctgtactgggcgaaagttgcaggagctgaagggatataccaattattaattatatgccagattattcaagccatgcttcttccatcttcagtcgtcccactttttcgtgttgcttcatcaagatcaataatgggagcccatagagtgtctttgcatctggagatactggtttttcttgcatttctccttatgctattttcaaatatcatatttgtggcagaaatgctatttggcgacagtgggtggatgaacaatctgaaaggatatactggaagccctgtggtgctcccatataccgttttagttttagttgcacttatatctgtggctttttcactgtacctggctgttacaccattgagatctggaagtcatgaagctgaatcccatgaatggtctgtgcattctcagagagaactcttgaatacttctcaagaaagggaagatgttaaggtggacaatgttacatatgaggaagatcaaagatcagatgttgtcccttctcccagggatgtgcctgacagccatccggaactggccttggactatattgatacttctgacactgctgtagaatctgatcacgactctcaacaatctactgcttatgcatccactgctcctgaaacctgctcctccccgtcgtttactcgcgaggagtcaaaatcagttgttgcagtcaactggccggagcctttggagaaggttcctacttctactgtgatggaggaaagcacagtagaaaatgtggtctctaggatcacgactgaaagagatgttttagtagaaacagatgttgtctcgggcaaggataaggaagatatccgtactttggagtctgagaagtcaattgttgatagcaccccatatgtgtctgatgacggtccgccatcccttactttcagcaggggaaagggctcagatgcaggaaatggcagtggtagtctctcaaggttatctggtttgggccgtgcagcaaggagacagctagctgctactcttgatgagttctgggggcatctgtttgattaccatggtaagctcactcaagaagctagcaccaaaaagtttggtatcttgcttgggatagaccttagaacacctagcacatctgtaagaacggataaacaagctgctgaaatacttaagagcccactggtgagagactcaatgcggggggcagcttttttgtcaagctcagtggacatgatgtcccctaagaatgaaacgtcgaatttggaacttgcatatgggcttcagaggggacctggcatgggattgtcaagctggtctcagggtatgcagctaccaaatacacagctgcagagctcaagcaatagcctacttgagcagagtgcaagattaaactcaaattttagttcatcttattcagacaacaatcagttctaccaacctgcaacaattcatggataccagctcacatcttacctgaaacagatgaatgccagcccaagcctttactctagcatgccgctggacccacaacggcttccaaaatcatctgtgtctgctgtgccaaactatgctgattccatgatgcatgctcgtaatcataacctgcttgcttcactgggtggtactactacacagcttcctgcaacatcccgcgtaggctcaatgatgcctgaaagatcgtattatgatccttccagcgttgatgggaatgaaaacgctggttcacctgcttactcaaaaaagtaccacagctcacctgatatgtctggaataatcgctgcaagtagagctgcactcttgaatgaagcaaagttgggtgctgccattggaccacagtcatacctcagcaggctggcggcagaaagatctcaatatgcaagctcaacagccaggcccgcggctccattagcatttgacgagctttcacctcctaagctccagagtgatatcttctcggcgcagtcaagcatgagaccaagtgctagatccctttgggctaagcaaccatttgagcaattgttcggcatgtcaagtgcagagctcagtaaaggtgacttcaatcttccaggcagatcaggtggcgtggccaaggatgatttctcttataaggaatctgagacgaagcttcttcagtccctcaggctctgcatcatgaagctccttaagctagagggatcagggtggctgttcaagcaaaatggtggttgtgatgaagatctaatcgaccgagtcgctgcagccgagaagctattgatgcaagggactgccgagaatcaactgctgcttcatggtggtgatctccagcaacattcttccgaccaggccggcatccagtacatgcgcacgcttcccaactgcggggaggactgtgtttggcgcgcgtcactcgtcgttagtttcggtgtctggtgtgtccgccgagtgctggacatgtctctggtggaaagcaggccagaactttggggcaagtatacctatgtccttaaccgtcttcaggggatcttggaccctgcgttctccaagcctcggggtgctctgacaatatgcacctgccttcagaaagacaccagagtgcgcaatagcccaccccacagtgggctaacagccatgggcccggtccccacaccgatccggggcgccttcacgaccgcaggcgtggttctggagatgatcaaggacgtggaggctgcggtctcaggccgcaagggcaggagcggcacggcggcgggcgacgtcgccttccccaaggggaaggagaacctggcctccgtgctgaagcggtacaagcggcggctcgccagcaagggccagtagcgcgcgggtgtcagacaggcaggcgatcgcaagcaatgttaggaggagcctgactattgttctccaggggggctgccactggcgccggcctccctgagccctggattttttcgttgcacgacgttcctagggaccggtggttgcccgatggtcgtcttggtcccttccagcaggttttttttttccttccctctttctgttggtttctttttgttggctttgtgatgttttgtaaggggcaactagggtatgtgctcagaaggactcaagatgtacacgcgaagatgtactagtctgctgatgcagcgttgtaaagtccacactctgcaggttaaccctttttggggccgtcaagtgttagtgcgtgccctatgtatgttaatcacccctgcagagaggttgcgaatactgaactactcacagacctgcacctgtcgagatcgtttgtaatatccgacgtcttgttcagaattgttctcactcttttttgcccgttgtgtaatttaccctgaagggacttcaagtacgtgcttcggcaagcacggtcgtgaaagaaaaaaaactgttagcatcagtgagctgcctgttgagcagtaaaagagaatacaatgtgagctctcaactcaaaagcgagatgtgtcacgcgcgtatctcaagaagcattgggccaaagctttttatgccaggcaagagagatgcatcca

SEQ ID NO: 204633 - DNA, 5620 bp, Zea Mays
ctcgtccccttccccccacttcttcctcagataaggagaggccccaggccagagaaaaaagcatcgaatttccccccgttaattggcctgagccctcagccgtctaccagcagcagctagaggcagacaagctaggttttactgcttcattgagcacaaagatccgctgacctcttgctcttggtaaaaatccaacctttcttgtattgttttcttcctgggaaaacctccttgtggtgcataaacttcgtagtacactctgccatttctggagaggaagctgagaactactatccatatctggcacgacccttgtcaagaaccatggctgttcacatgccatgaagctgcttgaactggaggcacctaaatgctgtggattgttcctatgcagatgattggatcagtggtttcaggcttcggggggttcgatcagatgttgtatgaataatagcaggattgcttgagagactatagtttgggtactgtttgcttctgtatttactggtacggtttcctactgatctgcggctgcgcaggaaggcattctcttttttgccgtaccatggatgcaccggatgttcaacagagcatgggatataaggagtccaggggtggtatgcctaagtttttccatgcccttggaccagcactcctgatttcaatgggttacattgatctcgggaagtgggtggcagccgttgaagctggttcttgttttggattcgacctggtgttgctggctctccttttcaatttcactgccattgtatgtcagtaccttgctgcttgcattggcactgtcacagggaagaatcttgcagaggtatcggtttaccgatgttgttccttggttttgctggccttctattgagatttagttcagtaaatctttgtttccatttcacaacgctatatgatggcttcatattgagctggacttgaaggaacttagaagagcagggagtagggaaactacatgcgagatattcaatttatgcgaattgttgataaacaaaatggatcaattcacttgccttgttaaataattcttttccatctgtagttcaattatactccctctgttccacaatagaagtcgttttagactttcaacaaattcattcaataattgatgtatatgttatgtaatgtgtctagattcgttgccattcatttgaatatagacataaaaagaagacctaaaacgactactaatttggtacagagggagtagtactgttggatgtagaagggcttctttttggaggaaaatatatcttttatctcatcttacttgttcttgatattcctttcaagttgctaactttttcatgccttcacatgaaacaaagatatgccaccaagagtacaaccagccaacatgtatattccttggtgttcaagctggattgtctttgttgacgtcagagctgactatgatttttggcatagcactcggattcaacctcctgtttgaatatgatgatctcatcacagggatatgctttgcaacagtggtacctaatctgctaccatatgctatatcccacctgggaaagaagatggaagggacaataaatgcctgcatagcaggatttgcacttcttagttatgtgcttggcttattggttagccagccacaaattcctctcacgatgaatgtaatattccccaagatcagtggtgagagtgcttactctctgatggcgcttcttggtgcaaacataatggcacacaacttctacattcattcatcagttgtccagggtcagaaaaagtcatctgcagttggtcttggagccttatttcacgaccaccttttttcaatattgttcatttttactggaatctttatggtgaactatgttctaatgaactctgcagcagcggaatctactaatactcttctcattaccttccaagatgttgtagagctaatgaatcagatatttgtaaaccctctggcaccaactatatttttagtggttcttctcttctccagccacatcatctcgctgacatctgctatcggtagccaagtgatttcacaccatttattcggtataaaccttcctctttctggacatcgtctcctactgaaggtttttgccatagttcctactctgtactgggcgaaagttgcaggagctgaagggatataccaattattaattatatgccagattattcaagccatgcttcttccatcttcagtcgtcccactttttcgtgttgcttcatcaagatcaataatgggagcccatagagtgtctttgcatctggagatactggtttttcttgcatttctccttatgctattttcaaatatcatatttgtggcagaaatgctatttggcgacagtgggtggatgaacaatctgaaaggatatactggaagccctgtggtgctcccatataccgttttagttttagttgcacttatatctgtggctttttcactgtacctggctgttacaccattgagatctggaagtcatgaagctgaatcccatgaatggtctgtgcattctcagagagaactcttgaatacttctcaagaaagggaagatgttaaggtggacaatgttacatatgaggaagatcaaagatcagatgttgtcccttctcccagggatgtgcctgacagccatccggaactggccttggactatattgatacttctgacactgctgtagaatctgatcacgactctcaacaatctactgcttatgcatccactgctcctgaaacctgctcctccccgtcgtttactcgcgaggagtcaaaatcagttgttgcagtcaactggccggagcctttggagaaggttcctacttctactgtgatggaggaaagcacagtagaaaatgtggtctctaggatcacgactgaaagagatgttttagtagaaacagatgttgtctcgggcaaggataaggaagatatccgtactttggagtctgagaagtcaattgttgatagcaccccatatgtgtctgatgacggtccgccatcccttactttcagcaggggaaagggctcagatgcaggaaatggcagtggtagtctctcaaggttatctggtttgggccgtgcagcaaggagacagctagctgctactcttgatgagttctgggggcatctgtttgattaccatggtaagctcactcaagaagctagcaccaaaaagtttggtatcttgcttgggatagaccttagaacacctagcacatctgtaagaacggataaacaagctgctgaaatacttaagagcccactggtgagagactcaatgcggggggcagcttttttgtcaagctcagtggacatgatgtcccctaagaatgaaacgtcgaatttggaacttgcatatgggcttcagaggggacctggcatgggattgtcaagctggtctcagggtatgcagctaccaaatacacagctgcagagctcaagcaatagcctacttgagcagagtgcaagattaaactcaaattttagttcatcttattcagacaacaatcagttctaccaacctgcaacaattcatggataccagctcacatcttacctgaaacagatgaatgccagcccaagcctttactctagcatgccgctggacccacaacggcttccaaaatcatctgtgtctgctgtgccaaactatgctgattccatgatgcatgctcgtaatcataacctgcttgcttcactgggtggtactactacacagcttcctgcaacatcccgcgtaggctcaatgatgcctgaaagatcgtattatgatccttccagcgttgatgggaatgaaaacgctggttcacctgcttactcaaaaaagtaccacagctcacctgatatgtctggaataatcgctgcaagtagagctgcactcttgaatgaagcaaagttgggtgctgccattggaccacagtcatacctcagcaggctggcggcagaaagatctcaatatgcaagctcaacagccaggcccgcggctccattagcatttgacgagctttcacctcctaagctccagagtgatatcttctcggcgcagtcaagcatgagaccaagtgctagatccctttgggctaagcaaccatttgagcaattgttcggcatgtcaagtgcagagctcagtaaaggtgacttcaatcttccaggcagatcaggtggcgtggccaaggatgatttctcttataaggaatctgagacgaagcttcttcagtccctcaggctctgcatcatgaagctccttaagctagagggatcagggtggctgttcaagcaaaatggtggttgtgatgaagatctaatcgaccgagtcgctgcagccgagaagctattgatgcaagggactgccgagaatcaactgctgcttcatggtggtgatctccagcaacattcttccgaccaggccggcatccagtacatgcgcacgcttcccaactgcggggaggactgtgtttggcgcgcgtcactcgtcgttagtttcggtgtctggtgtgtccgccgagtgctggacatgtctctggtggaaagcaggccagaactttggggcaagtatacctatgtccttaaccgtcttcaggggatcttggaccctgcgttctccaagcctcggggtgctctgacaatatgcacctgccttcagaaagacaccagagtgcgcaatagcccaccccacagtgggctaacagccatgggcccggtccccacaccgatccggggcgccttcacgaccgcaggcgtggttctggagatgatcaaggacgtggaggctgcggtctcaggccgcaagggcaggagcggcacggcggcgggcgacgtcgccttccccaaggggaaggagaacctggcctccgtgctgaagcggtacaagcggcggctcgccagcaagggccagtagcgcgcgggtgtcagacaggcaggcgatcgcaagcaatgttaggaggagcctgactattgttctccaggggggctgccactggcgccggcctccctgagccctggattttttcgttgcacgacgttcctagggaccggtggttgcccgatggtcgtcttggtcccttccagcaggttttttttttccttccctctttctgttggtttctttttgttggctttgtgatgttttgtaaggggcaactagggtatgtgctcagaaggactcaagatgtacacgcgaagatgtactagtctgctgatgcagcgttgtaaagtccacactctgcaggttaaccctttttggggccgtcaagtgttagtgcgtgccctatgtatgttaatcacccctgcagagaggttgcgaatactgaactactcacagacctgcacctgtcgagatcgtttgtaatatccgacgtcttgttcagaattgttctcactcttttttgcccgttgtgtaatttaccctgaagggacttcaagtacgtgcttcggcaagcacggtcgtgaaagaaaaaaaactgttagcatcagtgagctgcctgttgagcagtaaaagagaatacaatgtgagctctcaactcaaaagcgagatgtgtcacgcgcgtatctcaagaagcattgggccaaagctttttatgccaggcaagagagatgcatcca

SEQ ID NO: 204634 - DNA, 5412 bp, Zea Mays
cagctcgtccccttccccccacttcttcctcagataaggagaggccccaggccagagaaaaaagcatcgaatttccccccgttaattggcctgagccctcagccgtctaccagcagcagctagaggcagacaagctaggttttactgcttcattgagcacaaagatccgctgacctcttgctcttgatgattggatcagtggtttcaggcttcggggggttcgatcagatgttgtatgaataatagcaggattgcttgagagactatagtttgggtactgtttgcttctgtatttactggtacggtttcctactgatctgcggctgcgcaggaaggcattctcttttttgccgtaccatggatgcaccggatgttcaacagagcatgggatataaggagtccaggggtggtatgcctaagtttttccatgcccttggaccagcactcctgatttcaatgggttacattgatctcgggaagtgggtggcagccgttgaagctggttcttgttttggattcgacctggtgttgctggctctccttttcaatttcactgccattgtatgtcagtaccttgctgcttgcattggcactgtcacagggaagaatcttgcagaggtatcggtttaccgatgttgttccttggttttgctggccttctattgagatttagttcagtaaatctttgtttccatttcacaacgctatatgatggcttcatattgagctggacttgaaggaacttagaagagcagggagtagggaaactacatgcgagatattcaatttatgcgaattgttgataaacaaaatggatcaattcacttgccttgttaaataattcttttccatctgtagttcaattatactccctctgttccacaatagaagtcgttttagactttcaacaaattcattcaataattgatgtatatgttatgtaatgtgtctagattcgttgccattcatttgaatatagacataaaaagaagacctaaaacgactactaatttggtacagagggagtagtactgttggatgtagaagggcttctttttggaggaaaatatatcttttatctcatcttacttgttcttgatattcctttcaagttgctaactttttcatgccttcacatgaaacaaagatatgccaccaagagtacaaccagccaacatgtatattccttggtgttcaagctggattgtctttgttgacgtcagagctgactatgatttttggcatagcactcggattcaacctcctgtttgaatatgatgatctcatcacagggatatgctttgcaacagtggtacctaatctgctaccatatgctatatcccacctgggaaagaagatggaagggacaataaatgcctgcatagcaggatttgcacttcttagttatgtgcttggcttattggttagccagccacaaattcctctcacgatgaatgtaatattccccaagatcagtggtgagagtgcttactctctgatggcgcttcttggtgcaaacataatggcacacaacttctacattcattcatcagttgtccagggtcagaaaaagtcatctgcagttggtcttggagccttatttcacgaccaccttttttcaatattgttcatttttactggaatctttatggtgaactatgttctaatgaactctgcagcagcggaatctactaatactcttctcattaccttccaagatgttgtagagctaatgaatcagatatttgtaaaccctctggcaccaactatatttttagtggttcttctcttctccagccacatcatctcgctgacatctgctatcggtagccaagtgatttcacaccatttattcggtataaaccttcctctttctggacatcgtctcctactgaaggtttttgccatagttcctactctgtactgggcgaaagttgcaggagctgaagggatataccaattattaattatatgccagattattcaagccatgcttcttccatcttcagtcgtcccactttttcgtgttgcttcatcaagatcaataatgggagcccatagagtgtctttgcatctggagatactggtttttcttgcatttctccttatgctattttcaaatatcatatttgtggcagaaatgctatttggcgacagtgggtggatgaacaatctgaaaggatatactggaagccctgtggtgctcccatataccgttttagttttagttgcacttatatctgtggctttttcactgtacctggctgttacaccattgagatctggaagtcatgaagctgaatcccatgaatggtctgtgcattctcagagagaactcttgaatacttctcaagaaagggaagatgttaaggtggacaatgttacatatgaggaagatcaaagatcagatgttgtcccttctcccagggatgtgcctgacagccatccggaactggccttggactatattgatacttctgacactgctgtagaatctgatcacgactctcaacaatctactgcttatgcatccactgctcctgaaacctgctcctccccgtcgtttactcgcgaggagtcaaaatcagttgttgcagtcaactggccggagcctttggagaaggttcctacttctactgtgatggaggaaagcacagtagaaaatgtggtctctaggatcacgactgaaagagatgttttagtagaaacagatgttgtctcgggcaaggataaggaagatatccgtactttggagtctgagaagtcaattgttgatagcaccccatatgtgtctgatgacggtccgccatcccttactttcagcaggggaaagggctcagatgcaggaaatggcagtggtagtctctcaaggttatctggtttgggccgtgcagcaaggagacagctagctgctactcttgatgagttctgggggcatctgtttgattaccatggtaagctcactcaagaagctagcaccaaaaagtttggtatcttgcttgggatagaccttagaacacctagcacatctgtaagaacggataaacaagctgctgaaatacttaagagcccactggtgagagactcaatgcggggggcagcttttttgtcaagctcagtggacatgatgtcccctaagaatgaaacgtcgaatttggaacttgcatatgggcttcagaggggacctggcatgggattgtcaagctggtctcagggtatgcagctaccaaatacacagctgcagagctcaagcaatagcctacttgagcagagtgcaagattaaactcaaattttagttcatcttattcagacaacaatcagttctaccaacctgcaacaattcatggataccagctcacatcttacctgaaacagatgaatgccagcccaagcctttactctagcatgccgctggacccacaacggcttccaaaatcatctgtgtctgctgtgccaaactatgctgattccatgatgcatgctcgtaatcataacctgcttgcttcactgggtggtactactacacagcttcctgcaacatcccgcgtaggctcaatgatgcctgaaagatcgtattatgatccttccagcgttgatgggaatgaaaacgctggttcacctgcttactcaaaaaagtaccacagctcacctgatatgtctggaataatcgctgcaagtagagctgcactcttgaatgaagcaaagttgggtgctgccattggaccacagtcatacctcagcaggctggcggcagaaagatctcaatatgcaagctcaacagccaggcccgcggctccattagcatttgacgagctttcacctcctaagctccagagtgatatcttctcggcgcagtcaagcatgagaccaagtgctagatccctttgggctaagcaaccatttgagcaattgttcggcatgtcaagtgcagagctcagtaaaggtgacttcaatcttccaggcagatcaggtggcgtggccaaggatgatttctcttataaggaatctgagacgaagcttcttcagtccctcaggctctgcatcatgaagctccttaagctagagggatcagggtggctgttcaagcaaaatggtggttgtgatgaagatctaatcgaccgagtcgctgcagccgagaagctattgatgcaagggactgccgagaatcaactgctgcttcatggtggtgatctccagcaacattcttccgaccaggccggcatccagtacatgcgcacgcttcccaactgcggggaggactgtgtttggcgcgcgtcactcgtcgttagtttcggtgtctggtgtgtccgccgagtgctggacatgtctctggtggaaagcaggccagaactttggggcaagtatacctatgtccttaaccgtcttcaggggatcttggaccctgcgttctccaagcctcggggtgctctgacaatatgcacctgccttcagaaagacaccagagtgcgcaatagcccaccccacagtgggctaacagccatgggcccggtccccacaccgatccggggcgccttcacgaccgcaggcgtggttctggagatgatcaaggacgtggaggctgcggtctcaggccgcaagggcaggagcggcacggcggcgggcgacgtcgccttccccaaggggaaggagaacctggcctccgtgctgaagcggtacaagcggcggctcgccagcaagggccagtagcgcgcgggtgtcagacaggcaggcgatcgcaagcaatgttaggaggagcctgactattgttctccaggggggctgccactggcgccggcctccctgagccctggattttttcgttgcacgacgttcctagggaccggtggttgcccgatggtcgtcttggtcccttccagcaggttttttttttccttccctctttctgttggtttctttttgttggctttgtgatgttttgtaaggggcaactagggtatgtgctcagaaggactcaagatgtacacgcgaagatgtactagtctgctgatgcagcgttgtaaagtccacactctgcaggttaaccctttttggggccgtcaagtgttagtgcgtgccctatgtatgttaatcacccctgcagagaggttgcgaatactgaactactcacagacctgcacctgtcgagatcgtttgtaatatccgacgtcttgttcagaattgttctcactcttttttgcccgttgtgtaatttaccctgaagggacttcaagtacgtgcttcggcaagcacggtcgtgaaagaaaaaaaactgttagcatcagtgagctgcctgttgagcagtaaaagagaatacaatgtgagctctcaactcaaaagcgagatgtgtcacgcgcgtatctcaagaagcattgggccaaagctttttatgccaggcaagagagatgcatcca

SEQ ID NO: 204635 - DNA, 5267 bp, Zea Mays
cagctcgtccccttccccccacttcttcctcagataaggagaggccccaggccagagaaaaaagcatcgaatttccccccgttaattggcctgagccctcagccgtctaccagcagcagctagaggcagacaagctaggttttactgcttcattgagcacaaagatccgctgacctcttgctcttggaaggcattctcttttttgccgtaccatggatgcaccggatgttcaacagagcatgggatataaggagtccaggggtggtatgcctaagtttttccatgcccttggaccagcactcctgatttcaatgggttacattgatctcgggaagtgggtggcagccgttgaagctggttcttgttttggattcgacctggtgttgctggctctccttttcaatttcactgccattgtatgtcagtaccttgctgcttgcattggcactgtcacagggaagaatcttgcagaggtatcggtttaccgatgttgttccttggttttgctggccttctattgagatttagttcagtaaatctttgtttccatttcacaacgctatatgatggcttcatattgagctggacttgaaggaacttagaagagcagggagtagggaaactacatgcgagatattcaatttatgcgaattgttgataaacaaaatggatcaattcacttgccttgttaaataattcttttccatctgtagttcaattatactccctctgttccacaatagaagtcgttttagactttcaacaaattcattcaataattgatgtatatgttatgtaatgtgtctagattcgttgccattcatttgaatatagacataaaaagaagacctaaaacgactactaatttggtacagagggagtagtactgttggatgtagaagggcttctttttggaggaaaatatatcttttatctcatcttacttgttcttgatattcctttcaagttgctaactttttcatgccttcacatgaaacaaagatatgccaccaagagtacaaccagccaacatgtatattccttggtgttcaagctggattgtctttgttgacgtcagagctgactatgatttttggcatagcactcggattcaacctcctgtttgaatatgatgatctcatcacagggatatgctttgcaacagtggtacctaatctgctaccatatgctatatcccacctgggaaagaagatggaagggacaataaatgcctgcatagcaggatttgcacttcttagttatgtgcttggcttattggttagccagccacaaattcctctcacgatgaatgtaatattccccaagatcagtggtgagagtgcttactctctgatggcgcttcttggtgcaaacataatggcacacaacttctacattcattcatcagttgtccagggtcagaaaaagtcatctgcagttggtcttggagccttatttcacgaccaccttttttcaatattgttcatttttactggaatctttatggtgaactatgttctaatgaactctgcagcagcggaatctactaatactcttctcattaccttccaagatgttgtagagctaatgaatcagatatttgtaaaccctctggcaccaactatatttttagtggttcttctcttctccagccacatcatctcgctgacatctgctatcggtagccaagtgatttcacaccatttattcggtataaaccttcctctttctggacatcgtctcctactgaaggtttttgccatagttcctactctgtactgggcgaaagttgcaggagctgaagggatataccaattattaattatatgccagattattcaagccatgcttcttccatcttcagtcgtcccactttttcgtgttgcttcatcaagatcaataatgggagcccatagagtgtctttgcatctggagatactggtttttcttgcatttctccttatgctattttcaaatatcatatttgtggcagaaatgctatttggcgacagtgggtggatgaacaatctgaaaggatatactggaagccctgtggtgctcccatataccgttttagttttagttgcacttatatctgtggctttttcactgtacctggctgttacaccattgagatctggaagtcatgaagctgaatcccatgaatggtctgtgcattctcagagagaactcttgaatacttctcaagaaagggaagatgttaaggtggacaatgttacatatgaggaagatcaaagatcagatgttgtcccttctcccagggatgtgcctgacagccatccggaactggccttggactatattgatacttctgacactgctgtagaatctgatcacgactctcaacaatctactgcttatgcatccactgctcctgaaacctgctcctccccgtcgtttactcgcgaggagtcaaaatcagttgttgcagtcaactggccggagcctttggagaaggttcctacttctactgtgatggaggaaagcacagtagaaaatgtggtctctaggatcacgactgaaagagatgttttagtagaaacagatgttgtctcgggcaaggataaggaagatatccgtactttggagtctgagaagtcaattgttgatagcaccccatatgtgtctgatgacggtccgccatcccttactttcagcaggggaaagggctcagatgcaggaaatggcagtggtagtctctcaaggttatctggtttgggccgtgcagcaaggagacagctagctgctactcttgatgagttctgggggcatctgtttgattaccatggtaagctcactcaagaagctagcaccaaaaagtttggtatcttgcttgggatagaccttagaacacctagcacatctgtaagaacggataaacaagctgctgaaatacttaagagcccactggtgagagactcaatgcggggggcagcttttttgtcaagctcagtggacatgatgtcccctaagaatgaaacgtcgaatttggaacttgcatatgggcttcagaggggacctggcatgggattgtcaagctggtctcagggtatgcagctaccaaatacacagctgcagagctcaagcaatagcctacttgagcagagtgcaagattaaactcaaattttagttcatcttattcagacaacaatcagttctaccaacctgcaacaattcatggataccagctcacatcttacctgaaacagatgaatgccagcccaagcctttactctagcatgccgctggacccacaacggcttccaaaatcatctgtgtctgctgtgccaaactatgctgattccatgatgcatgctcgtaatcataacctgcttgcttcactgggtggtactactacacagcttcctgcaacatcccgcgtaggctcaatgatgcctgaaagatcgtattatgatccttccagcgttgatgggaatgaaaacgctggttcacctgcttactcaaaaaagtaccacagctcacctgatatgtctggaataatcgctgcaagtagagctgcactcttgaatgaagcaaagttgggtgctgccattggaccacagtcatacctcagcaggctggcggcagaaagatctcaatatgcaagctcaacagccaggcccgcggctccattagcatttgacgagctttcacctcctaagctccagagtgatatcttctcggcgcagtcaagcatgagaccaagtgctagatccctttgggctaagcaaccatttgagcaattgttcggcatgtcaagtgcagagctcagtaaaggtgacttcaatcttccaggcagatcaggtggcgtggccaaggatgatttctcttataaggaatctgagacgaagcttcttcagtccctcaggctctgcatcatgaagctccttaagctagagggatcagggtggctgttcaagcaaaatggtggttgtgatgaagatctaatcgaccgagtcgctgcagccgagaagctattgatgcaagggactgccgagaatcaactgctgcttcatggtggtgatctccagcaacattcttccgaccaggccggcatccagtacatgcgcacgcttcccaactgcggggaggactgtgtttggcgcgcgtcactcgtcgttagtttcggtgtctggtgtgtccgccgagtgctggacatgtctctggtggaaagcaggccagaactttggggcaagtatacctatgtccttaaccgtcttcaggggatcttggaccctgcgttctccaagcctcggggtgctctgacaatatgcacctgccttcagaaagacaccagagtgcgcaatagcccaccccacagtgggctaacagccatgggcccggtccccacaccgatccggggcgccttcacgaccgcaggcgtggttctggagatgatcaaggacgtggaggctgcggtctcaggccgcaagggcaggagcggcacggcggcgggcgacgtcgccttccccaaggggaaggagaacctggcctccgtgctgaagcggtacaagcggcggctcgccagcaagggccagtagcgcgcgggtgtcagacaggcaggcgatcgcaagcaatgttaggaggagcctgactattgttctccaggggggctgccactggcgccggcctccctgagccctggattttttcgttgcacgacgttcctagggaccggtggttgcccgatggtcgtcttggtcccttccagcaggttttttttttccttccctctttctgttggtttctttttgttggctttgtgatgttttgtaaggggcaactagggtatgtgctcagaaggactcaagatgtacacgcgaagatgtactagtctgctgatgcagcgttgtaaagtccacactctgcaggttaaccctttttggggccgtcaagtgttagtgcgtgccctatgtatgttaatcacccctgcagagaggttgcgaatactgaactactcacagacctgcacctgtcgagatcgtttgtaatatccgacgtcttgttcagaattgttctcactcttttttgcccgttgtgtaatttaccctgaagggacttcaagtacgtgcttcggcaagcacggtcgtgaaagaaaaaaaactgttagcatcagtgagctgcctgttgagcagtaaaagagaatacaatgtgagctctcaactcaaaagcgagatgtgtcacgcgcgtatctcaagaagcattgggccaaagctttttatgccaggcaagagagatgcatcca

SEQ ID NO: 204636 - DNA, 698 bp, Zea Mays
gcgcctcttcttggcttttttgcggcctgtcggatcggcacgaccttctagatgattctcaaacccacttccgggctgccgccgaggttatctacaacaccgagcagcgagaaggggttggtgtccagcacgaattgaatcgtcgccagaagtcatggcggattcggccacttcccgtccaaccgttctcgtcaccggcgccggcggccgcacaggccaaattgtctacaacaaactgaaagagaggtctgagcagttcgtggcaagagggctagtcaggacagaggagagcaagcagaagattggggcagccggtgatgtttacgttgctgacataagagacgcggatcgtctagcacctgctgtacaaggtgtggatgcgctcataatcctcaccagtgctgccccgaaaatgaaaccgggtttcgaccctagcaaaggtggacggcccgagttctactacgaagacggaatgtaccctgaacaggtggattgggttggccaaaagaatcagatcgatgctgctaaagctgctggagtgaagcatattgtgctggtgggatctatgggaggaacaaatcctaaccatccgctgaacagcatgggtaatggcaatatactggtatggaagcgcaaagcagaacagtatttggcagacagtggaatcccttatacaatcataagcaaagaggcattta

SEQ ID NO: 204637 - DNA, 5842 bp, Zea Mays
atgggccttggttgtccaatatctcagatctggactcgtcatcgccaagataacttaagcatggcaggcgtcatcgtgtcctcctcggcggcacgtacagagaagagccaggagcaagaccgactcacccgtacccgcgtcgacgagcgtcagtcggctcgcggctgcgaccgcgggcgggggcagcaagttggggaggaagaatacggcgaaggtcgggaagacgaacgagacgtccgacgatggcgaaatcgatggtgcgtgcatgatgtgaaacgtcctcgtggacgtgcaatagccactgtgcgagtcggtccggggctggtgtcggacgaatacgggaagggggcacatgctcctacgccctctgccgagaatggggtcgtacggagttggaggcataagggaagagagaaaataagtagaatggcgaccgagatggtggcaactgaggcgaggaccatcattattgtgcggagggggactgggggagctaccgagcacagtgcagaggtcagaccgtcagagggagttgctggtgcagtggtgcgggggagatcatcagatcagaggggtgtctccatggccgacaatgaggggaccctggacgccgtcctcaaggaggccgtcgacttggagaacatcccacttgaggaagtttttgagaatctgagatgcagtcgtggggggctcacttccgagcaggcgcagcaacgcctgcaattatttggccccaacaagctcgaagagaaggaggagagcaaatttctcaagtttctgggattcatgtggaacccactgtcatgggtcatggaggctgcagctatcatggccatcgcactggccaatggtgggggaaagccaccagactggcaggatttcgttggtatcatcacactgctgcttatcaactcaactatcagtttcatagaggaaaataatgctgggaatgctgctgctgcgcttatggcccgccttgcgccgaaagccaaggtgcttcgtgatggccgttgggccgaggaagaggcagccgtccttgtgcctggggatgtaatcagcattaaacttggagatatcatccctgcagatgctcggctccttgatggagatcccttgaagatcgatcaggtccttatgcctgacatttagtcactttcacactttatctcttgatctcacattttttgtctcgtctcttattgtagtcttcgctaactggagaatcgttgccagtcaccaaaggtcctggtgatggtgcctactctggttcgactgtcaagcagggtgaaattgaggctgttgtgatagcaactggtgtccacactttctttgggaaggctgcgcatcttgttgactccacgaatcaagtattgacagccattgggaacttttgtatttgttcaattgctgtggggatgtttgttgagataattgtcatgtaccctatccagcatagggcgtatcgtcctgggattgacaatcttttggtgctacttattggaggcattcccatagcaatgcctacagttttgtctgtgaccatggcaattgggtcccatcgcttggctcaacagggagctataacaaaaagaatgactgcaattgaagagatggctggtatggatgtactttgtagtgacaaaactggaactctgactctgaataaactcacagtggacaagaacctcattgaggtttttgaaagggaagtgactcaagaccaagtaattctgatggctgctagagcctcccgaatagaaaatcaagatgctattgatactgctatagttggcatgctagctgatccaaaagaggcccgtgctggtattcaagaggttcatttccttccatttaatcctaccgacaaaagaactgccttgacatacattgatagtgatgggaagatgtaccgtgttagtaaaggtgcgccagagcagattctcaacctcgtctacaataagttggagatagaacgaagagttcatgctgtaattgacaagtttgctgagcgtggacttagatcacttgctgtagcgtatcaggtagtgccagatggaaggaaagagagtcccggtgggccatggcattttgttgctcttatgccactctttgatcctccaaggcatgacagtgcagaaacaatacgaagggcattgaaccttggtgttagtgtaaaaatgatcacaggtgatcagctagcaattgggaaggaaacaggacgtcgcttaggcatgggtactaacatgtacccttcctctgctttgctgggacagaataaggatgagtctattgctgttttacctgttgacgatttaattgagaaagcggatggttttgctggcgtattccctgagcacaaatatgagattgtaaaacgtctgcaagcacgaaaacacatttgtggaatgactggcgatggagtaaatgatgcccctgccctaaagaaagctgatattggtatagcagttgctgatgccactgatgcagccaggagtgcttctgacattgtcctgacagaacctggcttgagtgtgataattagtgccgttcttaccagccgggcgattttccagaggatgaagaactacactatctatgctgtttccattacaatacgtattgtggtatgttttcttggcttgtgctttagaactagaagttgtgcaactttattatattggcctcctttggctacagtggttgtgtatctttctgttgcatacttgtgtgaaatatgtttgtgcatttatttgagtacttattttggttgttaattttttaatcgggtttagctgtttatgttatgcagcaaattaattagaaccacatatttaattagattcgtcttgatccttgaaattttgtgaataatctggaattaacacatttggttgctcaatgtttaacagctaggatttatgctacttgccctcatatgggagttcgatttcccaccatttatggtacttattattgcaattctaaatgacggtaccataatgaccatatcgaaggatcgagtgaagccttcgcctctaccggacagctggaagctggccgagattttcacaactggaattgtgcttggtggatacctggcagtgatgactgtcatcttcttctgggctgcatataagacaaactttttccctaggatcttccacgttgaaagccttgagaagacagctcaagatgattaccagaaactcgcctctgccgtatatctccaagttagcaccatcagccaagctctcatcttcgtgacgaggtctcgcagctggtcattcgctgagcgcccgggctttctactagtgtttgccttcctggtcgcgcagctgatagctacactggtagctgtatacgcggactgggggttcacttcgatcgaaggcattggatggggctgggctggtgtggtgtggctctacaacctcgtcttctacttcccgctcgacctcctcaagttcctcatccgatacgctctgagtggcaaagcgtgggatcttgtcattgagcaaaggattgcgtttacaaggaagaaggacttcgggaaggaggagagggcgctcaagtgggcacacgcgcagaggacgctccacgggctgcagccaccggatgccaagctgttccctgacagggtgaacgagctgaatcagatggccgaagaggccaaacggagggccgagattgcaaggctgagggagcttcacacgctgaaggggcatgtggagtcggttgtgaagctcaagggcctagacatcgacaccatccagcagtcgtacacagtctgatgaccctggattaagtacatacatgtatatctagttctggcaggtggcagtcgcctgcttgtttgtatttgccatataccataacacatcatgagaactggtagttggtgccgtcggttgtcttcgcgtgctccttgcgatgttattgtgttacgccggtttcaagcaacataggtcacggatcataaatcagatatccgacggatatcaaatccgtgtgtcatctccccgcgtcctggttgccccgcgtcgggcgactcggacgctccccataatccctagtagccgccgccgccccttcgtgggcctctccctgccgcgccgctgcctgagctggccgccggaaggttcggctgcttgcggggagggcggcggcggggcatctccgtctccctctggtggatctgggcgggcacagccgccaaggtcaccgtgagttgctcgtcggcgtggtcggccccggcttcgccccctcgcgactcgggtggctgccaactcccctccctccccatctctttgccttgccgccgccggagctagctggtgggttgctcgcacggctaggggtgaaggcgtcgggcgggtgcttgctgccttgtcgtgcgtccaacccacggtggcggcgtccgcccactcaggcaacgggcctgtggctgggtgcgcgcccgcgaggctagcccggtggcggcgcctgcgtgccgcgacggcaatcgctgctgctcgggggttggaggtgtgcctggactgtgtgctcgcgtacctgatgcgcggagggctggatctggcgcccccagggggagcggcgttggcgcgcggaaggctggatctggcgcgcgaggttggcggcctccgcatgccatccgtcggaggcggcggcaggctggtcccgggctagcgcatgagccggggtggaggtcggcgttggtgcgccggcaggcctgcgcagtcggccggaattgcagtggcgggacctcctctcgtctggggcagcatcggctagtcgatcgggctagcgcagggtggtggtggcggcaggcccaaaatcttcatcatttgtgtggtacgtcggggtaccggcgacggcggaggcagcttgctgtgtctcgaggtttcggccagacgttgtgctgggggctcttgggcgaaagtctcggcgacggtgacgcccatgggcgtcgcttcccctgttaagggcgtcacaccccagtgctatcttccttgggtgaaagctcggtccatcacggacaggtgacggtggcgtcacagtgacgtcactcccttcctgaaggcgtcgcttctgaagttcgtctcggccaggactttgccttcggctgttgcttcgcttctcggtgcctggtatgcgagtggaggtgggggttttgcaacgtgaagtcggagctgctacatcagtggatgtggctcggcaacgataacacgaggcgaacctcccttcttcgtggtccagaatgtttcgaaggtcgggcaaaaaccggaggcagggcagagggtcaagattggaagtcgaagctgctttgtgcctgagcccggcaacgatgacttgttgagacctttcgcttcgggttgtctatctgctttttgtttggttcgcctgttggctgctttggaaagtcggagttgttggatgctctgcatctttgcttgataacgatgacctttagcagttttgtgctctcgtgtggggttgccgctgcctgtgttgtttgggcactctatgtcgacggtgagtgtggtgtcgtgttgatgtcctaatccaaccgacgagttgagttgtatggtgttggcgtgttgatgtctcaatccaaccgcatgttgtttgttgtttagtccggtccggaccacttcttaattaatataatcggcagctctcatgtctggttcgtttcaaaaaaaaaaagtgtgtcaaattgtcatccctagctagacagagtagccatgggctgctatttggagctggtctggcccttttgcagatgactccctggatgactctcgtggtggctgagtgcagccgacccccttcgggattaatt

SEQ ID NO: 204638 - DNA, 5498 bp, Zea Mays
atgggccttggttgtccaatatctcagatctggactcgtcatcgccaagataacttaagcatggcaggcgtcatcgtgtcctcctcggcggcacgtacagagaagagccaggagcaagaccgactcacccgtacccgcgtcgacgagcgtcagtcggctcgcggctgcgaccgcgggcgggggcagcaagttggggaggaagaatacggcgaaggtcgggaagacgaacgagacgtccgacgatggcgaaatcgatggtgcgtgcatgatgtgaaacgtcctcgtggacgtgcaatagccactgtgcgagtcggtccggggctggtgtcggacgaatacgggaagggggcacatgctcctacgccctctgccgagaatggggtcgtacggagttggaggcataagggaagagagaaaataagtagaatggcgaccgagatggtggcaactgaggcgaggaccatcattattgtgcggagggggactgggggagctaccgagcacagtgcagaggtcagaccgtcagagggagttgctggtgcagtggtgcgggggagatcatcagatcagaggggtgtctccatggccgacaatgaggggaccctggacgccgtcctcaaggaggccgtcgacttggagaacatcccacttgaggaagtttttgagaatctgagatgcagtcgtggggggctcacttccgagcaggcgcagcaacgcctgcaattatttggccccaacaagctcgaagagaaggaggagagcaaatttctcaagtttctgggattcatgtggaacccactgtcatgggtcatggaggctgcagctatcatggccatcgcactggccaatggtgggggaaagccaccagactggcaggatttcgttggtatcatcacactgctgcttatcaactcaactatcagtttcatagaggaaaataatgctgggaatgctgctgctgcgcttatggcccgccttgcgccgaaagccaaggtgcttcgtgatggccgttgggccgaggaagaggcagccgtccttgtgcctggggatgtaatcagcattaaacttggagatatcatccctgcagatgctcggctccttgatggagatcccttgaagatcgatcagtcttcgctaactggagaatcgttgccagtcaccaaaggtcctggtgatggtgcctactctggttcgactgtcaagcagggtgaaattgaggctgttgtgatagcaactggtgtccacactttctttgggaaggctgcgcatcttgttgactccacgaatcaagttggccatttccagaaggtattgacagccattgggaacttttgtatttgttcaattgctgtggggatgtttgttgagataattgtcatgtaccctatccagcatagggcgtatcgtcctgggattgacaatcttttggtgctacttattggaggcattcccatagcaatgcctacagttttgtctgtgaccatggcaattgggtcccatcgcttggctcaacagggagctataacaaaaagaatgactgcaattgaagagatggctggtatggatgtactttgtagtgacaaaactggaactctgactctgaataaactcacagtggacaagaacctcattgaggtttttgaaagggaagtgactcaagaccaagtaattctgatggctgctagagcctcccgaatagaaaatcaagatgctattgatactgctatagttggcatgctagctgatccaaaagaggcccgtgctggtattcaagaggttcatttccttccatttaatcctaccgacaaaagaactgccttgacatacattgatagtgatgggaagatgtaccgtgttagtaaaggtgcgccagagcagattctcaacctcgtctacaataagttggagatagaacgaagagttcatgctgtaattgacaagtttgctgagcgtggacttagatcacttgctgtagcgtatcaggtagtgccagatggaaggaaagagagtcccggtgggccatggcattttgttgctcttatgccactctttgatcctccaaggcatgacagtgcagaaacaatacgaagggcattgaaccttggtgttagtgtaaaaatgatcacaggtgatcagctagcaattgggaaggaaacaggacgtcgcttaggcatgggtactaacatgtacccttcctctgctttgctgggacagaataaggatgagtctattgctgttttacctgttgacgatttaattgagaaagcggatggttttgctggcgtattccctgagcacaaatatgagattgtaaaacgtctgcaagcacgaaaacacatttgtggaatgactggcgatggagtaaatgatgcccctgccctaaagaaagctgatattggtatagcagttgctgatgccactgatgcagccaggagtgcttctgacattgtcctgacagaacctggcttgagtgtgataattagtgccgttcttaccagccgggcgattttccagaggatgaagaactacactatctatgctgtttccattacaatacgtattgtgctaggatttatgctacttgccctcatatgggagttcgatttcccaccatttatggtacttattattgcaattctaaatgacggtaccataatgaccatatcgaaggatcgagtgaagccttcgcctctaccggacagctggaagctggccgagattttcacaactggaattgtgcttggtggatacctggcagtgatgactgtcatcttcttctgggctgcatataagacaaactttttccctaggatcttccacgttgaaagccttgagaagacagctcaagatgattaccagaaactcgcctctgccgtatatctccaagttagcaccatcagccaagctctcatcttcgtgacgaggtctcgcagctggtcattcgctgagcgcccgggctttctactagtgtttgccttcctggtcgcgcagctgatagctacactggtagctgtatacgcggactgggggttcacttcgatcgaaggcattggatggggctgggctggtgtggtgtggctctacaacctcgtcttctacttcccgctcgacctcctcaagttcctcatccgatacgctctgagtggcaaagcgtgggatcttgtcattgagcaaaggattgcgtttacaaggaagaaggacttcgggaaggaggagagggcgctcaagtgggcacacgcgcagaggacgctccacgggctgcagccaccggatgccaagctgttccctgacagggtgaacgagctgaatcagatggccgaagaggccaaacggagggccgagattgcaaggctgagggagcttcacacgctgaaggggcatgtggagtcggttgtgaagctcaagggcctagacatcgacaccatccagcagtcgtacacagtctgatgaccctggattaagtacatacatgtatatctagttctggcaggtggcagtcgcctgcttgtttgtatttgccatataccataacacatcatgagaactggtagttggtgccgtcggttgtcttcgcgtgctccttgcgatgttattgtgttacgccggtttcaagcaacataggtcacggatcataaatcagatatccgacggatatcaaatccgtgtgtcatctccccgcgtcctggttgccccgcgtcgggcgactcggacgctccccataatccctagtagccgccgccgccccttcgtgggcctctccctgccgcgccgctgcctgagctggccgccggaaggttcggctgcttgcggggagggcggcggcggggcatctccgtctccctctggtggatctgggcgggcacagccgccaaggtcaccgtgagttgctcgtcggcgtggtcggccccggcttcgccccctcgcgactcgggtggctgccaactcccctccctccccatctctttgccttgccgccgccggagctagctggtgggttgctcgcacggctaggggtgaaggcgtcgggcgggtgcttgctgccttgtcgtgcgtccaacccacggtggcggcgtccgcccactcaggcaacgggcctgtggctgggtgcgcgcccgcgaggctagcccggtggcggcgcctgcgtgccgcgacggcaatcgctgctgctcgggggttggaggtgtgcctggactgtgtgctcgcgtacctgatgcgcggagggctggatctggcgcccccagggggagcggcgttggcgcgcggaaggctggatctggcgcgcgaggttggcggcctccgcatgccatccgtcggaggcggcggcaggctggtcccgggctagcgcatgagccggggtggaggtcggcgttggtgcgccggcaggcctgcgcagtcggccggaattgcagtggcgggacctcctctcgtctggggcagcatcggctagtcgatcgggctagcgcagggtggtggtggcggcaggcccaaaatcttcatcatttgtgtggtacgtcggggtaccggcgacggcggaggcagcttgctgtgtctcgaggtttcggccagacgttgtgctgggggctcttgggcgaaagtctcggcgacggtgacgcccatgggcgtcgcttcccctgttaagggcgtcacaccccagtgctatcttccttgggtgaaagctcggtccatcacggacaggtgacggtggcgtcacagtgacgtcactcccttcctgaaggcgtcgcttctgaagttcgtctcggccaggactttgccttcggctgttgcttcgcttctcggtgcctggtatgcgagtggaggtgggggttttgcaacgtgaagtcggagctgctacatcagtggatgtggctcggcaacgataacacgaggcgaacctcccttcttcgtggtccagaatgtttcgaaggtcgggcaaaaaccggaggcagggcagagggtcaagattggaagtcgaagctgctttgtgcctgagcccggcaacgatgacttgttgagacctttcgcttcgggttgtctatctgctttttgtttggttcgcctgttggctgctttggaaagtcggagttgttggatgctctgcatctttgcttgataacgatgacctttagcagttttgtgctctcgtgtggggttgccgctgcctgtgttgtttgggcactctatgtcgacggtgagtgtggtgtcgtgttgatgtcctaatccaaccgacgagttgagttgtatggtgttggcgtgttgatgtctcaatccaaccgcatgttgtttgttgtttagtccggtccggaccacttcttaattaatataatcggcagctctcatgtctggttcgtttcaaaaaaaaaaagtgtgtcaaattgtcatccctagctagacagagtagccatgggctgctatttggagctggtctggcccttttgcagatgactccctggatgactctcgtggtggctgagtgcagccgacccccttcgggattaatt

SEQ ID NO: 204639 - DNA, 5786 bp, Zea Mays
atgggccttggttgtccaatatctcagatctggactcgtcatcgccaagataacttaagcatggcaggcgtcatcgtgtcctcctcggcggcacgtacagagaagagccaggagcaagaccgactcacccgtacccgcgtcgacgagcgtcagtcggctcgcggctgcgaccgcgggcgggggcagcaagttggggaggaagaatacggcgaaggtcgggaagacgaacgagacgtccgacgatggcgaaatcgatggtgcgtgcatgatgtgaaacgtcctcgtggacgtgcaatagccactgtgcgagtcggtccggggctggtgtcggacgaatacgggaagggggcacatgctcctacgccctctgccgagaatggggtcgtacggagttggaggcataagggaagagagaaaataagtagaatggcgaccgagatggtggcaactgaggcgaggaccatcattattgtgcggagggggactgggggagctaccgagcacagtgcagaggtcagaccgtcagagggagttgctggtgcagtggtgcgggggagatcatcagatcagaggggtgtctccatggccgacaatgaggggaccctggacgccgtcctcaaggaggccgtcgacttggagaacatcccacttgaggaagtttttgagaatctgagatgcagtcgtggggggctcacttccgagcaggcgcagcaacgcctgcaattatttggccccaacaagctcgaagagaaggagttaaactggccatggctgcaggagagcaaatttctcaagtttctgggattcatgtggaacccactgtcatgggtcatggaggctgcagctatcatggccatcgcactggccaatggtgggggaaagccaccagactggcaggatttcgttggtatcatcacactgctgcttatcaactcaactatcagtttcatagaggaaaataatgctgggaatgctgctgctgcgcttatggcccgccttgcgccgaaagccaaggtgcttcgtgatggccgttgggccgaggaagaggcagccgtccttgtgcctggggatgtaatcagcattaaacttggagatatcatccctgcagatgctcggctccttgatggagatcccttgaagatcgatcagtcttcgctaactggagaatcgttgccagtcaccaaaggtcctggtgatggtgcctactctggttcgactgtcaagcagggtgaaattgaggctgttgtgatagcaactggtgtccacactttctttgggaaggctgcgcatcttgttgactccacgaatcaagtattgacagccattgggaacttttgtatttgttcaattgctgtggggatgtttgttgagataattgtcatgtaccctatccagcatagggcgtatcgtcctgggattgacaatcttttggtgctacttattggaggcattcccatagcaatgcctacagttttgtctgtgaccatggcaattgggtcccatcgcttggctcaacagggagctataacaaaaagaatgactgcaattgaagagatggctggtatggatgtactttgtagtgacaaaactggaactctgactctgaataaactcacagtggacaagaacctcattgaggtttttgaaagggaagtgactcaagaccaagtaattctgatggctgctagagcctcccgaatagaaaatcaagatgctattgatactgctatagttggcatgctagctgatccaaaagaggcccgtgctggtattcaagaggttcatttccttccatttaatcctaccgacaaaagaactgccttgacatacattgatagtgatgggaagatgtaccgtgttagtaaaggtgcgccagagcagattctcaacctcgtctacaataagttggagatagaacgaagagttcatgctgtaattgacaagtttgctgagcgtggacttagatcacttgctgtagcgtatcaggtagtgccagatggaaggaaagagagtcccggtgggccatggcattttgttgctcttatgccactctttgatcctccaaggcatgacagtgcagaaacaatacgaagggcattgaaccttggtgttagtgtaaaaatgatcacaggtgatcagctagcaattgggaaggaaacaggacgtcgcttaggcatgggtactaacatgtacccttcctctgctttgctgggacagaataaggatgagtctattgctgttttacctgttgacgatttaattgagaaagcggatggttttgctggcgtattccctgagcacaaatatgagattgtaaaacgtctgcaagcacgaaaacacatttgtggaatgactggcgatggagtaaatgatgcccctgccctaaagaaagctgatattggtatagcagttgctgatgccactgatgcagccaggagtgcttctgacattgtcctgacagaacctggcttgagtgtgataattagtgccgttcttaccagccgggcgattttccagaggatgaagaactacactatctatgctgtttccattacaatacgtattgtggtatgttttcttggcttgtgctttagaactagaagttgtgcaactttattatattggcctcctttggctacagtggttgtgtatctttctgttgcatacttgtgtgaaatatgtttgtgcatttatttgagtacttattttggttgttaattttttaatcgggtttagctgtttatgttatgcagcaaattaattagaaccacatatttaattagattcgtcttgatccttgaaattttgtgaataatctggaattaacacatttggttgctcaatgtttaacagctaggatttatgctacttgccctcatatgggagttcgatttcccaccatttatggtacttattattgcaattctaaatgacggtaccataatgaccatatcgaaggatcgagtgaagccttcgcctctaccggacagctggaagctggccgagattttcacaactggaattgtgcttggtggatacctggcagtgatgactgtcatcttcttctgggctgcatataagacaaactttttccctaggatcttccacgttgaaagccttgagaagacagctcaagatgattaccagaaactcgcctctgccgtatatctccaagttagcaccatcagccaagctctcatcttcgtgacgaggtctcgcagctggtcattcgctgagcgcccgggctttctactagtgtttgccttcctggtcgcgcagctgatagctacactggtagctgtatacgcggactgggggttcacttcgatcgaaggcattggatggggctgggctggtgtggtgtggctctacaacctcgtcttctacttcccgctcgacctcctcaagttcctcatccgatacgctctgagtggcaaagcgtgggatcttgtcattgagcaaaggattgcgtttacaaggaagaaggacttcgggaaggaggagagggcgctcaagtgggcacacgcgcagaggacgctccacgggctgcagccaccggatgccaagctgttccctgacagggtgaacgagctgaatcagatggccgaagaggccaaacggagggccgagattgcaaggctgagggagcttcacacgctgaaggggcatgtggagtcggttgtgaagctcaagggcctagacatcgacaccatccagcagtcgtacacagtctgatgaccctggattaagtacatacatgtatatctagttctggcaggtggcagtcgcctgcttgtttgtatttgccatataccataacacatcatgagaactggtagttggtgccgtcggttgtcttcgcgtgctccttgcgatgttattgtgttacgccggtttcaagcaacataggtcacggatcataaatcagatatccgacggatatcaaatccgtgtgtcatctccccgcgtcctggttgccccgcgtcgggcgactcggacgctccccataatccctagtagccgccgccgccccttcgtgggcctctccctgccgcgccgctgcctgagctggccgccggaaggttcggctgcttgcggggagggcggcggcggggcatctccgtctccctctggtggatctgggcgggcacagccgccaaggtcaccgtgagttgctcgtcggcgtggtcggccccggcttcgccccctcgcgactcgggtggctgccaactcccctccctccccatctctttgccttgccgccgccggagctagctggtgggttgctcgcacggctaggggtgaaggcgtcgggcgggtgcttgctgccttgtcgtgcgtccaacccacggtggcggcgtccgcccactcaggcaacgggcctgtggctgggtgcgcgcccgcgaggctagcccggtggcggcgcctgcgtgccgcgacggcaatcgctgctgctcgggggttggaggtgtgcctggactgtgtgctcgcgtacctgatgcgcggagggctggatctggcgcccccagggggagcggcgttggcgcgcggaaggctggatctggcgcgcgaggttggcggcctccgcatgccatccgtcggaggcggcggcaggctggtcccgggctagcgcatgagccggggtggaggtcggcgttggtgcgccggcaggcctgcgcagtcggccggaattgcagtggcgggacctcctctcgtctggggcagcatcggctagtcgatcgggctagcgcagggtggtggtggcggcaggcccaaaatcttcatcatttgtgtggtacgtcggggtaccggcgacggcggaggcagcttgctgtgtctcgaggtttcggccagacgttgtgctgggggctcttgggcgaaagtctcggcgacggtgacgcccatgggcgtcgcttcccctgttaagggcgtcacaccccagtgctatcttccttgggtgaaagctcggtccatcacggacaggtgacggtggcgtcacagtgacgtcactcccttcctgaaggcgtcgcttctgaagttcgtctcggccaggactttgccttcggctgttgcttcgcttctcggtgcctggtatgcgagtggaggtgggggttttgcaacgtgaagtcggagctgctacatcagtggatgtggctcggcaacgataacacgaggcgaacctcccttcttcgtggtccagaatgtttcgaaggtcgggcaaaaaccggaggcagggcagagggtcaagattggaagtcgaagctgctttgtgcctgagcccggcaacgatgacttgttgagacctttcgcttcgggttgtctatctgctttttgtttggttcgcctgttggctgctttggaaagtcggagttgttggatgctctgcatctttgcttgataacgatgacctttagcagttttgtgctctcgtgtggggttgccgctgcctgtgttgtttgggcactctatgtcgacggtgagtgtggtgtcgtgttgatgtcctaatccaaccgacgagttgagttgtatggtgttggcgtgttgatgtctcaatccaaccgcatgttgtttgttgtttagtccggtccggaccacttcttaattaatataatcggcagctctcatgtctggttcgtttcaaaaaaaaaaagtgtgtcaaattgtcatccctagctagacagagtagccatgggctgctatttggagctggtctggcccttttgcagatgactccctggatgactctcgtggtggctgagtgcagccgacccccttcgggattaatt

SEQ ID NO: 204640 - DNA, 4721 bp, Zea Mays
agcaaatttctcaagtttctgggattcatgtggaacccactgtcatgggtcatggaggctgcagctatcatggccatcgcactggccaatggtgggggaaagccaccagactggcaggatttcgttggtatcatcacactgctgcttatcaactcaactatcagtttcatagaggaaaataatgctgggaatgctgctgctgcgcttatggcccgccttgcgccgaaagccaaggtgcttcgtgatggccgttgggccgaggaagaggcagccgtccttgtgcctggggatgtaatcagcattaaacttggagatatcatccctgcagatgctcggctccttgatggagatcccttgaagatcgatcagtcttcgctaactggagaatcgttgccagtcaccaaaggtcctggtgatggtgcctactctggttcgactgtcaagcagggtgaaattgaggctgttgtgatagcaactggtgtccacactttctttgggaaggctgcgcatcttgttgactccacgaatcaagtattgacagccattgggaacttttgtatttgttcaattgctgtggggatgtttgttgagataattgtcatgtaccctatccagcatagggcgtatcgtcctgggattgacaatcttttggtgctacttattggaggcattcccatagcaatgcctacagttttgtctgtgaccatggcaattgggtcccatcgcttggctcaacagggagctataacaaaaagaatgactgcaattgaagagatggctggtatggatgtactttgtagtgacaaaactggaactctgactctgaataaactcacagtggacaagaacctcattgaggtttttgaaagggaagtgactcaagaccaagtaattctgatggctgctagagcctcccgaatagaaaatcaagatgctattgatactgctatagttggcatgctagctgatccaaaagaggcccgtgctggtattcaagaggttcatttccttccatttaatcctaccgacaaaagaactgccttgacatacattgatagtgatgggaagatgtaccgtgttagtaaaggtgcgccagagcagattctcaacctcgtctacaataagttggagatagaacgaagagttcatgctgtaattgacaagtttgctgagcgtggacttagatcacttgctgtagcgtatcaggtagtgccagatggaaggaaagagagtcccggtgggccatggcattttgttgctcttatgccactctttgatcctccaaggcatgacagtgcagaaacaatacgaagggcattgaaccttggtgttagtgtaaaaatgatcacaggtgatcagctagcaattgggaaggaaacaggacgtcgcttaggcatgggtactaacatgtacccttcctctgctttgctgggacagaataaggatgagtctattgctgttttacctgttgacgatttaattgagaaagcggatggttttgctggcgtattccctgagcacaaatatgagattgtaaaacgtctgcaagcacgaaaacacatttgtggaatgactggcgatggagtaaatgatgcccctgccctaaagaaagctgatattggtatagcagttgctgatgccactgatgcagccaggagtgcttctgacattgtcctgacagaacctggcttgagtgtgataattagtgccgttcttaccagccgggcgattttccagaggatgaagaactacactatctatgctgtttccattacaatacgtattgtgctaggatttatgctacttgccctcatatgggagttcgatttcccaccatttatggtacttattattgcaattctaaatgacggtaccataatgaccatatcgaaggatcgagtgaagccttcgcctctaccggacagctggaagctggccgagattttcacaactggaattgtgcttggtggatacctggcagtgatgactgtcatcttcttctgggctgcatataagacaaactttttccctaggatcttccacgttgaaagccttgagaagacagctcaagatgattaccagaaactcgcctctgccgtatatctccaagttagcaccatcagccaagctctcatcttcgtgacgaggtctcgcagctggtcattcgctgagcgcccgggctttctactagtgtttgccttcctggtcgcgcagctgatagctacactggtagctgtatacgcggactgggggttcacttcgatcgaaggcattggatggggctgggctggtgtggtgtggctctacaacctcgtcttctacttcccgctcgacctcctcaagttcctcatccgatacgctctgagtggcaaagcgtgggatcttgtcattgagcaaaggattgcgtttacaaggaagaaggacttcgggaaggaggagagggcgctcaagtgggcacacgcgcagaggacgctccacgggctgcagccaccggatgccaagctgttccctgacagggtgaacgagctgaatcagatggccgaagaggccaaacggagggccgagattgcaaggctgagggagcttcacacgctgaaggggcatgtggagtcggttgtgaagctcaagggcctagacatcgacaccatccagcagtcgtacacagtctgatgaccctggattaagtacatacatgtatatctagttctggcaggtggcagtcgcctgcttgtttgtatttgccatataccataacacatcatgagaactggtagttggtgccgtcggttgtcttcgcgtgctccttgcgatgttattgtgttacgccggtttcaagcaacataggtcacggatcataaatcagatatccgacggatatcaaatccgtgtgtcatctccccgcgtcctggttgccccgcgtcgggcgactcggacgctccccataatccctagtagccgccgccgccccttcgtgggcctctccctgccgcgccgctgcctgagctggccgccggaaggttcggctgcttgcggggagggcggcggcggggcatctccgtctccctctggtggatctgggcgggcacagccgccaaggtcaccgtgagttgctcgtcggcgtggtcggccccggcttcgccccctcgcgactcgggtggctgccaactcccctccctccccatctctttgccttgccgccgccggagctagctggtgggttgctcgcacggctaggggtgaaggcgtcgggcgggtgcttgctgccttgtcgtgcgtccaacccacggtggcggcgtccgcccactcaggcaacgggcctgtggctgggtgcgcgcccgcgaggctagcccggtggcggcgcctgcgtgccgcgacggcaatcgctgctgctcgggggttggaggtgtgcctggactgtgtgctcgcgtacctgatgcgcggagggctggatctggcgcccccagggggagcggcgttggcgcgcggaaggctggatctggcgcgcgaggttggcggcctccgcatgccatccgtcggaggcggcggcaggctggtcccgggctagcgcatgagccggggtggaggtcggcgttggtgcgccggcaggcctgcgcagtcggccggaattgcagtggcgggacctcctctcgtctggggcagcatcggctagtcgatcgggctagcgcagggtggtggtggcggcaggcccaaaatcttcatcatttgtgtggtacgtcggggtaccggcgacggcggaggcagcttgctgtgtctcgaggtttcggccagacgttgtgctgggggctcttgggcgaaagtctcggcgacggtgacgcccatgggcgtcgcttcccctgttaagggcgtcacaccccagtgctatcttccttgggtgaaagctcggtccatcacggacaggtgacggtggcgtcacagtgacgtcactcccttcctgaaggcgtcgcttctgaagttcgtctcggccaggactttgccttcggctgttgcttcgcttctcggtgcctggtatgcgagtggaggtgggggttttgcaacgtgaagtcggagctgctacatcagtggatgtggctcggcaacgataacacgaggcgaacctcccttcttcgtggtccagaatgtttcgaaggtcgggcaaaaaccggaggcagggcagagggtcaagattggaagtcgaagctgctttgtgcctgagcccggcaacgatgacttgttgagacctttcgcttcgggttgtctatctgctttttgtttggttcgcctgttggctgctttggaaagtcggagttgttggatgctctgcatctttgcttgataacgatgacctttagcagttttgtgctctcgtgtggggttgccgctgcctgtgttgtttgggcactctatgtcgacggtgagtgtggtgtcgtgttgatgtcctaatccaaccgacgagttgagttgtatggtgttggcgtgttgatgtctcaatccaaccgcatgttgtttgttgtttagtccggtccggaccacttcttaattaatataatcggcagctctcatgtctggttcgtttcaaaaaaaaaaagtgtgtcaaattgtcatccctagctagacagagtagccatgggctgctatttggagctggtctggcccttttgcagatgactccctggatgactctcgtggtggctgagtgcagccgacccccttcgggattaatt

SEQ ID NO: 204641 - DNA, 4739 bp, Zea Mays
agcaaatttctcaagtttctgggattcatgtggaacccactgtcatgggtcatggaggctgcagctatcatggccatcgcactggccaatggtgggggaaagccaccagactggcaggatttcgttggtatcatcacactgctgcttatcaactcaactatcagtttcatagaggaaaataatgctgggaatgctgctgctgcgcttatggcccgccttgcgccgaaagccaaggtgcttcgtgatggccgttgggccgaggaagaggcagccgtccttgtgcctggggatgtaatcagcattaaacttggagatatcatccctgcagatgctcggctccttgatggagatcccttgaagatcgatcagtcttcgctaactggagaatcgttgccagtcaccaaaggtcctggtgatggtgcctactctggttcgactgtcaagcagggtgaaattgaggctgttgtgatagcaactggtgtccacactttctttgggaaggctgcgcatcttgttgactccacgaatcaagttggccatttccagaaggtattgacagccattgggaacttttgtatttgttcaattgctgtggggatgtttgttgagataattgtcatgtaccctatccagcatagggcgtatcgtcctgggattgacaatcttttggtgctacttattggaggcattcccatagcaatgcctacagttttgtctgtgaccatggcaattgggtcccatcgcttggctcaacagggagctataacaaaaagaatgactgcaattgaagagatggctggtatggatgtactttgtagtgacaaaactggaactctgactctgaataaactcacagtggacaagaacctcattgaggtttttgaaagggaagtgactcaagaccaagtaattctgatggctgctagagcctcccgaatagaaaatcaagatgctattgatactgctatagttggcatgctagctgatccaaaagaggcccgtgctggtattcaagaggttcatttccttccatttaatcctaccgacaaaagaactgccttgacatacattgatagtgatgggaagatgtaccgtgttagtaaaggtgcgccagagcagattctcaacctcgtctacaataagttggagatagaacgaagagttcatgctgtaattgacaagtttgctgagcgtggacttagatcacttgctgtagcgtatcaggtagtgccagatggaaggaaagagagtcccggtgggccatggcattttgttgctcttatgccactctttgatcctccaaggcatgacagtgcagaaacaatacgaagggcattgaaccttggtgttagtgtaaaaatgatcacaggtgatcagctagcaattgggaaggaaacaggacgtcgcttaggcatgggtactaacatgtacccttcctctgctttgctgggacagaataaggatgagtctattgctgttttacctgttgacgatttaattgagaaagcggatggttttgctggcgtattccctgagcacaaatatgagattgtaaaacgtctgcaagcacgaaaacacatttgtggaatgactggcgatggagtaaatgatgcccctgccctaaagaaagctgatattggtatagcagttgctgatgccactgatgcagccaggagtgcttctgacattgtcctgacagaacctggcttgagtgtgataattagtgccgttcttaccagccgggcgattttccagaggatgaagaactacactatctatgctgtttccattacaatacgtattgtgctaggatttatgctacttgccctcatatgggagttcgatttcccaccatttatggtacttattattgcaattctaaatgacggtaccataatgaccatatcgaaggatcgagtgaagccttcgcctctaccggacagctggaagctggccgagattttcacaactggaattgtgcttggtggatacctggcagtgatgactgtcatcttcttctgggctgcatataagacaaactttttccctaggatcttccacgttgaaagccttgagaagacagctcaagatgattaccagaaactcgcctctgccgtatatctccaagttagcaccatcagccaagctctcatcttcgtgacgaggtctcgcagctggtcattcgctgagcgcccgggctttctactagtgtttgccttcctggtcgcgcagctgatagctacactggtagctgtatacgcggactgggggttcacttcgatcgaaggcattggatggggctgggctggtgtggtgtggctctacaacctcgtcttctacttcccgctcgacctcctcaagttcctcatccgatacgctctgagtggcaaagcgtgggatcttgtcattgagcaaaggattgcgtttacaaggaagaaggacttcgggaaggaggagagggcgctcaagtgggcacacgcgcagaggacgctccacgggctgcagccaccggatgccaagctgttccctgacagggtgaacgagctgaatcagatggccgaagaggccaaacggagggccgagattgcaaggctgagggagcttcacacgctgaaggggcatgtggagtcggttgtgaagctcaagggcctagacatcgacaccatccagcagtcgtacacagtctgatgaccctggattaagtacatacatgtatatctagttctggcaggtggcagtcgcctgcttgtttgtatttgccatataccataacacatcatgagaactggtagttggtgccgtcggttgtcttcgcgtgctccttgcgatgttattgtgttacgccggtttcaagcaacataggtcacggatcataaatcagatatccgacggatatcaaatccgtgtgtcatctccccgcgtcctggttgccccgcgtcgggcgactcggacgctccccataatccctagtagccgccgccgccccttcgtgggcctctccctgccgcgccgctgcctgagctggccgccggaaggttcggctgcttgcggggagggcggcggcggggcatctccgtctccctctggtggatctgggcgggcacagccgccaaggtcaccgtgagttgctcgtcggcgtggtcggccccggcttcgccccctcgcgactcgggtggctgccaactcccctccctccccatctctttgccttgccgccgccggagctagctggtgggttgctcgcacggctaggggtgaaggcgtcgggcgggtgcttgctgccttgtcgtgcgtccaacccacggtggcggcgtccgcccactcaggcaacgggcctgtggctgggtgcgcgcccgcgaggctagcccggtggcggcgcctgcgtgccgcgacggcaatcgctgctgctcgggggttggaggtgtgcctggactgtgtgctcgcgtacctgatgcgcggagggctggatctggcgcccccagggggagcggcgttggcgcgcggaaggctggatctggcgcgcgaggttggcggcctccgcatgccatccgtcggaggcggcggcaggctggtcccgggctagcgcatgagccggggtggaggtcggcgttggtgcgccggcaggcctgcgcagtcggccggaattgcagtggcgggacctcctctcgtctggggcagcatcggctagtcgatcgggctagcgcagggtggtggtggcggcaggcccaaaatcttcatcatttgtgtggtacgtcggggtaccggcgacggcggaggcagcttgctgtgtctcgaggtttcggccagacgttgtgctgggggctcttgggcgaaagtctcggcgacggtgacgcccatgggcgtcgcttcccctgttaagggcgtcacaccccagtgctatcttccttgggtgaaagctcggtccatcacggacaggtgacggtggcgtcacagtgacgtcactcccttcctgaaggcgtcgcttctgaagttcgtctcggccaggactttgccttcggctgttgcttcgcttctcggtgcctggtatgcgagtggaggtgggggttttgcaacgtgaagtcggagctgctacatcagtggatgtggctcggcaacgataacacgaggcgaacctcccttcttcgtggtccagaatgtttcgaaggtcgggcaaaaaccggaggcagggcagagggtcaagattggaagtcgaagctgctttgtgcctgagcccggcaacgatgacttgttgagacctttcgcttcgggttgtctatctgctttttgtttggttcgcctgttggctgctttggaaagtcggagttgttggatgctctgcatctttgcttgataacgatgacctttagcagttttgtgctctcgtgtggggttgccgctgcctgtgttgtttgggcactctatgtcgacggtgagtgtggtgtcgtgttgatgtcctaatccaaccgacgagttgagttgtatggtgttggcgtgttgatgtctcaatccaaccgcatgttgtttgttgtttagtccggtccggaccacttcttaattaatataatcggcagctctcatgtctggttcgtttcaaaaaaaaaaagtgtgtcaaattgtcatccctagctagacagagtagccatgggctgctatttggagctggtctggcccttttgcagatgactccctggatgactctcgtggtggctgagtgcagccgacccccttcgggattaatt

SEQ ID NO: 204642 - DNA, 4626 bp, Zea Mays
gcaaatttctcaagtttctgggattcatgtggaacccactgtcatgggtcatggaggctgcagctatcatggccatcgcactggccaatggtgggggaaagccaccagactggcaggatttcgttggtatcatcacactgctgcttatcaactcaactatcagtttcatagaggaaaataatgctgggaatgctgctgctgcgcttatggcccgccttgcgccgaaagccaaggtgcttcgtgatggccgttgggccgaggaagaggcagccgtccttgtgcctggggatgtaatcagcattaaacttggagatatcatccctgcagatgctcggctccttgatggagatcccttgaagatcgatcagtcttcgctaactggagaatcgttgccagtcaccaaaggtcctggtgatggtgcctactctggttcgactgtcaagcagggtgaaattgaggctgttgtgatagcaactggtgtccacactttctttgggaaggctgcgcatcttgttgactccacgaatcaagttggccatttccagaagcatagggcgtatcgtcctgggattgacaatcttttggtgctacttattggaggcattcccatagcaatgcctacagttttgtctgtgaccatggcaattgggtcccatcgcttggctcaacagggagctataacaaaaagaatgactgcaattgaagagatggctggtatggatgtactttgtagtgacaaaactggaactctgactctgaataaactcacagtggacaagaacctcattgaggtttttgaaagggaagtgactcaagaccaagtaattctgatggctgctagagcctcccgaatagaaaatcaagatgctattgatactgctatagttggcatgctagctgatccaaaagaggcccgtgctggtattcaagaggttcatttccttccatttaatcctaccgacaaaagaactgccttgacatacattgatagtgatgggaagatgtaccgtgttagtaaaggtgcgccagagcagattctcaacctcgtctacaataagttggagatagaacgaagagttcatgctgtaattgacaagtttgctgagcgtggacttagatcacttgctgtagcgtatcaggtagtgccagatggaaggaaagagagtcccggtgggccatggcattttgttgctcttatgccactctttgatcctccaaggcatgacagtgcagaaacaatacgaagggcattgaaccttggtgttagtgtaaaaatgatcacaggtgatcagctagcaattgggaaggaaacaggacgtcgcttaggcatgggtactaacatgtacccttcctctgctttgctgggacagaataaggatgagtctattgctgttttacctgttgacgatttaattgagaaagcggatggttttgctggcgtattccctgagcacaaatatgagattgtaaaacgtctgcaagcacgaaaacacatttgtggaatgactggcgatggagtaaatgatgcccctgccctaaagaaagctgatattggtatagcagttgctgatgccactgatgcagccaggagtgcttctgacattgtcctgacagaacctggcttgagtgtgataattagtgccgttcttaccagccgggcgattttccagaggatgaagaactacactatctatgctgtttccattacaatacgtattgtgctaggatttatgctacttgccctcatatgggagttcgatttcccaccatttatggtaccataatgaccatatcgaaggatcgagtgaagccttcgcctctaccggacagctggaagctggccgagattttcacaactggaattgtgcttggtggatacctggcagtgatgactgtcatcttcttctgggctgcatataagacaaactttttccctaggatcttccacgttgaaagccttgagaagacagctcaagatgattaccagaaactcgcctctgccgtatatctccaagttagcaccatcagccaagctctcatcttcgtgacgaggtctcgcagctggtcattcgctgagcgcccgggctttctactagtgtttgccttcctggtcgcgcagctgatagctacactggtagctgtatacgcggactgggggttcacttcgatcgaaggcattggatggggctgggctggtgtggtgtggctctacaacctcgtcttctacttcccgctcgacctcctcaagttcctcatccgatacgctctgagtggcaaagcgtgggatcttgtcattgagcaaaggattgcgtttacaaggaagaaggacttcgggaaggaggagagggcgctcaagtgggcacacgcgcagaggacgctccacgggctgcagccaccggatgccaagctgttccctgacagggtgaacgagctgaatcagatggccgaagaggccaaacggagggccgagattgcaaggctgagggagcttcacacgctgaaggggcatgtggagtcggttgtgaagctcaagggcctagacatcgacaccatccagcagtcgtacacagtctgatgaccctggattaagtacatacatgtatatctagttctggcaggtggcagtcgcctgcttgtttgtatttgccatataccataacacatcatgagaactggtagttggtgccgtcggttgtcttcgcgtgctccttgcgatgttattgtgttacgccggtttcaagcaacataggtcacggatcataaatcagatatccgacggatatcaaatccgtgtgtcatctccccgcgtcctggttgccccgcgtcgggcgactcggacgctccccataatccctagtagccgccgccgccccttcgtgggcctctccctgccgcgccgctgcctgagctggccgccggaaggttcggctgcttgcggggagggcggcggcggggcatctccgtctccctctggtggatctgggcgggcacagccgccaaggtcaccgtgagttgctcgtcggcgtggtcggccccggcttcgccccctcgcgactcgggtggctgccaactcccctccctccccatctctttgccttgccgccgccggagctagctggtgggttgctcgcacggctaggggtgaaggcgtcgggcgggtgcttgctgccttgtcgtgcgtccaacccacggtggcggcgtccgcccactcaggcaacgggcctgtggctgggtgcgcgcccgcgaggctagcccggtggcggcgcctgcgtgccgcgacggcaatcgctgctgctcgggggttggaggtgtgcctggactgtgtgctcgcgtacctgatgcgcggagggctggatctggcgcccccagggggagcggcgttggcgcgcggaaggctggatctggcgcgcgaggttggcggcctccgcatgccatccgtcggaggcggcggcaggctggtcccgggctagcgcatgagccggggtggaggtcggcgttggtgcgccggcaggcctgcgcagtcggccggaattgcagtggcgggacctcctctcgtctggggcagcatcggctagtcgatcgggctagcgcagggtggtggtggcggcaggcccaaaatcttcatcatttgtgtggtacgtcggggtaccggcgacggcggaggcagcttgctgtgtctcgaggtttcggccagacgttgtgctgggggctcttgggcgaaagtctcggcgacggtgacgcccatgggcgtcgcttcccctgttaagggcgtcacaccccagtgctatcttccttgggtgaaagctcggtccatcacggacaggtgacggtggcgtcacagtgacgtcactcccttcctgaaggcgtcgcttctgaagttcgtctcggccaggactttgccttcggctgttgcttcgcttctcggtgcctggtatgcgagtggaggtgggggttttgcaacgtgaagtcggagctgctacatcagtggatgtggctcggcaacgataacacgaggcgaacctcccttcttcgtggtccagaatgtttcgaaggtcgggcaaaaaccggaggcagggcagagggtcaagattggaagtcgaagctgctttgtgcctgagcccggcaacgatgacttgttgagacctttcgcttcgggttgtctatctgctttttgtttggttcgcctgttggctgctttggaaagtcggagttgttggatgctctgcatctttgcttgataacgatgacctttagcagttttgtgctctcgtgtggggttgccgctgcctgtgttgtttgggcactctatgtcgacggtgagtgtggtgtcgtgttgatgtcctaatccaaccgacgagttgagttgtatggtgttggcgtgttgatgtctcaatccaaccgcatgttgtttgttgtttagtccggtccggaccacttcttaattaatataatcggcagctctcatgtctggttcgtttcaaaaaaaaaaagtgtgtcaaattgtcatccctagctagacagagtagccatgggctgctatttggagctggtctggcccttttgcagatgactccctggatgactctcgtggtggctgagtgcagccgacccccttcgggattaatt

SEQ ID NO: 204643 - DNA, 1237 bp, Zea Mays
ctcaatccacccctaaccgaacagggccttatcgcctccgcgctctgatggcctcacaccgcgccacgcagtaaacgaaaagacgggcccactccctcaatcctccgcacgccccttccatggggcagccgcacctcttgccgcagctctccccctccccggtcctctactccctcttctcgccgccggagacgggggccacgccctggcggcggccgctgaaccggggacgggccttccaaccgccgctctcctcgctgcgggagaccaacaaggccacgctccgcaaggccacgcccaacgcccccttccgcctcggggggggcggggggcggcagccccaaggatcgccgccccgccgccgacgacaaggaggacgaggacgagggtcgcggcggcgccggggcactcacagggacgctgatcgcaggagcattactggttggtttcgtaggggggtttggggcggccggttacgtgtacaaggaccagatcaacaccttcctcacgcagttctcggggttccttgacggctatggtccagccggatatgctctgttcgtacttgtatatgcagggttggaggttctcgcaattcccgcaatacctttaaccatgtcagctggtctattatttggtaatgtgactggtacaattattgtttcagtcggtggaacgctagctgcagcggtggccttccttattgctagatactttgccagagagagaattcttaaattggttgaaggaaataagaagtttctggcaattgataaggcaataggtgaaaatgggtttaagttggttgggaatgcttccaggttcatgggcttacgtcagtgccggtgcattcgggcgagctttaatccaagatgagtcggaaattggtttgggaggaaacgaacagctatggacactgggcgttggattattgtttacagccattgctgccgcttatgtaacgaggctcgcaaaggacgctgtaaaggagatcgacgactagaatggtaggattctctaggagaaagggccatctggatagtgtactagcctagcacattgtacatcactggcacctttggtgcgataaaatcttatagaaagccagagcaattttatgaggtaatgtgatctcttgttgttgtggtgtcgattctcattgaacagaaaattcctgtttctgtcaactcattcgcttagacaagctaagaatctaccaaaatcaaagagagccgac

SEQ ID NO: 204644 - DNA, 1567 bp, Zea Mays
ggccttatcgcctccgcgctctgatggcctcacaccgcgccacgcagtaaacgaaaagacgggcccactccctcaatcctccgcacgccccttccatggggcagccgcacctcttgccgcagctctccccctccccggtcctctactccctcttctcgccgccggagacgggggccacgccctggcggcggccgctgaaccggggacgggccttccaaccgccgctctcctcgctgcgggagaccaacaaggccacgctccgcaaggccacgcccaacgcccccttccgcctcggggggggcggggggcggcagccccaaggatcgccgccccgccgccgacgacaaggaggacgaggacgagggtcgcggcggcgccggggcactcacagggacgctgatcgcaggagcattactggttggtttcgtaggggggtttggggcggccggttacgtgtacaaggaccagatcaacaccttcctcacgcagttctcggggttccttgacggctatggtccagccggatatgctctgttcgtacttgtatatgcagggttggaggttctcgcaattcccgcaatacctttaaccatgtcagctggtctattatttggtaatgtgactggtacaattattgtttcagtcggtggaacgctagctgcagcggtggccttccttattgctagatactttgccagagagagaattcttaaattggttgaaggaaataagaagtttctggcaattgataaggcaataggtgaaaatgggtttaaggttgttactttgctacgcttgagtcccctgttacctttctcccttgggaactatctatatggccttacttcagtgaagttcttgccgtatgtcttgggcaggttagtttgtctgttgtaatggcatagtttcttctgtatgtttcatatgatgcagtatgttaatgcttttctggaagggttataatttatgtgactaaaggaataaaaattatgactcatcatgagtatcactttcttgttaactatgcttggattggaactttaattttatgagggataatgccaacactacagttgttttctttaaaagccttgtttgctctgatatccactttgtgttgtccccatgcagttggttgggaatgcttccaggttcatgggcttacgtcagtgccggtgcattcgggcgagctttaatccaagatgagtcggaaattggtttgggaggaaacgaacagctatggacactgggcgttggattattgtttacagccattgctgccgcttatgtaacgaggctcgcaaaggacgctgtaaaggagatcgacgactagaatggtaggattctctaggagaaagggccatctggatagtgtactagcctagcacattgtacatcactggcacctttggtgcgataaaatcttatagaaagccagagcaattttatgaggtaatgtgatctcttgttgttgtggtgtcgattctcattgaacagaaaattcctgtttctgtcaactcattcgcttagacaagctaagaatctaccaaaatcaaagagagccgac

SEQ ID NO: 204645 - DNA, 1363 bp, Zea Mays
ggccttatcgcctccgcgctctgatggcctcacaccgcgccacgcagtaaacgaaaagacgggcccactccctcaatcctccgcacgccccttccatggggcagccgcacctcttgccgcagctctccccctccccggtcctctactccctcttctcgccgccggagacgggggccacgccctggcggcggccgctgaaccggggacgggccttccaaccgccgctctcctcgctgcgggagaccaacaaggccacgctccgcaaggccacgcccaacgcccccttccgcctcggggggggcggggggcggcagccccaaggatcgccgccccgccgccgacgacaaggaggacgaggacgagggtcgcggcggcgccggggcactcacagggacgctgatcgcaggagcattactggttggtttcgtaggggggtttggggcggccggttacgtgtacaaggaccagatcaacaccttcctcacgcagttctcggggttccttgacggctatggtccagccggatatgctctgttcgtacttgtatatgcagggttggaggttctcgcaattcccgcaatacctttaaccatgtcagctggtctattatttggtaatgtgactggtacaattattgtttcagtcggtggaacgctagctgcagcggtggccttccttattgctagatactttgccagagagagaattcttaaattggttgaaggaaataagaagtttctggcaattgataaggcaataggtgaaaatgggtttaaggttgttactttgctacgcttgagtcccctgttacctttctcccttgggaactatctatatggccttacttcagtgaagttcttgccgtatgtcttgggcagttggttgggaatgcttccaggttcatgggcttacgtcagtgccggtgcattcgggcgagctttaatcgttttcagcttctaatagctgctaggcagtgctattctttggcctatagcaagatgagtcggaaattggtttgggaggaaacgaacagctatggacactgggcgttggattattgtttacagccattgctgccgcttatgtaacgaggctcgcaaaggacgctgtaaaggagatcgacgactagaatggtaggattctctaggagaaagggccatctggatagtgtactagcctagcacattgtacatcactggcacctttggtgcgataaaatcttatagaaagccagagcaattttatgaggtaatgtgatctcttgttgttgtggtgtcgattctcattgaacagaaaattcctgtttctgtcaactcattcgcttagacaagctaagaatctaccaaaatcaaagagagccgac

SEQ ID NO: 204646 - DNA, 3740 bp, Zea Mays
ccgacactccaccatcctccatggccgttaagcccacatccatcatcgccgcctccgccacagcacgccatggagaccagcaagtcgccaccgctctactcggcgccgcgggagccctctgccacgacagtgatgctgtgtccgtgcctggcgttcttcctcctcgctctcatcatcacctccatcgcactcactgtccactttcgcctctactgccacactcctcttgcccacctcatctccccgcaccgctgcccccaccacatctgacctccgtctccgcccgcatcgctggcgtggtcctgcttcccagaggcgtgttccctctgctgccgccgagatcccgatacgttatgggttcccctctcctcgcgacgccggcatgcggggcttacgacgtgctctggggcttcgcagccggaaggttcctctccatcttggctgcctccgacgaagatcagggctcgtcggagcaggaggcggctgcgagcaacccggagggcgtggaccgcgtctgcgcggccatcgcggacgtcgtcgcctccggtgccgacgcgaacctggaggcggcgctatccgcgctctcgccaccgctctgcgaagcggtcgtgctcgctgtgctccaccgcttcaagcacgcacataggccgtcctaccgcttcttcaggtgggccacagtgtccggtggctttacccacaccaccattacctactgcaagatgttacacatcttaggcaagacgaggcagttcgagtcgatggttgcgatgatccaagagatggggaaggcgggggccctgtccatggacgccttcaaggttgccattaagtccttcgctgcggctggtgagatcaagaatgcggttggcgtgttcgagttgatgagaaagaacggtttcgatgatggggtggaatcattcaattgcttgctcgttgctttagccaaagagggattaggtagggaggccaggcaggtgtttgacaaaatgcatggccagtactctccagacctgcgctcttatactgcactgatgctggcatggtgcaatgcgaggaatctggttgaggcggggcgggtttggaatgagatgctggagaagggaatggatccagatgttgttgtccacaacacaatgattgaggggttgctgcgtgggcagaggcgacccgaggccgtgaagatgtttgagctgatgaaggcaaaggggcctccaccaaatgtgtggacttacacaatgttaatccgtgaccattgtaagcaggggaagatggacatggcaatggagtgctttgaggagatgcaggaggctaaatgccaaccagatgttgctacctatacatgtttgctggttggatatgggaatgcaaaacaaatggacagagtgactgctgtgttggaggagatgacacagaagggatgcccccctgatgctcggacttacaatgcactgattaagttgctaacaaataggaatatgccagacgatgctgcaaggatatacaagaagatgatcaagaagggacttgagcccacaatccatacttacaacatgatgatgaagtcatatttcgttggtgatagcaactatgcaatgggttgtgcagtgtgggaggagatgcaccagaggggtatttgccctgatgtgaactcttacacagtgttcattaatgggcatatacgacatggcaggccagaggaggcatataaatatatcgaggagatgattaataaagggatgaaagctccacaaatagactataataagtttgctgcagatttctcaaaggctgggaaaccagatatattgtttgagttggctcagaaagtgaaatttgctgggaaattagatgtatctaatgtgttctatcagtgggcagatagaatgaagagtcgggtgaagagaaatgtaccttcagattggtaatagaatgttctaagattactatgctgccagcaggaatgtggcatgctgtgatggtgcttgaaatttgattactaaggagaactgctacctttttcagtttgccattgtacggtcaactttaatataattgtgacctgacattcaaaaaaaagtgcaagatgcaaggcctaccatgtgcttatttacggttgatgtcttttaacaatcttcaaggcaaacctgtgacatgcaaaatctttcttattatcactcgttttgacttttgtgattgatgcatttatcacatcgtgttaaacatagcttgttattcacatgttgatatgtgtagctccttccttcttgtttacgtttgtttgtttctttgattaaacaagttatctgagctatttctttgtatcttttttgatgccatgacatagaaaacactacattatcaaatattcaaatgcgtagatttggtaaaagtttgactatgatattgatgatctttcgtggtctgagtggtggagtttttgcagctattcacaggctggaaagttcatgcactgccctccttgtggatacactttctgttaacaaaatgctatacagtttctttctacttaccttgtgattttgatggagctctgttcctgtggttctttgacatttgttggtctcttgagcattagttctgcaatatgcattatgctcctctattgaactctatagcccatattgtggagatcactaacatatttaaacaagggtacaagacaacaaaccttaataaatgtattgcatgcagcacatgcaaatcttttggtctaccatgtgctgggtgtttccagcatggcactctgctggtatgaggctaacaaatatctactattgagtttgttagctcccgtgactctgggcactgcttcaccattttgtgactttgcacctacatagcaagggatattttttttcatgcaacccagaatctgaacgccattgcgaaaagcagggataaaatgctgctgtttcactgcaccaactaaacagagaaagaaaaggagatgagaaaactcagcatgttttgattcgactacagtctgcgcccccaagaaaccagggaacaggagtcaggactaacctccagcagctgcaaccggtactgcctctgcccactttggacgacgccaatcattcgcatgacaaggtagagcggcagcaggataccagcagcacgaatgctctgctgcttcagccgtcgccactgcaaccagatgccatgcgagcgtcacaatggtgaactgcacaagtcagaatccaggggacagcatggatcaggactcgtcctaaaggatggctatttttcaattcgctgcatgacttagaaccactacataccgtgatcgccagcgaccggcaccatgtggcgcattgatctgcggcgtaggagcacctggtgtaatctgcaccgtcaaccaagccctccggaggttccaaatgttgcatgtcctcgtgttcactgcacgatcacttgagaaaatttagatggttgccaatttgactggaacccagttacaagcctacttgaaagctttttttattttagattttctttccgaactttatgaaacttttgcaggttaacggttttttttttgaaagaatggttaacattctcaaattcaaatgttggtccgaactccgaagtctctcgaccaaacgttccaagtcctggtcgccactagtaaggtttcctgtaaccggagcgctttgacaaatggtgtatctcaaaccggtgtaggggcgaaaacgcgacgtatatggataatatttggc

SEQ ID NO: 204647 - DNA, 4673 bp, Zea Mays
ccgacactccaccatcctccatggccgttaagcccacatccatcatcgccgcctccgccacagcacgccatggagaccagcaagtcgccaccgctctactcggcgccgcgggagccctctgccacgacagtgatgctgtgtccgtgcctggcgttcttcctcctcgctctcatcatcacctccatcgcactcactgtccactttcgcctctactgccacactcctcttgcccacctcatctccccgcaccgctgcccccaccacatctgacctccgtctccgcccgcatcgctggcgtggtcctgcttcccagaggcgtgttccctctgctgccgccgagatcccgatacgttatgggttcccctctcctcgcgacgccggcatgcggggcttacgacgtgctctggggcttcgcagccggaaggttcctctccatcttggctgcctccgacgaagatcagggctcgtcggagcaggaggcggctgcgagcaacccggagggcgtggaccgcgtctgcgcggccatcgcggacgtcgtcgcctccggtgccgacgcgaacctggaggcggcgctatccgcgctctcgccaccgctctgcgaagcggtcgtgctcgctgtgctccaccgcttcaagcacgcacataggccgtcctaccgcttcttcaggtgggccacagtgtccggtggctttacccacaccaccattacctactgcaagatgttacacatcttaggcaagacgaggcagttcgagtcgatggttgcgatgatccaagagatggggaaggcgggggccctgtccatggacgccttcaaggttgccattaagtccttcgctgcggctggtgagatcaagaatgcggttggcgtgttcgagttgatgagaaagaacggtttcgatgatggggtggaatcattcaattgcttgctcgttgctttagccaaagagggattaggtagggaggccaggcaggtgtttgacaaaatgcatggccagtactctccagacctgcgctcttatactgcactgatgctggcatggtgcaatgcgaggaatctggttgaggcggggcgggtttggaatgagatgctggagaagggaatggatccagatgttgttgtccacaacacaatgattgaggggttgctgcgtgggcagaggcgacccgaggccgtgaagatgtttgagctgatgaaggcaaaggggcctccaccaaatgtgtggacttacacaatgttaatccgtgaccattgtaagcaggggaagatggacatggcaatggagtgctttgaggagatgcaggaggctaaatgccaaccagatgttgctacctatacatgtttgctggttggatatgggaatgcaaaacaaatggacagagtgactgctgtgttggaggagatgacacagaagggatgcccccctgatgctcggacttacaatgcactgattaagttgctaacaaataggaatatgccagacgatgctgcaaggatatacaagaagatgatcaagaagggacttgagcccacaatccatacttacaacatgatgatgaagtcatatttcgttggtgatagcaactatgcaatgggttgtgcagtgtgggaggagatgcaccagaggggtatttgccctgatgtgaactcttacacagtgttcattaatgggcatatacgacatggcaggccagaggaggcatataaatatatcgaggagatgattaataaagggatgaaagctccacaaatagactataataagtttgctgcagatttctcaaaggctgggaaaccagatatattgtttgagttggctcagaaagtgaaatttgctgggaaattagatgtatctaatgtgttctatcagtgggcagatagaatgaagagtcgggtgaagagaaatgtaccttcagattggtaatagaatgttctaagattactatgctgccagcaggaatgtggcatgctgtgatggtgcttgaaatttgattactaaggagaactgctacctttttcagtttgccattgtcaactttaatataattgtgacctgacattcaaaaaaaagtgcaagatgcaaggcctaccatgtgcttatttacggttgatgtcttttaacaatcttcaaggcaaacctgtgacatgcaaaatctttcttattatcactcgttttgacttttgtgattgatgcatttatcacatcgtgttaaacatagcttgttattcacatgttgatatgtgtagctccttccttcttgtttacgtttgtttgtttctttgattaaacaagttatctgagctatttctttgtatcttttttgatgccatgacatagaaaacactacattatcaaatattcaaatgcgtagatttggtaaaagtttgactatgatattgatgatctttcgtggtctgagtggtggagtttttgcagctattcacaggctggaaagttcatgcactgccctccttgtggatacactttctgttaacaaaatgctatacagtttctttctacttaccttgtgattttgatggagctctgttcctgtggttctttgacatttgttggtctcttgagcattagttctgcaatatgcattatgctcctctattgaactctatagcccatattgtggagatcactaacatgttagtaattttacttcccatcaaactttcagttccatcgaattgtacattattgaaatgctcttctgtcttcttatactcggtattcctgtaactagatttaaacaagggtacaagacaacaaaccttaataaatgtattgcatgcagcacatgcaaatcttttggtctaccatgtgctgggtgtttccagcatggcactctgctggtatgaggctaacaaatatctactattgagtttgttagctcccgtgactctgggcactgcttcaccattttgtgactttggtatggttattatgtttggtgaactcaattttctatgttccaatccctgctcttagttaattcttatatctgcagtctgcaaatcttgttttctattgcttcgctcataattaatctgtttggatcactagattagtaggataaaactgaaagaaatgagaatgacatgactctgggcctgaattttgcacaagatccgactgttcatttggttcgaatctttgcgtctgaactgcatctgctggtcattgagttctttacttcttttagtactcccgtggtccttcgacagactgcacttgtgtatttcacgtgaataaatacataagcatgtgaaacctgacctggattaatgtattatcctaatttatgtcaaaaaatatctgacatcctggacgcatgatttttctaacacacagaaactgtgtgtccagagtacaagcgagatagcagtaaattgtttcttccctgtataattgactgacatcattttattatttgaggttgtcatcttgcttagtttctccacttgccactggaatggagatgaagcacggtgctctattagttatgtttttcttttcttcgttccttgaggttatattaggattttccctctaaattattgacttgctagattaaaatcatctccttgataccaccaatatcatctgtgaaaaattgataaatatgaatgtgttaacttgactccattttatcttctccttatttgagcctatattcttctttttctactgagaaaaaccaaaagcaaataagtgtaactttacattcttattgaagatatgcgataatgttctgtttgaacattccctgcagcacctacatagcaagggatattttttttcatgcaacccagaatctgaacgccattgcgaaaagcagggataaaatgctgctgtttcactgcaccaactaaacagagaaagaaaaggagatgagaaaactcagcatgttttgattcgactacagtctgcgcccccaagaaaccagggaacaggagtcaggactaacctccagcagctgcaaccggtactgcctctgcccactttggacgacgccaatcattcgcatgacaaggtagagcggcagcaggataccagcagcacgaatgctctgctgcttcagccgtcgccactgcaaccagatgccatgcgagcgtcacaatggtgaactgcacaagtcagaatccaggggacagcatggatcaggactcgtcctaaaggatggctatttttcaattcgctgcatgacttagaaccactacataccgtgatcgccagcgaccggcaccatgtggcgcattgatctgcggcgtaggagcacctggtgtaatctgcaccgtcaaccaagccctccggaggttccaaatgttgcatgtcctcgtgttcactgcacgatcacttgagaaaatttagatggttgccaatttgactggaacccagttacaagcctacttgaaagctttttttattttagattttctttccgaactttatgaaacttttgcaggttaacggttttttttttgaaagaatggttaacattctcaaattcaaatgttggtccgaactccgaagtctctcgaccaaacgttccaagtcctggtcgccactagtaaggtttcctgtaaccggagcgctttgacaaatggtgtatctcaaaccggtgtaggggcgaaaacgcgacgtatatggataatatttggc

SEQ ID NO: 204648 - DNA, 3822 bp, Zea Mays
ccgacactccaccatcctccatggccgttaagcccacatccatcatcgccgcctccgccacagcacgccatggagaccagcaagtcgccaccgctctactcggcgccgcgggagccctctgccacgacagtgatgctgtgtccgtgcctggcgttcttcctcctcgctctcatcatcacctccatcgcactcactgtccactttcgcctctactgccacactcctcttgcccacctcatctccccgcaccgctgcccccaccacatctgacctccgtctccgcccgcatcgctggcgtggtcctgcttcccagaggcgtgttccctctgctgccgccgagatcccgatacgttatgggttcccctctcctcgcgacgccggcatgcggggcttacgacgtgctctggggcttcgcagccggaaggttcctctccatcttggctgcctccgacgaagatcagggctcgtcggagcaggaggcggctgcgagcaacccggagggcgtggaccgcgtctgcgcggccatcgcggacgtcgtcgcctccggtgccgacgcgaacctggaggcggcgctatccgcgctctcgccaccgctctgcgaagcggtcgtgctcgctgtgctccaccgcttcaagcacgcacataggccgtcctaccgcttcttcaggtgggccacagtgtccggtggctttacccacaccaccattacctactgcaagatgttacacatcttaggcaagacgaggcagttcgagtcgatggttgcgatgatccaagagatggggaaggcgggggccctgtccatggacgccttcaaggttgccattaagtccttcgctgcggctggtgagatcaagaatgcggttggcgtgttcgagttgatgagaaagaacggtttcgatgatggggtggaatcattcaattgcttgctcgttgctttagccaaagagggattaggtagggaggccaggcaggtgtttgacaaaatgcatggccagtactctccagacctgcgctcttatactgcactgatgctggcatggtgcaatgcgaggaatctggttgaggcggggcgggtttggaatgagatgctggagaagggaatggatccagatgttgttgtccacaacacaatgattgaggggttgctgcgtgggcagaggcgacccgaggccgtgaagatgtttgagctgatgaaggcaaaggggcctccaccaaatgtgtggacttacacaatgttaatccgtgaccattgtaagcaggggaagatggacatggcaatggagtgctttgaggagatgcaggaggctaaatgccaaccagatgttgctacctatacatgtttgctggttggatatgggaatgcaaaacaaatggacagagtgactgctgtgttggaggagatgacacagaagggatgcccccctgatgctcggacttacaatgcactgattaagttgctaacaaataggaatatgccagacgatgctgcaaggatatacaagaagatgatcaagaagggacttgagcccacaatccatacttacaacatgatgatgaagtcatatttcgttggtgatagcaactatgcaatgggttgtgcagtgtgggaggagatgcaccagaggggtatttgccctgatgtgaactcttacacagtgttcattaatgggcatatacgacatggcaggccagaggaggcatataaatatatcgaggagatgattaataaagggatgaaagctccacaaatagactataataagtttgctgcagatttctcaaaggctgggaaaccagatatattgtttgagttggctcagaaagtgaaatttgctgggaaattagatgtatctaatgtgttctatcagtgggcagatagaatgaagagtcgggtgaagagaaatgtaccttcagattggtaatagaatgttctaagattactatgctgccagcaggaatgtggcatgctgtgatggtgcttgaaatttgattactaaggagaactgctacctttttcagtttgccattgtacggtcaactttaatataattgtgacctgacattcaaaaaaaagtgcaagatgcaaggcctaccatgtgcttatttacggttgatgtcttttaacaatcttcaaggcaaacctgtgacatgcaaaatctttcttattatcactcgttttgacttttgtgattgatgcatttatcacatcgtgttaaacatagcttgttattcacatgttgatatgtgtagctccttccttcttgtttacgtttgtttgtttctttgattaaacaagttatctgagctatttctttgtatcttttttgatgccatgacatagaaaacactacattatcaaatattcaaatgcgtagatttggtaaaagtttgactatgatattgatgatctttcgtggtctgagtggtggagtttttgcagctattcacaggctggaaagttcatgcactgccctccttgtggatacactttctgttaacaaaatgctatacagtttctttctacttaccttgtgattttgatggagctctgttcctgtggttctttgacatttgttggtctcttgagcattagttctgcaatatgcattatgctcctctattgaactctatagcccatattgtggagatcactaacatgttagtaattttacttcccatcaaactttcagttccatcgaattgtacattattgaaatgctcttctgtcttcttatactcggtattcctgtaactagatttaaacaagggtacaagacaacaaaccttaataaatgtattgcatgcagcacatgcaaatcttttggtctaccatgtgctgggtgtttccagcatggcactctgctggtatgaggctaacaaatatctactattgagtttgttagctcccgtgactctgggcactgcttcaccattttgtgactttgcacctacatagcaagggatattttttttcatgcaacccagaatctgaacgccattgcgaaaagcagggataaaatgctgctgtttcactgcaccaactaaacagagaaagaaaaggagatgagaaaactcagcatgttttgattcgactacagtctgcgcccccaagaaaccagggaacaggagtcaggactaacctccagcagctgcaaccggtactgcctctgcccactttggacgacgccaatcattcgcatgacaaggtagagcggcagcaggataccagcagcacgaaccgtcgccactgcaaccagatgccatgcgagcgtcacaatggtgaactgcacaagtcagaatccaggggacagcatggatcaggactcgtcctaaaggatggctatttttcaattcgctgcatgacttagaaccactacataccgtgatcgccagcgaccggcaccatgtggcgcattgatctgcggcgtaggagcacctggtgtaatctgcaccgtcaaccaagccctccggaggttccaaatgttgcatgtcctcgtgttcactgcacgatcacttgagaaaatttagatggttgccaatttgactggaacccagttacaagcctacttgaaagctttttttattttagattttctttccgaactttatgaaacttttgcaggttaacggttttttttttgaaagaatggttaacattctcaaattcaaatgttggtccgaactccgaagtctctcgaccaaacgttccaagtcctggtcgccactagtaaggtttcctgtaaccggagcgctttgacaaatggtgtatctcaaaccggtgtaggggcgaaaacgcgacgtatatggataatatttggc

SEQ ID NO: 204649 - DNA, 4657 bp, Zea Mays
ccgacactccaccatcctccatggccgttaagcccacatccatcatcgccgcctccgccacagcacgccatggagaccagcaagtcgccaccgctctactcggcgccgcgggagccctctgccacgacagtgatgctgtgtccgtgcctggcgttcttcctcctcgctctcatcatcacctccatcgcactcactgtccactttcgcctctactgccacactcctcttgcccacctcatctccccgcaccgctgcccccaccacatctgacctccgtctccgcccgcatcgctggcgtggtcctgcttcccagaggcgtgttccctctgctgccgccgagatcccgatacgttatgggttcccctctcctcgcgacgccggcatgcggggcttacgacgtgctctggggcttcgcagccggaaggttcctctccatcttggctgcctccgacgaagatcagggctcgtcggagcaggaggcggctgcgagcaacccggagggcgtggaccgcgtctgcgcggccatcgcggacgtcgtcgcctccggtgccgacgcgaacctggaggcggcgctatccgcgctctcgccaccgctctgcgaagcggtcgtgctcgctgtgctccaccgcttcaagcacgcacataggccgtcctaccgcttcttcaggtgggccacagtgtccggtggctttacccacaccaccattacctactgcaagatgttacacatcttaggcaagacgaggcagttcgagtcgatggttgcgatgatccaagagatggggaaggcgggggccctgtccatggacgccttcaaggttgccattaagtccttcgctgcggctggtgagatcaagaatgcggttggcgtgttcgagttgatgagaaagaacggtttcgatgatggggtggaatcattcaattgcttgctcgttgctttagccaaagagggattaggtagggaggccaggcaggtgtttgacaaaatgcatggccagtactctccagacctgcgctcttatactgcactgatgctggcatggtgcaatgcgaggaatctggttgaggcggggcgggtttggaatgagatgctggagaagggaatggatccagatgttgttgtccacaacacaatgattgaggggttgctgcgtgggcagaggcgacccgaggccgtgaagatgtttgagctgatgaaggcaaaggggcctccaccaaatgtgtggacttacacaatgttaatccgtgaccattgtaagcaggggaagatggacatggcaatggagtgctttgaggagatgcaggaggctaaatgccaaccagatgttgctacctatacatgtttgctggttggatatgggaatgcaaaacaaatggacagagtgactgctgtgttggaggagatgacacagaagggatgcccccctgatgctcggacttacaatgcactgattaagttgctaacaaataggaatatgccagacgatgctgcaaggatatacaagaagatgatcaagaagggacttgagcccacaatccatacttacaacatgatgatgaagtcatatttcgttggtgatagcaactatgcaatgggttgtgcagtgtgggaggagatgcaccagaggggtatttgccctgatgtgaactcttacacagtgttcattaatgggcatatacgacatggcaggccagaggaggcatataaatatatcgaggagatgattaataaagggatgaaagctccacaaatagactataataagtttgctgcagatttctcaaaggctgggaaaccagatatattgtttgagttggctcagaaagtgaaatttgctgggaaattagatgtatctaatgtgttctatcagtgggcagatagaatgaagagtcgggtgaagagaaatgtaccttcagattggtaatagaatgttctaagattactatgctgccagcaggaatgtggcatgctgtgatggtgcttgaaatttgattactaaggagaactgctacctttttcagtttgccattgtcaactttaatataattgtgacctgacattcaaaaaaaagtgcaagatgcaaggcctaccatgtgcttatttacggttgatgtcttttaacaatcttcaaggcaaacctgtgacatgcaaaatctttcttattatcactcgttttgacttttgtgattgatgcatttatcacatcgtgttaaacatagcttgttattcacatgttgatatgtgtagctccttccttcttgtttacgtttgtttgtttctttgattaaacaagttatctgagctatttctttgtatcttttttgatgccatgacatagaaaacactacattatcaaatattcaaatgcgtagatttggtaaaagtttgactatgatattgatgatctttcgtggtctgagtggtggagtttttgcagctattcacaggctggaaagttcatgcactgccctccttgtggatacactttctgttaacaaaatgctatacagtttctttctacttaccttgtgattttgatggagctctgttcctgtggttctttgacatttgttggtctcttgagcattagttctgcaatatgcattatgctcctctattgaactctatagcccatattgtggagatcactaacatgttagtaattttacttcccatcaaactttcagttccatcgaattgtacattattgaaatgctcttctgtcttcttatactcggtattcctgtaactagatttaaacaagggtacaagacaacaaaccttaataaatgtattgcatgcagcacatgcaaatcttttggtctaccatgtgctgggtgtttccagcatggcactctgctggtatgaggctaacaaatatctactattgagtttgttagctcccgtgactctgggcactgcttcaccattttgtgactttggtatggttattatgtttggtgaactcaattttctatgttccaatccctgctcttagttaattcttatatctgcagtctgcaaatcttgttttctattgcttcgctcataattaatctgtttggatcactagattagtaggataaaactgaaagaaatgagaatgacatgactctgggcctgaattttgcacaagatccgactgttcatttggttcgaatctttgcgtctgaactgcatctgctggtcattgagttctttacttcttttagtactcccgtggtccttcgacagactgcacttgtgtatttcacgtgaataaatacataagcatgtgaaacctgacctggattaatgtattatcctaatttatgtcaaaaaatatctgacatcctggacgcatgatttttctaacacacagaaactgtgtgtccagagtacaagcgagatagcagtaaattgtttcttccctgtataattgactgacatcattttattatttgaggttgtcatcttgcttagtttctccacttgccactggaatggagatgaagcacggtgctctattagttatgtttttcttttcttcgttccttgaggttatattaggattttccctctaaattattgacttgctagattaaaatcatctccttgataccaccaatatcatctgtgaaaaattgataaatatgaatgtgttaacttgactccattttatcttctccttatttgagcctatattcttctttttctactgagaaaaaccaaaagcaaataagtgtaactttacattcttattgaagatatgcgataatgttctgtttgaacattccctgcagcacctacatagcaagggatattttttttcatgcaacccagaatctgaacgccattgcgaaaagcagggataaaatgctgctgtttcactgcaccaactaaacagagaaagaaaaggagatgagaaaactcagcatgttttgattcgactacagtctgcgcccccaagaaaccagggaacaggagtcaggactaacctccagcagctgcaaccggtactgcctctgcccactttggacgacgccaatcattcgcatgacaaggtagagcggcagcaggataccagcagcacgaaccgtcgccactgcaaccagatgccatgcgagcgtcacaatggtgaactgcacaagtcagaatccaggggacagcatggatcaggactcgtcctaaaggatggctatttttcaattcgctgcatgacttagaaccactacataccgtgatcgccagcgaccggcaccatgtggcgcattgatctgcggcgtaggagcacctggtgtaatctgcaccgtcaaccaagccctccggaggttccaaatgttgcatgtcctcgtgttcactgcacgatcacttgagaaaatttagatggttgccaatttgactggaacccagttacaagcctacttgaaagctttttttattttagattttctttccgaactttatgaaacttttgcaggttaacggttttttttttgaaagaatggttaacattctcaaattcaaatgttggtccgaactccgaagtctctcgaccaaacgttccaagtcctggtcgccactagtaaggtttcctgtaaccggagcgctttgacaaatggtgtatctcaaaccggtgtaggggcgaaaacgcgacgtatatggataatatttggc

SEQ ID NO: 204650 - DNA, 3264 bp, Zea Mays
gccgacactccaccatcctccatggccgttaagcccacatccatcatcgccgcctccgccacagcacgccatggagaccagcaagtcgccaccgctctactcggcgccgcgggagccctctgccacgacagtgatgctgtgtccgtgcctggcgttcttcctcctcgctctcatcatcacctccatcgcactcactgtccactttcgcctctactgccacactcctcttgcccacctcatctccccgcaccgctgcccccaccacatctgacctccgtctccgcccgcatcgctggcgtggtcctgcttcccagaggcgtgttccctctgctgccgccgagatcccgatacgttatgggttcccctctcctcgcgacgccggcatgcggggcttacgacgtgctctggggcttcgcagccggaaggttcctctccatcttggctgcctccgacgaagatcagggctcgtcggagcaggaggcggctgcgagcaacccggagggcgtggaccgcgtctgcgcggccatcgcggacgtcgtcgcctccggtgccgacgcgaacctggaggcggcgctatccgcgctctcgccaccgctctgcgaagcggtcgtgctcgctgtgctccaccgcttcaagcacgcacataggccgtcctaccgcttcttcaggtcaactttaatataattgtgacctgacattcaaaaaaaagtgcaagatgcaaggcctaccatgtgcttatttacggttgatgtcttttaacaatcttcaaggcaaacctgtgacatgcaaaatctttcttattatcactcgttttgacttttgtgattgatgcatttatcacatcgtgttaaacatagcttgttattcacatgttgatatgtgtagctccttccttcttgtttacgtttgtttgtttctttgattaaacaagttatctgagctatttctttgtatcttttttgatgccatgacatagaaaacactacattatcaaatattcaaatgcgtagatttggtaaaagtttgactatgatattgatgatctttcgtggtctgagtggtggagtttttgcagctattcacaggctggaaagttcatgcactgccctccttgtggatacactttctgttaacaaaatgctatacagtttctttctacttaccttgtgattttgatggagctctgttcctgtggttctttgacatttgttggtctcttgagcattagttctgcaatatgcattatgctcctctattgaactctatagcccatattgtggagatcactaacatatttaaacaagggtacaagacaacaaaccttaataaatgtattgcatgcagcacatgcaaatcttttggtctaccatgtgctgggtgtttccagcatggcactctgctggtatgaggctaacaaatatctactattgagtttgttagctcccgtgactctgggcactgcttcaccattttgtgactttggtatggttattatgtttggtgaactcaattttctatgttccaatccctgctcttagttaattcttatatctgcagtctgcaaatcttgttttctattgcttcgctcataattaatctgtttggatcactagattagtaggataaaactgaaagaaatgagaatgacatgactctgggcctgaattttgcacaagatccgactgttcatttggttcgaatctttgcgtctgaactgcatctgctggtcattgagttctttacttcttttagtactcccgtggtccttcgacagactgcacttgtgtatttcacgtgaataaatacataagcatgtgaaacctgacctggattaatgtattatcctaatttatgtcaaaaaatatctgacatcctggacgcatgatttttctaacacacagaaactgtgtgtccagagtacaagcgagatagcagtaaattgtttcttccctgtataattgactgacatcattttattatttgaggttgtcatcttgcttagtttctccacttgccactggaatggagatgaagcacggtgctctattagttatgtttttcttttcttcgttccttgaggttatattaggattttccctctaaattattgacttgctagattaaaatcatctccttgataccaccaatatcatctgtgaaaaattgataaatatgaatgtgttaacttgactccattttatcttctccttatttgagcctatattcttctttttctactgagaaaaaccaaaagcaaataagtgtaactttacattcttattgaagatatgcgataatgttctgtttgaacattccctgcagcacctacatagcaagggatattttttttcatgcaacccagaatctgaacgccattgcgaaaagcagggataaaatgctgctgtttcactgcaccaactaaacagagaaagaaaaggagatgagaaaactcagcatgttttgattcgactacagtctgcgcccccaagaaaccagggaacaggagtcaggactaacctccagcagctgcaaccggtactgcctctgcccactttggacgacgccaatcattcgcatgacaaggtagagcggcagcaggataccagcagcacgaagtaagtacatctgcaaagaaacataacctcggcttttagttcatcgaatcagtgctctgctgcttcagccgtcgccactgcaaccagatgccatgcgagcgtcacaatggtgaactgcacaagtcagaatccaggggacagcatggatcaggactcgtcctaaaggatggctatttttcaattcgctgcatgacttagaaccactacataccgtgatcgccagcgaccggcaccatgtggcgcattgatctgcggcgtaggagcacctggtgtaatctgcaccgtcaaccaagccctccggaggttccaaatgttgcatgtcctcgtgttcactgcacgatcacttgagaaaatttagatggttgccaatttgactggaacccagttacaagcctacttgaaagctttttttattttagattttctttccgaactttatgaaacttttgcaggttaacggttttttttttgaaagaatggttaacattctcaaattcaaatgttggtccgaactccgaagtctctcgaccaaacgttccaagtcctggtcgccactagtaaggtttcctgtaaccggagcgctttgacaaatggtgtatctcaaaccggtgtaggggcgaaaacgcgacgtatatggataatatttggc

SEQ ID NO: 204651 - DNA, 4679 bp, Zea Mays
gccgacactccaccatcctccatggccgttaagcccacatccatcatcgccgcctccgccacagcacgccatggagaccagcaagtcgccaccgctctactcggcgccgcgggagccctctgccacgacagtgatgctgtgtccgtgcctggcgttcttcctcctcgctctcatcatcacctccatcgcactcactgtccactttcgcctctactgccacactcctcttgcccacctcatctccccgcaccgctgcccccaccacatctgacctccgtctccgcccgcatcgctggcgtggtcctgcttcccagaggcgtgttccctctgctgccgccgagatcccgatacgttatgggttcccctctcctcgcgacgccggcatgcggggcttacgacgtgctctggggcttcgcagccggaaggttcctctccatcttggctgcctccgacgaagatcagggctcgtcggagcaggaggcggctgcgagcaacccggagggcgtggaccgcgtctgcgcggccatcgcggacgtcgtcgcctccggtgccgacgcgaacctggaggcggcgctatccgcgctctcgccaccgctctgcgaagcggtcgtgctcgctgtgctccaccgcttcaagcacgcacataggccgtcctaccgcttcttcaggtgggccacagtgtccggtggctttacccacaccaccattacctactgcaagatgttacacatcttaggcaagacgaggcagttcgagtcgatggttgcgatgatccaagagatggggaaggcgggggccctgtccatggacgccttcaaggttgccattaagtccttcgctgcggctggtgagatcaagaatgcggttggcgtgttcgagttgatgagaaagaacggtttcgatgatggggtggaatcattcaattgcttgctcgttgctttagccaaagagggattaggtagggaggccaggcaggtgtttgacaaaatgcatggccagtactctccagacctgcgctcttatactgcactgatgctggcatggtgcaatgcgaggaatctggttgaggcggggcgggtttggaatgagatgctggagaagggaatggatccagatgttgttgtccacaacacaatgattgaggggttgctgcgtgggcagaggcgacccgaggccgtgaagatgtttgagctgatgaaggcaaaggggcctccaccaaatgtgtggacttacacaatgttaatccgtgaccattgtaagcaggggaagatggacatggcaatggagtgctttgaggagatgcaggaggctaaatgccaaccagatgttgctacctatacatgtttgctggttggatatgggaatgcaaaacaaatggacagagtgactgctgtgttggaggagatgacacagaagggatgcccccctgatgctcggacttacaatgcactgattaagttgctaacaaataggaatatgccagacgatgctgcaaggatatacaagaagatgatcaagaagggacttgagcccacaatccatacttacaacatgatgatgaagtcatatttcgttggtgatagcaactatgcaatgggttgtgcagtgtgggaggagatgcaccagaggggtatttgccctgatgtgaactcttacacagtgttcattaatgggcatatacgacatggcaggccagaggaggcatataaatatatcgaggagatgattaataaagggatgaaagctccacaaatagactataataagtttgctgcagatttctcaaaggctgggaaaccagatatattgtttgagttggctcagaaagtgaaatttgctgggaaattagatgtatctaatgtgttctatcagtgggcagatagaatgaagagtcgggtgaagagaaatgtaccttcagattggtaatagaatgttctaagattactatgctgccagcaggaatgtggcatgctgtgatggtgcttgaaatttgattactaaggagaactgctacctttttcagtttgccattgtacggtcaactttaatataattgtgacctgacattcaaaaaaaagtgcaagatgcaaggcctaccatgtgcttatttacggttgatgtcttttaacaatcttcaaggcaaacctgtgacatgcaaaatctttcttattatcactcgttttgacttttgtgattgatgcatttatcacatcgtgttaaacatagcttgttattcacatgttgatatgtgtagctccttccttcttgtttacgtttgtttgtttctttgattaaacaagttatctgagctatttctttgtatcttttttgatgccatgacatagaaaacactacattatcaaatattcaaatgcgtagatttggtaaaagtttgactatgatattgatgatctttcgtggtctgagtggtggagtttttgcagctattcacaggctggaaagttcatgcactgccctccttgtggatacactttctgttaacaaaatgctatacagtttctttctacttaccttgtgattttgatggagctctgttcctgtggttctttgacatttgttggtctcttgagcattagttctgcaatatgcattatgctcctctattgaactctatagcccatattgtggagatcactaacatgttagtaattttacttcccatcaaactttcagttccatcgaattgtacattattgaaatgctcttctgtcttcttatactcggtattcctgtaactagatttaaacaagggtacaagacaacaaaccttaataaatgtattgcatgcagcacatgcaaatcttttggtctaccatgtgctgggtgtttccagcatggcactctgctggtatgaggctaacaaatatctactattgagtttgttagctcccgtgactctgggcactgcttcaccattttgtgactttggtatggttattatgtttggtgaactcaattttctatgttccaatccctgctcttagttaattcttatatctgcagtctgcaaatcttgttttctattgcttcgctcataattaatctgtttggatcactagattagtaggataaaactgaaagaaatgagaatgacatgactctgggcctgaattttgcacaagatccgactgttcatttggttcgaatctttgcgtctgaactgcatctgctggtcattgagttctttacttcttttagtactcccgtggtccttcgacagactgcacttgtgtatttcacgtgaataaatacataagcatgtgaaacctgacctggattaatgtattatcctaatttatgtcaaaaaatatctgacatcctggacgcatgatttttctaacacacagaaactgtgtgtccagagtacaagcgagatagcagtaaattgtttcttccctgtataattgactgacatcattttattatttgaggttgtcatcttgcttagtttctccacttgccactggaatggagatgaagcacggtgctctattagttatgtttttcttttcttcgttccttgaggttatattaggattttccctctaaattattgacttgctagattaaaatcatctccttgataccaccaatatcatctgtgaaaaattgataaatatgaatgtgttaacttgactccattttatcttctccttatttgagcctatattcttctttttctactgagaaaaaccaaaagcaaataagtgtaactttacattcttattgaagatatgcgataatgttctgtttgaacattccctgcagcacctacatagcaagggatattttttttcatgcaacccagaatctgaacgccattgcgaaaagcagggataaaatgctgctgtttcactgcaccaactaaacagagaaagaaaaggagatgagaaaactcagcatgttttgattcgactacagtctgcgcccccaagaaaccagggaacaggagtcaggactaacctccagcagctgcaaccggtactgcctctgcccactttggacgacgccaatcattcgcatgacaaggtagagcggcagcaggataccagcagcacgaatgctctgctgcttcagccgtcgccactgcaaccagatgccatgcgagcgtcacaatggtgaactgcacaagtcagaatccaggggacagcatggatcaggactcgtcctaaaggatggctatttttcaattcgctgcatgacttagaaccactacataccgtgatcgccagcgaccggcaccatgtggcgcattgatctgcggcgtaggagcacctggtgtaatctgcaccgtcaaccaagccctccggaggttccaaatgttgcatgtcctcgtgttcactgcacgatcacttgagaaaatttagatggttgccaatttgactggaacccagttacaagcctacttgaaagctttttttattttagattttctttccgaactttatgaaacttttgcaggttaacggttttttttttgaaagaatggttaacattctcaaattcaaatgttggtccgaactccgaagtctctcgaccaaacgttccaagtcctggtcgccactagtaaggtttcctgtaaccggagcgctttgacaaatggtgtatctcaaaccggtgtaggggcgaaaacgcgacgtatatggataatatttggc

SEQ ID NO: 204652 - DNA, 3392 bp, Zea Mays
aatcaatggatatttggtcatttgattctaaaggaggttgctgagagcccatccagcagggtgtctcagacatactaatggacggggcgcccaagatccttgaaaaatcatcacatgaatgcatgtactcttggtacttcacccgggaagaactcgagaaattttcaccatcaaggaaagatggtattactgaaaacaaggagtcagaaatacggcatttatattgttcatttatccgggacgttgggatcaggctgaagctacctcagatgacactagcaacggcaatcatgctttgccatcgcttctatttacaccagtcccttgccaaaaatggatggcaggtgagacttgagagactattttgttgtggcagtgatggttacttgctgatgtctatgaaaagcgacaagggtgcagagtttccttgccaagcatttgttgataatatgttatccatgtccaacttaacattacagattattcttcaaatcatttgaattatctaatcttctaatactattactattttaattttctaattacatgataattcatcttgatgctactctacctcaagatcacttcgtgattgggcatttcaaaggaatctaaaaaactcagtcagggagggaaataccgtcctccaggtattatataagagaccgaaacatggtcctggccgagaaaatcaccgaacactggccctccatcactagcgggtcgtcaccacccactctgcaacggcccaatcggaggatggcgcgcaggacgtaacccggaagcgtgcggggcacaacgaggggattttttttaaacgaagtccgaaatttgcccccgagagggatcgaatcgggaacctggaggtgctactcggaagccttaaccattacgctagaggccctttcgccatttcaaaggaaactacgtagctacaaatctacaatgttataggaatgcttattttttagaatctactgtgttgcatcttactgttacaacttaatcaagtttgactgtttgacatactttgatggatcatcttgcaaattacatattcaccagtaagttctaagttctatagaaatggcttactttactgcatttcttttcttagttttgtaagatatgtttagttcatatttactagatcacttgtccagaagttatctctctgttatcttgcagcccctagttatgtcaaacactagtaggaattcctgtgttattctgtgttcataatatttattactctgtttgaagtacatgatctgtttgtggtttgctcttgtggaccagtagttcttctggaacatacttttatttccttttactagttttaattgttccttttatcattactttatttcagacaattgcaacagtatgtgtatttctagcgtcaaaagttgaagatactccttgtcccctggactatgtagttagagtatcctatgaaacaatgtataggcgggacactgctgcggctcaaaggatccgccagaaggatgtttttgagaaacagaaagcgctcattttgattggagagagattgcttctgacaacaattcgatttgatttcaacattcagcatccttatagaccacttcttgatgctatgcaaaatcttggcatcaataaaaaagaagtgaagcaagtagcatggaactttgtgaatgactggcttaaaacaacattgtgcctacagtataaaccccagtacatagctgctggttccctttacctggctgcaaggcttcacgatatcaagcttcctttgcatggagcacatgtttggtggcaccaatttggtgttgcaccaaagcctctggaagctgtcattcatcaaatgatggagcttgcggctgtgaacaaatcgaatcctgttcgtcccaatctggttaagccaaaggaaactttatgtgaagctaaactgagcttatctaatagcccagactctgtgttgaatcaatcaagcttgttaataagcagctctagtcctgatattggcgagaccagtgaccaagtgcaggtggattcttgtcaatacttgataagcagccatacgggtgattgtagggtctcatgtcctgacaacagttcgttggatacttctggtaaagctcatgatgaagagagattggatcaggccttaataaccaagcatgacagtgggatgatgccttctactagtaaccagacatcattagatgctactgtaggcactgagagcagtgctgaatatatgaagcaggatgtaagccattgcgatgacttcaatatcagagtcaatgaccaaagcttgaaccaggcgttaagaaatcagcatggtgatgctgtcccattacctgacatggtatcactagatgctaaggtggacaaggaaagtagttggtgtctggaaccattgattgcaaacttcgactgctgcattgacagcgttaatgtggatagcttgtgcactgatcagagattggctgatgttgcttcaggccccacagctgatgtgccatccgtgctgctggccaaggagaattctgatcctttgagtgcaaagctcgaaaatattgatgttgccaggataaaaggtttactgatgaagaggaagagccggagagagatccaaaaccaagccattgcttcagatggcctcagtgaagaagcctggattgagagagagctggagtctgggattgtcacaaaacaagaagccaattgtgccgccatctcagatgagctaagtgatgaagcctggattgagagagagctcgagtcagggattgtgaccggaccaacaaacgagcaggcgatcacttttgatggtttgagtgaaaatgattggatcgagagagagcttgagtctgggatcatcattgagccagcacctgctatcaagaagcggaagctggagtcaagctgttagctctttagctgctgcattcagaggccagattccaagcaggtgaataattacagatggaggtaccctgcgactagggcacatcgaagccaagagatgtcgcatagatgggaggatcaatattttccttttttttatttctttaaccaaacacctcggaatactttggcacgagggttgtgtgtacagtgggatcttcccagtttcttgaattcagaatcacacgaggtttgtgtgtacagtgggatcttcccagtttcttgaattcagaatcatatccactgtatctgttccttgtttgtgtaaatctagcatgcccgaagttcggctttaattagattgtaggtgtaactgtagcagggattgtctcgtgttaagcccgacgaaaaaatgattcagtgtaactgttactggtaaccaaagaaaattagttattcactatagacttattgttaacaaaagaaaagacagt

SEQ ID NO: 204653 - DNA, 2489 bp, Zea Mays
tctaccctgcggccttgcttctgttctctcgcgtcgttctcccgtgctccccgcgtgcgctctatctgtttctggtggcgacgacttggcggtcgccggctcgccgccgccgccgtgcacagtcctttattttggggaccttcaccggcgacgagcacccaccaggttgcttcacaaaacttacaacatccaggatacaactaataaggattccttcatctttatctggattttgaggaggttgctgagagcccatccagcagggtgtctcagacatactaatggacggggcgcccaagatccttgaaaaatcatcacatgaatgcatgtactcttggtacttcacccgggaagaactcgagaaattttcaccatcaaggaaagatgacctcagatgacactagcaacggcaatcatgctttgccatcgcttctatttacaccagtcccttgccaaaaatggatggcagacaattgcaacagtatgtgtatttctagcgtcaaaagttgaagatactccttgtcccctggactatgtagttagagtatcctatgaaacaatgtataggcgggacactgctgcggctcaaaggatccgccagaaggatgtttttgagaaacagaaagcgctcattttgattggagagagattgcttctgacaacaattcgatttgatttcaacattcagcatccttatagaccacttcttgatgctatgcaaaatcttggcatcaataaaaaagaagtgaagcaagtagcatggaactttgtgaatgactggcttaaaacaacattgtgcctacagtataaaccccagtacatagctgctggttccctttacctggctgcaaggcttcacgatatcaagcttcctttgcatggagcacatgtttggtggcaccaatttggtgttgcaccaaagcctctggaagctgtcattcatcaaatgatggagcttgcggctgtgaacaaatcgaatcctgttcgtcccaatctggttaagccaaaggaaactttatgtgaagctaaactgagcttatctaatagcccagactctgtgttgaatcaatcaagcttgttaataagcagctctagtcctgatattggcgagaccagtgaccaagtgcaggtggattcttgtcaatacttgataagcagccatacgggtgattgtagggtctcatgtcctgacaacagttcgttggatacttctggtaaagctcatgatgaagagagattggatcaggccttaataaccaagcatgacagtgggatgatgccttctactagtaaccagacatcattagatgctactgtaggcactgagagcagtgctgaatatatgaagcaggatgtaagccattgcgatgacttcaatatcagagtcaatgaccaaagcttgaaccaggcgttaagaaatcagcatggtgatgctgtcccattacctgacatggtatcactagatgctaaggtggacaaggaaagtagttggtgtctggaaccattgattgcaaacttcgactgctgcattgacagcgttaatgtggatagcttgtgcactgatcagagattggctgatgttgcttcaggccccacagctgatgtgccatccgtgctgctggccaaggagaattctgatcctttgagtgcaaagctcgaaaatattgatgttgccaggataaaaggtttactgatgaagaggaagagccggagagagatccaaaaccaagccattgcttcagatggcctcagtgaagaagcctggattgagagagagctggagtctgggattgtcacaaaacaagaagccaattgtgccgccatctcagatgagctaagtgatgaagcctggattgagagagagctcgagtcagggattgtgaccggaccaacaaacgagcaggcgatcacttttgatggtttgagtgaaaatgattggatcgagagagagcttgagtctgggatcatcattgagccagcacctgctatcaagaagcggaagctggagtcaagctgttagctctttagctgctgcattcagaggccagattccaagcaggtgaataattacagatggaggtaccctgcgactagggcacatcgaagccaagagatgtcgcatagatgggaggatcaatattttccttttttttatttctttaaccaaacacctcggaatactttggcacgagggttgtgtgtacagtgggatcttcccagtttcttgaattcagaatcacacgaggtttgtgtgtacagtgggatcttcccagtttcttgaattcagaatcatatccactgtatctgttccttgtttgtgtaaatctagcatgcccgaagttcggctttaattagattgtaggtgtaactgtagcagggattgtctcgtgttaagcccgacgaaaaaatgattcagtgtaactgttactggtaaccaaagaaaattagttattcactatagacttattgttaacaaaagaaaagacagt

SEQ ID NO: 204654 - DNA, 3092 bp, Zea Mays
catctaccctgcggccttgcttctgttctctcgcgtcgttctcccgtgctccccgcgtgcgctctatctgtttctggtggcgacgacttggcggtcgccggctcgccgccgccgccgtgcacagtcctttattttggggaccttcaccggcgacgagcacccaccaggttgcttcacaaaacttacaacatccaggatacaactaataaggattccttcatctttatctggattttgaggaggttgctgagagcccatccagcagggtgtctcagacatactaatggacggggcgcccaagatccttgaaaaatcatcacatgaatgcatgtactcttggtacttcacccgggaagaactcgagaaattttcaccatcaaggaaagatggtattactgaaaacaaggagtcagaaatacggcatttatattgttcatttatccgggacgttgggatcaggctgaagctacctcagatgacactagcaacggcaatcatgctttgccatcgcttctatttacaccagtcccttgccaaaaatggatggcaggtgagacttgagagactattttgttgtggcagtgatggttacttgctgatgtctatgaaaagcgacaagggtgcagagtttccttgccaagcatttgttgataatatgttatccatgtccaacttaacattacagattattcttcaaatcatttgaattatctaatcttctaatactattactattttaattttctaattacatgataattcatcttgatgctactctacctcaagatcacttcgtgattgggcatttcaaaggaatctaaaaaactcagtcagggagggaaataccgtcctccaggtattatataagagaccgaaacatggtcctggccgagaaaatcaccgaacactggccctccatcactagcgggtcgtcaccacccactctgcaacggcccaatcggaggatggcgcgcaggacgtaacccggaagcgtgcggggcacaacgaggggattttttttaaacgaagtccgaaatttgcccccgagagggatcgaatcgggaacctggagacaattgcaacagtatgtgtatttctagcgtcaaaagttgaagatactccttgtcccctggactatgtagttagagtatcctatgaaacaatgtataggcgggacactgctgcggctcaaaggatccgccagaaggatgtttttgagaaacagaaagcgctcattttgattggagagagattgcttctgacaacaattcgatttgatttcaacattcagcatccttatagaccacttcttgatgctatgcaaaatcttggcatcaataaaaaagaagtgaagcaagtagcatggaactttgtgaatgactggcttaaaacaacattgtgcctacagtataaaccccagtacatagctgctggttccctttacctggctgcaaggcttcacgatatcaagcttcctttgcatggagcacatgtttggtggcaccaatttggtgttgcaccaaagcctctggaagctgtcattcatcaaatgatggagcttgcggctgtgaacaaatcgaatcctgttcgtcccaatctggttaagccaaaggaaactttatgtgaagctaaactgagcttatctaatagcccagactctgtgttgaatcaatcaagcttgttaataagcagctctagtcctgatattggcgagaccagtgaccaagtgcaggtggattcttgtcaatacttgataagcagccatacgggtgattgtagggtctcatgtcctgacaacagttcgttggatacttctggtaaagctcatgatgaagagagattggatcaggccttaataaccaagcatgacagtgggatgatgccttctactagtaaccagacatcattagatgctactgtaggcactgagagcagtgctgaatatatgaagcaggatgtaagccattgcgatgacttcaatatcagagtcaatgaccaaagcttgaaccaggcgttaagaaatcagcatggtgatgctgtcccattacctgacatggtatcactagatgctaaggtggacaaggaaagtagttggtgtctggaaccattgattgcaaacttcgactgctgcattgacagcgttaatgtggatagcttgtgcactgatcagagattggctgatgttgcttcaggccccacagctgatgtgccatccgtgctgctggccaaggagaattctgatcctttgagtgcaaagctcgaaaatattgatgttgccaggataaaaggtttactgatgaagaggaagagccggagagagatccaaaaccaagccattgcttcagatggcctcagtgaagaagcctggattgagagagagctggagtctgggattgtcacaaaacaagaagccaattgtgccgccatctcagatgagctaagtgatgaagcctggattgagagagagctcgagtcagggattgtgaccggaccaacaaacgagcaggcgatcacttttgatggtttgagtgaaaatgattggatcgagagagagcttgagtctgggatcatcattgagccagcacctgctatcaagaagcggaagctggagtcaagctgttagctctttagctgctgcattcagaggccagattccaagcaggtgaataattacagatggaggtaccctgcgactagggcacatcgaagccaagagatgtcgcatagatgggaggatcaatattttccttttttttatttctttaaccaaacacctcggaatactttggcacgagggttgtgtgtacagtgggatcttcccagtttcttgaattcagaatcacacgaggtttgtgtgtacagtgggatcttcccagtttcttgaattcagaatcatatccactgtatctgttccttgtttgtgtaaatctagcatgcccgaagttcggctttaattagattgtaggtgtaactgtagcagggattgtctcgtgttaagcccgacgaaaaaatgattcagtgtaactgttactggtaaccaaagaaaattagttattcactatagacttattgttaacaaaagaaaagacagt

SEQ ID NO: 204655 - DNA, 3882 bp, Zea Mays
ctaaagtctaaaccatctaccctgcggccttgcttctgttctctcgcgtcgttctcccgtgctccccgcgtgcgctctatctgtttctggtggcgacgacttggcggtcgccggctcgccgccgccgccgtgcacagtcctttattttggggaccttcaccggcgacgagcacccaccaggttgcttcacaaaacttacaacatccaggatacaactaataaggattccttcatctttatctggattttgaggaggttgctgagagcccatccagcagggtgtctcagacatactaatggacggggcgcccaagatccttgaaaaatcatcacatgaatgcatgtactcttggtacttcacccgggaagaactcgagaaattttcaccatcaaggaaagatggtattactgaaaacaaggagtcagaaatacggcatttatattgttcatttatccgggacgttgggatcaggctgaagctgtacgaaattacttttgaccctcttaagtgaattgactttgttcaaccttattttagggtgttcttagtttatactactttatattgtggctcataacatgattgtttacattgacctaatctctcatgaacataaattattttcttttttcctctaagacaaaagcttcttttattatacggccaatatgtttgattctgctaccagattgtattattttagcaactttgataagattttctatatgtgctaacatattttttttcacagacctcagatgacactagcaacggcaatcatgctttgccatcgcttctatttacaccagtcccttgccaaaaatggatggcaggtgagacttgagagactattttgttgtggcagtgatggttacttgctgatgtctatgaaaagcgacaagggtgcagagtttccttgccaagcatttgttgataatatgttatccatgtccaacttaacattacagattattcttcaaatcatttgaattatctaatcttctaatactattactattttaattttctaattacatgataattcatcttgatgctactctacctcaagatcacttcgtgattgggcatttcaaaggaatctaaaaaactcagtcagggagggaaataccgtcctccaggtattatataagagaccgaaacatggtcctggccgagaaaatcaccgaacactggccctccatcactagcgggtcgtcaccacccactctgcaacggcccaatcggaggatggcgcgcaggacgtaacccggaagcgtgcggggcacaacgaggggattttttttaaacgaagtccgaaatttgcccccgagagggatcgaatcgggaacctggaggtgctactcggaagccttaaccattacgctagaggccctttcgccatttcaaaggaaactacgtagctacaaatctacaatgttataggaatgcttattttttagaatctactgtgttgcatcttactgttacaacttaatcaagtttgactgtttgacatactttgatggatcatcttgcaaattacatattcaccagtaagttctaagttctatagaaatggcttactttactgcatttcttttcttagttttgtaagatatgtttagttcatatttactagatcacttgtccagaagttatctctctgttatcttgcagcccctagttatgtcaaacactagtaggaattcctgtgttattctgtgttcataatatttattactctgtttgaagtacatgatctgtttgtggtttgctcttgtggaccagtagttcttctggaacatacttttatttccttttactagttttaattgttccttttatcattactttatttcagacaattgcaacagtatgtgtatttctagcgtcaaaagttgaagatactccttgtcccctggactatgtagttagagtatcctatgaaacaatgtataggcgggacactgctgcggctcaaaggatccgccagaaggatgtttttgagaaacagaaagcgctcattttgattggagagagattgcttctgacaacaattcgatttgatttcaacattcagcatccttatagaccacttcttgatgctatgcaaaatcttggcatcaataaaaaagaagtgaagcaagtagcatggaactttgtgaatgactggcttaaaacaacattgtgcctacagtataaaccccagtacatagctgctggttccctttacctggctgcaaggcttcacgatatcaagcttcctttgcatggagcacatgtttggtggcaccaatttggtgttgcaccaaagcctctggaagctgtcattcatcaaatgatggagcttgcggctgtgaacaaatcgaatcctgttcgtcccaatctggttaagccaaaggaaactttatgtgaagctaaactgagcttatctaatagcccagactctgtgttgaatcaatcaagcttgttaataagcagctctagtcctgatattggcgagaccagtgaccaagtgcaggtggattcttgtcaatacttgataagcagccatacgggtgattgtagggtctcatgtcctgacaacagttcgttggatacttctggtaaagctcatgatgaagagagattggatcaggccttaataaccaagcatgacagtgggatgatgccttctactagtaaccagacatcattagatgctactgtaggcactgagagcagtgctgaatatatgaagcaggatgtaagccattgcgatgacttcaatatcagagtcaatgaccaaagcttgaaccaggcgttaagaaatcagcatggtgatgctgtcccattacctgacatggtatcactagatgctaaggtggacaaggaaagtagttggtgtctggaaccattgattgcaaacttcgactgctgcattgacagcgttaatgtggatagcttgtgcactgatcagagattggctgatgttgcttcaggccccacagctgatgtgccatccgtgctgctggccaaggagaattctgatcctttgagtgcaaagctcgaaaatattgatgttgccaggataaaaggtttactgatgaagaggaagagccggagagagatccaaaaccaagccattgcttcagatggcctcagtgaagaagcctggattgagagagagctggagtctgggattgtcacaaaacaagaagccaattgtgccgccatctcagatgagctaagtgatgaagcctggattgagagagagctcgagtcagggattgtgaccggaccaacaaacgagcaggcgatcacttttgatggtttgagtgaaaatgattggatcgagagagagcttgagtctgggatcatcattgagccagcacctgctatcaagaagcggaagctggagtcaagctgttagctctttagctgctgcattcagaggccagattccaagcaggtgaataattacagatggaggtaccctgcgactagggcacatcgaagccaagagatgtcgcatagatgggaggatcaatattttccttttttttatttctttaaccaaacacctcggaatactttggcacgagggttgtgtgtacagtgggatcttcccagtttcttgaattcagaatcacacgaggtttgtgtgtacagtgggatcttcccagtttcttgaattcagaatcatatccactgtatctgttccttgtttgtgtaaatctagcatgcccgaagttcggctttaattagattgtaggtgtaactgtagcagggattgtctcgtgttaagcccgacgaaaaaatgattcagtgtaactgttactggtaaccaaagaaaattagttattcactatagacttattgttaacaaaagaaaagacagt

SEQ ID NO: 204656 - DNA, 3617 bp, Zea Mays
cgtagtctaaagtctaaaccatctaccctgcggccttgcttctgttctctcgcgtcgttctcccgtgctccccgcgtgcgctctatctgtttctggtggcgacgacttggcggtcgccggctcgccgccgccgccgtgcacagtcctttattttggggaccttcaccggcgacgagcacccaccaggttgcttcacaaaacttacaacatccaggatacaactaataaggattccttcatctttatctggattttgaggaggttgctgagagcccatccagcagggtgtctcagacatactaatggacggggcgcccaagatccttgaaaaatcatcacatgaatgcatgtactcttggtacttcacccgggaagaactcgagaaattttcaccatcaaggaaagatggtattactgaaaacaaggagtcagaaatacggcatttatattgttcatttatccgggacgttgggatcaggctgaagctacctcagatgacactagcaacggcaatcatgctttgccatcgcttctatttacaccagtcccttgccaaaaatggatggcaggtgagacttgagagactattttgttgtggcagtgatggttacttgctgatgtctatgaaaagcgacaagggtgcagagtttccttgccaagcatttgttgataatatgttatccatgtccaacttaacattacagattattcttcaaatcatttgaattatctaatcttctaatactattactattttaattttctaattacatgataattcatcttgatgctactctacctcaagatcacttcgtgattgggcatttcaaaggaatctaaaaaactcagtcagggagggaaataccgtcctccaggtattatataagagaccgaaacatggtcctggccgagaaaatcaccgaacactggccctccatcactagcgggtcgtcaccacccactctgcaacggcccaatcggaggatggcgcgcaggacgtaacccggaagcgtgcggggcacaacgaggggattttttttaaacgaagtccgaaatttgcccccgagagggatcgaatcgggaacctggaggtgctactcggaagccttaaccattacgctagaggccctttcgccatttcaaaggaaactacgtagctacaaatctacaatgttataggaatgcttattttttagaatctactgtgttgcatcttactgttacaacttaatcaagtttgactgtttgacatactttgatggatcatcttgcaaattacatattcaccagtaagttctaagttctatagaaatggcttactttactgcatttcttttcttagttttgtaagatatgtttagttcatatttactagatcacttgtccagaagttatctctctgttatcttgcagcccctagttatgtcaaacactagtaggaattcctgtgttattctgtgttcataatatttattactctgtttgaagtacatgatctgtttgtggtttgctcttgtggaccagtagttcttctggaacatacttttatttccttttactagttttaattgttccttttatcattactttatttcagacaattgcaacagtatgtgtatttctagcgtcaaaagttgaagatactccttgtcccctggactatgtagttagagtatcctatgaaacaatgtataggcgggacactgctgcggctcaaaggatccgccagaaggatgtttttgagaaacagaaagcgctcattttgattggagagagattgcttctgacaacaattcgatttgatttcaacattcagcatccttatagaccacttcttgatgctatgcaaaatcttggcatcaataaaaaagaagtgaagcaagtagcatggaactttgtgaatgactggcttaaaacaacattgtgcctacagtataaaccccagtacatagctgctggttccctttacctggctgcaaggcttcacgatatcaagcttcctttgcatggagcacatgtttggtggcaccaatttggtgttgcaccaaagcctctggaagctgtcattcatcaaatgatggagcttgcggctgtgaacaaatcgaatcctgttcgtcccaatctggttaagccaaaggaaactttatgtgaagctaaactgagcttatctaatagcccagactctgtgttgaatcaatcaagcttgttaataagcagctctagtcctgatattggcgagaccagtgaccaagtgcaggtggattcttgtcaatacttgataagcagccatacgggtgattgtagggtctcatgtcctgacaacagttcgttggatacttctggtaaagctcatgatgaagagagattggatcaggccttaataaccaagcatgacagtgggatgatgccttctactagtaaccagacatcattagatgctactgtaggcactgagagcagtgctgaatatatgaagcaggatgtaagccattgcgatgacttcaatatcagagtcaatgaccaaagcttgaaccaggcgttaagaaatcagcatggtgatgctgtcccattacctgacatggtatcactagatgctaaggtggacaaggaaagtagttggtgtctggaaccattgattgcaaacttcgactgctgcattgacagcgttaatgtggatagcttgtgcactgatcagagattggctgatgttgcttcaggccccacagctgatgtgccatccgtgctgctggccaaggagaattctgatcctttgagtgcaaagctcgaaaatattgatgttgccaggataaaaggtttactgatgaagaggaagagccggagagagatccaaaaccaagccattgcttcagatggcctcagtgaagaagcctggattgagagagagctggagtctgggattgtcacaaaacaagaagccaattgtgccgccatctcagatgagctaagtgatgaagcctggattgagagagagctcgagtcagggattgtgaccggaccaacaaacgagcaggcgatcacttttgatggtttgagtgaaaatgattggatcgagagagagcttgagtctgggatcatcattgagccagcacctgctatcaagaagcggaagctggagtcaagctgttagctctttagctgctgcattcagaggccagattccaagcaggtgaataattacagatggaggtaccctgcgactagggcacatcgaagccaagagatgtcgcatagatgggaggatcaatattttccttttttttatttctttaaccaaacacctcggaatactttggcacgagggttgtgtgtacagtgggatcttcccagtttcttgaattcagaatcacacgaggtttgtgtgtacagtgggatcttcccagtttcttgaattcagaatcatatccactgtatctgttccttgtttgtgtaaatctagcatgcccgaagttcggctttaattagattgtaggtgtaactgtagcagggattgtctcgtgttaagcccgacgaaaaaatgattcagtgtaactgttactggtaaccaaagaaaattagttattcactatagacttattgttaacaaaagaaaagacagt

SEQ ID NO: 204657 - DNA, 2861 bp, Zea Mays
ccgtagtctaaagtctaaaccatctaccctgcggccttgcttctgttctctcgcgtcgttctcccgtgctccccgcgtgcgctctatctgtttctggtggcgacgacttggcggtcgccggctcgccgccgccgccgtgcacagtcctttattttggggaccttcaccggcgacgagcacccaccaggttgcttcacaaaacttacaacatccaggatacaactaataaggattccttcatctttatctggattttgaggaggttgctgagagcccatccagcagggtgtctcagacatactaatggacggggcgcccaagatccttgaaaaatcatcacatgaatgcatgtactcttggtacttcacccgggaagaactcgagaaattttcaccatcaaggaaagatggtattactgaaaacaaggagtcagaaatacggcatttatattgttcatttatccgggacgttgggatcaggctgaagctgtacgaaattacttttgaccctcttaagtgaattgactttgttcaaccttattttagggtgttcttagtttatactactttatattgtggctcataacatgattgtttacattgacctaatctctcatgaacataaattattttcttttttcctctaagacaaaagcttcttttattatacggccaatatgtttgattctgctaccagattgtattattttagcaactttgataagattttctatatgtgctaacatattttttttcacagacctcagatgacactagcaacggcaatcatgctttgccatcgcttctatttacaccagtcccttgccaaaaatggatggcagacaattgcaacagtatgtgtatttctagcgtcaaaagttgaagatactccttgtcccctggactatgtagttagagtatcctatgaaacaatgtataggcgggacactgctgcggctcaaaggatccgccagaaggatgtttttgagaaacagaaagcgctcattttgattggagagagattgcttctgacaacaattcgatttgatttcaacattcagcatccttatagaccacttcttgatgctatgcaaaatcttggcatcaataaaaaagaagtgaagcaagtagcatggaactttgtgaatgactggcttaaaacaacattgtgcctacagtataaaccccagtacatagctgctggttccctttacctggctgcaaggcttcacgatatcaagcttcctttgcatggagcacatgtttggtggcaccaatttggtgttgcaccaaagcctctggaagctgtcattcatcaaatgatggagcttgcggctgtgaacaaatcgaatcctgttcgtcccaatctggttaagccaaaggaaactttatgtgaagctaaactgagcttatctaatagcccagactctgtgttgaatcaatcaagcttgttaataagcagctctagtcctgatattggcgagaccagtgaccaagtgcaggtggattcttgtcaatacttgataagcagccatacgggtgattgtagggtctcatgtcctgacaacagttcgttggatacttctggtaaagctcatgatgaagagagattggatcaggccttaataaccaagcatgacagtgggatgatgccttctactagtaaccagacatcattagatgctactgtaggcactgagagcagtgctgaatatatgaagcaggatgtaagccattgcgatgacttcaatatcagagtcaatgaccaaagcttgaaccaggcgttaagaaatcagcatggtgatgctgtcccattacctgacatggtatcactagatgctaaggtggacaaggaaagtagttggtgtctggaaccattgattgcaaacttcgactgctgcattgacagcgttaatgtggatagcttgtgcactgatcagagattggctgatgttgcttcaggccccacagctgatgtgccatccgtgctgctggccaaggagaattctgatcctttgagtgcaaagctcgaaaatattgatgttgccaggataaaaggtttactgatgaagaggaagagccggagagagatccaaaaccaagccattgcttcagatggcctcagtgaagaagcctggattgagagagagctggagtctgggattgtcacaaaacaagaagccaattgtgccgccatctcagatgagctaagtgatgaagcctggattgagagagagctcgagtcagggattgtgaccggaccaacaaacgagcaggcgatcacttttgatggtttgagtgaaaatgattggatcgagagagagcttgagtctgggatcatcattgagccagcacctgctatcaagaagcggaagctggagtcaagctgttagctctttagctgctgcattcagaggccagattccaagcaggtgaataattacagatggaggtaccctgcgactagggcacatcgaagccaagagatgtcgcatagatgggaggatcaatattttccttttttttatttctttaaccaaacacctcggaatactttggcacgagggttgtgtgtacagtgggatcttcccagtttcttgaattcagaatcacacgaggtttgtgtgtacagtgggatcttcccagtttcttgaattcagaatcatatccactgtatctgttccttgtttgtgtaaatctagcatgcccgaagttcggctttaattagattgtaggtgtaactgtagcagggattgtctcgtgttaagcccgacgaaaaaatgattcagtgtaactgttactggtaaccaaagaaaattagttattcactatagacttattgttaacaaaagaaaagacagt

SEQ ID NO: 204658 - DNA, 1555 bp, Zea Mays
tcggatgcatatctggccaacctgcacgtttctgaagcgacaaccacacgtccacacggacgggtgcatcccgacgcccaaatccatggcgagctcgccgcgatctcctccgccggcgcctacgccggaattcgagatctctcggcagtcccgcctctttgtggcggtgatagatctcgatgaactgaggatgctggcggctcagggagtcccagacgcggcgggcgtccgagcaactgtatggaagctgctactgggctatctgcccaatgaccgctcgctgtgggagcaggagctggcaaagaagagagggcagtacgctgctttcaaagatgagttccttacaaaccctaaagagcgcaacaggtgccaacagaaggccaccacaacgtaagtgcagagcatgttgacaatggcttcctgcacaggtcagaggtaacccgagaggagcaccctttaagccttgggaagaccagtgcttggaatcagttttttgagtactcagagattatggagcagattgaccgcgatgtaaagcgcacccaccctgacatgcagttcttctgcggcgactcgtcttttgcaaagtccaatcaggaatctttgaaaaatgtactgttaatctttgccaagctgaatgctggaataagatatgtacaagggatgaatgaagttttggcacccctcttctttgtatttcggagtgatccggatgataaaaatgctgaattcgcggaagcggattcattcttttgcttcgtcgagttgcttagtgggttcagagacaacttctgccagaaactggacaacagtgctgttggcattcgaggtacactagccaagttatcacagcttgtagcaaagtatgatggagaactccagcaacatctggaaataactacggaagttaatccccagttctacgcattcagatggataaccttactgctgacccaggaattcaacttcgccgacaccattcacatctgggacacactattaagtgatcctggtggcccccaggaaaccttgctcagaatatgctgcgcgatgctgatccttgtccggaagcgcctcctggccggcgacttcacctccaacctcaagctcctgcagaattacccaccgacgaacatcagccacctcctctacgtcgccaacaagctgcactgaaccggtctcttctgcgctgctgcgtttgttcagccaaaactgtggcccgagtcccggcattgcaacagaaacacaccgttgcggccatggcttgtgtatcatgtccattaatctgactccctgcattttgtaacttgtattgtatgttcacctgacaaggagttctagtatcccagttaatcaatgtggcatgattatagtgtctaagcatgtctgctgagcgctgaacattctccacttttttaaaatactagtgtatgaagcgcgcatatgcgcgcatggcgatccgtttagtgttatcatataatgtatgatgattatatgattaacaaagagtaaattaggatataagagtaaagacaatgcagaggtgacaattata

SEQ ID NO: 204659 - DNA, 1154 bp, Zea Mays
tggttggtactgccactactactacaacacaagcaggtcgttgatattgcgtactactatacggctggggcagaacgggagatgccacgttcctgtgcgtgcgggtgtctgcctgccggtgtgccccccgacggccaaagtgtgaaaaaaggtcaagagcctgcgctgccctaccagtaccagcgtgctgtcgtctactgttcctaccactgccaccaccaccaaggtagtagggtgccttttttgaggcttctctgggcgtttttccctgtggcccggtcgtctttcttttctcgaaaccccgtgctccactatgcaccacgcggtttctttttttttttttaacgtaaaggtgaaagtgccctctgcgcactgtgactcacgggtcaggacggtctgtgcagatgtcatgacgctgatgaagcggcaggctcgggcaatgtcgccacaggaacgaggattctctgtgatactgtcagacatgtgccccccagtttcagggatcacgactaaagatggagctatatcttgtgagttgggcatgcgcgctctctcgttggcagtagggaagataaagttaaaagattctaattacagtgataccctagagaagtatctgagctccactgagcctgagtctgacgaggatggcgttcttcgacgtggaggcaacctggtagtgaagtttcttgagaatgaggacatatcagggtttggcaaattctgcaaggtgaagttcaagaaagtatcgttgttgagacccaaggcgactcgacctagctcgagggagatctacatgatctgcgaaggtttgcggtagaaaggagggctcttcagaaggcaagcgaagactccaagaagctaggtcagttgagttgccctgaactgggcgctgttagttctagctgctggtgcaggtgctggctgattggcaatgtgatacagctgtttgatgctgatagcctcccagagcaagttaccacaaagctttgtgtgattgaaccatgctagtagttcgtctagatgttacctgtaataattttgttgaactgtgatactagttcgtctaggagaaacaagcatttgacttgagccctttctgagaacctgaaacacccttgctttttatgttgcaaatttccattatttcggcc

SEQ ID NO: 204660 - DNA, 1017 bp, Zea Mays
ggaaaagaaaagagggctaaaaacctagcaatcccctcctcgccgtagctgtcggacgaggtaaccatggccgcggggggcaccgccgacttcttctaccgcgagtcgcagcgtctgggctacgtcgcccgctctgcgtttaaggtggcttgtcagaacctgggtcccctcgagaagggtggcattgtcgtcggcgtcgatgttaagagcagaaggtgaaagtgccctctgcgcactgtgactcacgggtcaggacggtctgtgcagatgtcatgacgctgatgaagcggcaggctcgggcaatgtcgccacaggaacgaggattctctgtgatactgtcagacatgtgccccccagtttcagggatcacgactaaagatggagctatatcttgtgagttgggcatgcgcgctctctcgttggcagtagggaagataaagttaaaagattctaattacagtgataccctagagaagtatctgagctccactgagcctgagtctgacgaggatggcgttcttcgacgtggaggcaacctggtagtgaagtttcttgagaatgaggacatatcagggtttggcaaattctgcaaggtgaagttcaagaaagtatcgttgttgagacccaaggcgactcgacctagctcgagggagatctacatgatctgcgaaggtttgcggtagaaaggagggctcttcagaaggcaagcgaagactccaagaagctaggtcagttgagttgccctgaactgggcgctgttagttctagctgctggtgcaggtgctggctgattggcaatgtgatacagctgtttgatgctgatagcctcccagagcaagttaccacaaagctttgtgtgattgaaccatgctagtagttcgtctagatgttacctgtaataattttgttgaactgtgatactagttcgtctaggagaaacaagcatttgacttgagccctttctgagaacctgaaacacccttgctttttatgttgcaaatttccattatttcggcc

SEQ ID NO: 204661 - DNA, 1021 bp, Zea Mays
ggaaaagaaaagagggctaaaaacctagcaatcccctcctcgccgtagctgtcggacgaggtaaccatggccgcggggggcaccgccgacttcttctaccgcgagtcgcagcgtctgggctacgtcgcccgctctgcgtttaagctgatccagatgcagaagcagcacaagctcatcgcgccgggcgccgctgtactcgacctcggctgcgcccccggcgcgtggcttcaggtggcttgtcagaacctgggtcccctcgagaagggtggcattgtcgtcggcgtcgatgttaagaaggtgaaagtgccctctgcgcactgtgactcacgggtcaggacggtctgtgcagatgtcatgacgctgatgaagcggcaggctcgggcaatgtcgccacaggaacgaggattctctgtgatactgtcagacatgtgccccccagtttcagggatcacgactaaagatggagctatatcttagaagtatctgagctccactgagcctgagtctgacgaggatggcgttcttcgacgtggaggcaacctggtagtgaagtttcttgagaatgaggacatatcagggtttggcaaattctgcaaggtgaagttcaagaaagtatcgttgttgagacccaaggcgactcgacctagctcgagggagatctacatgatctgcgaaggtttgcggtagaaaggagggctcttcagaaggcaagcgaagactccaagaagctaggtcagttgagttgccctgaactgggcgctgttagttctagctgctggtgcaggtgctggctgattggcaatgtgatacagctgtttgatgctgatagcctcccagagcaagttaccacaaagctttgtgtgattgaaccatgctagtagttcgtctagatgttacctgtaataattttgttgaactgtgatactagttcgtctaggagaaacaagcatttgacttgagccctttctgagaacctgaaacacccttgctttttatgttgcaaatttccattatttcggcc

SEQ ID NO: 204662 - DNA, 834 bp, Zea Mays
tgtatctattcagcctttattggtgaaatgaaaatcgcaattgtcagttgttaagttgagagagtaattactcatgagaagctgagctcacttattttgttcaacactctgccctctgtttgtgatttacagaacgaggattctctgtgatactgtcagacatgtgccccccagtttcagggatcacgactaaagatggagctatatcttgtgagttgggcatgcgcgctctctcgttggcagtagggaagataaagttaaaagattctaattacagtgataccctagagaagtatctgagctccactgagcctgagtctgacgaggatggcgttcttcgacgtggaggcaacctggtagtgaagtttcttgagaatgaggacatatcagggtttggcaaattctgcaaggtgaagttcaagaaagtatcgttgttgagacccaaggcgactcgacctagctcgagggagatctacatgatctgcgaaggtttgcggtagaaaggagggctcttcagaaggcaagcgaagactccaagaagctaggtcagttgagttgccctgaactgggcgctgttagttctagctgctggtgcaggtgctggctgattggcaatgtgatacagctgtttgatgctgatagcctcccagagcaagttaccacaaagctttgtgtgattgaaccatgctagtagttcgtctagatgttacctgtaataattttgttgaactgtgatactagttcgtctaggagaaacaagcatttgacttgagccctttctgagaacctgaaacacccttgctttttatgttgcaaatttccattatttcggcc

SEQ ID NO: 204663 - DNA, 1940 bp, Zea Mays
cacgcgcccacgggcacgggcggggatctcctccgttgtttcctaggccgcacgccgcccacgccgcctccgtctccgtccgttcgtcgggcgcaatagagacaccacggcacgcgccgccgctcctgccctgcacttttctaccaccgaaggcgagggcgagggggccaaagacgagcgctttttcgtgcccgcctgcctgcctgctggtcattgccgctgctcacgagcctcccgccccgtgccgccctgccctctacggctctgccccaacgagccccaggggagccaggaaaaggagccgtcaaaagccgccgccgaggagagcgcgcagggtaacgaagcaccatctcctctccttgcccttcttcgattaggttggatcccagccgccgtcgctgcagtcaggcatggcatcaaccgttaccttcaacccagtgagcgcccaagctgcgctgatccaaaagccaaggaaccttggagccataagctatgctggcttaaagatgccggcatctgttagctctggctcagagtcgtcattcctgggctggaatgcatcccttcgggcagctgttactccaaggattgtgcccaagacaaagtctggatctcagatatctccacaggcatcttacaaggtggcagtgctgggtgctgccggtggcatcggtcaacccttgggcctgttggttaagatgtctcctctggtgtccgagctgcatctgtatgatattgctaatgtcaagggagttgctgcagatctcagccactgcaacacgcctgctcaggttcttgacttcactggaccctcagagttagccaactgcttgaaaggtgtggatgtcgttgtcatccctgccggggtcccaaggaagcctgggatgactcgcgatgacctttttaacatcaacgcaagcatcgtcaagacacttgttgaggctgttgcagacagttgcccagaggcgttcatccatatcatcagcaacccggtgaattccacggtgccaattgcagctgaggttctgaagcagaagggtgtctacaatcccaagaagcttttcggggttaccaccctggatgttgtcagggccaacacatttgtggcgcagaagaagaaccttaagctcatcgatgttgatgtcccagttgttggtggccatgctggaatcacaattctgccactgttatcgaagaccaggccatctgtcaccttcacagatgaggaaactgaggagctgacaaagaggatacagaatgccgggacagaggtggtggatgccaaggctggtgctgggtctgctaccctgtccatggcctatgccgctgccagattcgttgagtcttctctccgtgcgctggctggcgatccggatgtttatgagtgcacatttgttcagtctgagataactgacctgccattcttcgcatcaagagtcaagttgggcaagaatggtgttgagtccgtcatttctgccgacctccagggaatgactgagtatgaggccaaggcacttgaggcgctgaaggccgagttgaaggcaagcattgagaagggtattgctttcgtgaacaaacagcgggaagctgctgcatctgtttgaggcgaagcaagtgaaacagaaggaacaatcgtcttgaatggcttttaagttttgcagcctagagttttttgttgtcggcatgtaggaagatgttccagatggttgctgtttgtttctaattgctacatgggggctgaacatccatcccccaagttatcgccggtttctgaaccaggccttatttacacataaattttgccccttctgtatcgtggttctgtttgtagcttgttggagtctacaaactacaaagaggctaataaaccacttttattggaagtgatccttgtcatgtttgcattgtcgtatttcctgctgttcggcaggaaagccctg

SEQ ID NO: 204664 - DNA, 1936 bp, Zea Mays
cacgcgcccacgggcacgggcggggatctcctccgttgtttcctaggccgcacgccgcccacgccgcctccgtctccgtccgttcgtcgggcgcaatagagacaccacggcacgcgccgccgctcctgccctgcacttttctaccaccgaaggcgagggcgagggggccaaagacgagcgctttttcgtgcccgcctgcctgcctgctggtcattgccgctgctcacgagcctcccgccccgtgccgccctgccctctacggctctgccccaacgagccccaggggagccaggaaaaggagccgtcaaaagccgccgccgaggagagcgcgcagggtaacgaagcaccatctcctctccttgcccttcttcgattaggttggatcccagccgccgtcgctgcaggcatggcatcaaccgttaccttcaacccagtgagcgcccaagctgcgctgatccaaaagccaaggaaccttggagccataagctatgctggcttaaagatgccggcatctgttagctctggctcagagtcgtcattcctgggctggaatgcatcccttcgggcagctgttactccaaggattgtgcccaagacaaagtctggatctcagatatctccacaggcatcttacaaggtggcagtgctgggtgctgccggtggcatcggtcaacccttgggcctgttggttaagatgtctcctctggtgtccgagctgcatctgtatgatattgctaatgtcaagggagttgctgcagatctcagccactgcaacacgcctgctcaggttcttgacttcactggaccctcagagttagccaactgcttgaaaggtgtggatgtcgttgtcatccctgccggggtcccaaggaagcctgggatgactcgcgatgacctttttaacatcaacgcaagcatcgtcaagacacttgttgaggctgttgcagacagttgcccagaggcgttcatccatatcatcagcaacccggtgaattccacggtgccaattgcagctgaggttctgaagcagaagggtgtctacaatcccaagaagcttttcggggttaccaccctggatgttgtcagggccaacacatttgtggcgcagaagaagaaccttaagctcatcgatgttgatgtcccagttgttggtggccatgctggaatcacaattctgccactgttatcgaagaccaggccatctgtcaccttcacagatgaggaaactgaggagctgacaaagaggatacagaatgccgggacagaggtggtggatgccaaggctggtgctgggtctgctaccctgtccatggcctatgccgctgccagattcgttgagtcttctctccgtgcgctggctggcgatccggatgtttatgagtgcacatttgttcagtctgagataactgacctgccattcttcgcatcaagagtcaagttgggcaagaatggtgttgagtccgtcatttctgccgacctccagggaatgactgagtatgaggccaaggcacttgaggcgctgaaggccgagttgaaggcaagcattgagaagggtattgctttcgtgaacaaacagcgggaagctgctgcatctgtttgaggcgaagcaagtgaaacagaaggaacaatcgtcttgaatggcttttaagttttgcagcctagagttttttgttgtcggcatgtaggaagatgttccagatggttgctgtttgtttctaattgctacatgggggctgaacatccatcccccaagttatcgccggtttctgaaccaggccttatttacacataaattttgccccttctgtatcgtggttctgtttgtagcttgttggagtctacaaactacaaagaggctaataaaccacttttattggaagtgatccttgtcatgtttgcattgtcgtatttcctgctgttcggcaggaaagccctg

SEQ ID NO: 204665 - DNA, 2130 bp, Zea Mays
ctcccttccgtctcatccgcctccgcccgccggcatataaaccaaaaccctaaaacccatctcctcctctcttttcccctcccttttccagcacggggagcgacctgcgccgccgccacgatgccgaagcactaccgccctgcgggtaagaagaaggaagggaatgcggcaaagtacatcacgaggaccaaggcggtcaactacctgcaagttagcctcgcaatctttaggaagctatgcattctaaagggtgtctttccacgtcagccaaagaagaaggtggaagggaaccacaagacctactaccacacaaaggatattgcattcctcgctcatgaccctttgatcgagaagttcagggagattaaggtccatcgaaggaaggttaaaaaggctgttgctaagaaaaacagggatcttgcagacaggctgttgaatcggccaccaacttacaagcttgataggcttgtccttgaaaggtatccaacattcgttgatgctcttcgtgacttggatgactgccttacaatggtgcatctgtttgcggcattacctgctgttgacggtgaacgtgttgaggtcaaacgaatccataactgccgcaggttaagccatgaatggcaagcatacatatcccgaacccattctctgaggaagacatttatttccgtgaagggcatatattatcaggctgaagttcaaggacaaaagatcacctggctaactccgcatgctcttcagcaagtattaactgatgatgttgatttcaatgtgatgctttcttttctagaattctatgagactcttctaggatttgtgaacttcaaactctatcattcaataaatgtaaattatcctcctattctggatccacgtctggaagctttagctgctgagctctatgcattgtgccgatacatgtctgctggttccagaagaatgattgggaattcacaaactgacgaagtaatggaagataaggatgagaaaagtaaagctgaggaagtaattaaggaagagaaggttgtgaagaataaagcaagctcaaaagcagatgaatctgagctcagattagcacagcttcaacatcagctcccaaccaatgaacctggtgcactgatgaatcttgtagaagaatcaactgccgatgatgcagatgatgatgatactaaagattgtaaaggtttatttaagaacttaaagttctacttgagtcgagaggtgcctagggagtccctgttatttataattccagcgtttggagggactgtttcatgggaaggagaaggagctccatttaaagaaatagacgaagatatcactcaccagattgttgataggccgacacaaagccatgttttcctctccagggattatgttcaaccacagtgggtctttgattgtgtaaatgctcgtatcatattgccaacagaaggttatcttgttggaagagtacctccaccacatttgtctccttttgtggacaatgatgccgagggctacatgcctgagtatgcagagacaataaagaggctccaagctgctgctcgcaatgaggtgttgcctcttccaggtattggtgatgaagatctagacaattcactggtagcagcaatgatggatcgaacagcttctaacgaagctgctgaaaagaagaggaagctggagatgctagagaagcaatacatcgatgaactgaagaaggaaattgatggcgttgctttctctagtttgtcaaacaaggaagcagataaatcaccgaatgcaaaagatgatactcagtcagatcgtgaggaggatgccagtaaacaagaggaggatgatgatgatgatattggtactgctctcatgtctcgcaagcagagaggcctttataaggctatgaagatgggcaaagaaaagaaaaaggagaaagttgagctactcaagaagagaaaaaagaacgcggattctggcgcttcttccaagaagcggcactgatgtgtcacaaatcttcatcgcattgggttaataattttatgcttgcactgggttggcttggcgtttgcagagaagacacgacgagccacggcatttgcttgacttgctggtataggcgcttgtcttatactcttatctggatatttgtca

SEQ ID NO: 204666 - DNA, 1148 bp, Zea Mays
gagaaattgtgtaccatctctaaaattgttgataggccgacacaaagccatgttttcctctccagggattatgttcaaccacagtgggtctttgattgtgtaaatgctcgtatcatattgccaacagaaggttatcttgttggaagagtacctccaccacatttgtctccttttgtggacaatgatgccgagggctacatgcctgagtatgcagagacaataaagaggctccaagctgctgctcgcaatgaggtgttgcctcttccaggtattggtgatgaagatctagacaattcactggtagcagcaatgatggatcgaacagcttctaacgaagctgctgaaaagaagaggaagctggagatgctagagaagcaatacatcgatgaactgaagaaggaaattgatggcgttgctttctctagtttgtcaaacaaggaagcagataaatcaccgaatgcaaaagatgatactcagtcagatcgtgaggaggatgccagtaaacaagaggaggatgatgatgatgatattggtactgctctcatgtctcgcaagcagagaggcctttataaggctatgaagatgggcaaagaaaagaaaaaggagaaagttgagctactcaagaagagaaaaaagaacgcggattctggcgcttcttccaagaagcggcactgatgtgtcacaaatcttcatcgcattggtgtgtcatctctagtagaaatgttaccatgatcagctctgcgtgccaatcccccatgatgggtgggttgccttttgatatctgctatgtatgcttaagatgagttcaaggatatgtaacatgaaacttgaatagaaaagttttgatctgtcttacgaagcatttagactcgttattattgtgaaacttgaatagaaaagttttgacctgtcttacgaagcatttatagttattattgagaagcctggatatattgctcgccccgttttataggaaagaattattttttgggtctccgtagacgaagtttttctggttggcagggttaataattttatgcttgcactgggttggcttggcgtttgcagagaagacacgacgagccacggcatttgcttgacttgctggtataggcgcttgtcttatactcttatctggatatttgtca

SEQ ID NO: 204667 - DNA, 475 bp, Zea Mays
cactgttctgtgttgcaatttgaatcacctgaactcctgaaggaccatttgctacaaccactgttgtaactggctgtcgttgatgagtggagcaagtactgatgatgggacagaaatgcaggaaggaagccatagtcttccttttttgaagagctcgattctactcatgtctatgtcgaatttctgccctagtgtcgttagagttctcgtaccagatgcgaactgcctggtggcttcccaactcccgttcattcatatactaccaaacattgctgtgatctagatctagcccgatgcggtgctaacctgagattgtgggttactgtagctcagtatgcagctcaggtacctgcacttgctcaagattgcgataatgatcagattaaaatagcaggccacgcatattctgcaacttgcgacttttacatcgttgttgagtctcctgggttcagcctctttattgtttttgtttgtg

SEQ ID NO: 204668 - DNA, 2294 bp, Zea Mays
ccaagagttggtggaccaagaaggtgccatttttgaaaagggtgtgacctcagatggcattactgttgaagatcaagacaaggaaatggaacaatctgcaggcgatgaatcaagagtgaccaagggtgagaatgctgtgaaagataaaaaggtgtatcaagaagatgccattgacaaacaaggtgcagctgaggatggcagcggtgtgaagtcacaagaggacaacatggtggttccaggtcaatgtacagatggccttcctgtactagatgagggtaatgtggtgccacagtacacaagtgatcaactgagaacaaccacagataacaatgctgcagttgatccagagttggtggagcaagaaggtgttgatagcatagtgggtgcagccaaggttggtattgctgtggaagaatcgcgagaggacatcatggtggaaaagcaagttgaaggtgttcttttacaagatcaagatgaggcagtggagcaatgcaccagtgatcaactgaggacaatcacagatgggaggtgctcatatgggtcatcgtgccacttcaatcatccacggctcaaagcaaaactagaagtttcaagtttcccttccgaacaaagaaatcatgaagctgaatttctggaactgaaccgtgttggcctccccattagagaaggagcaaggaagtgtatctattacatgcgtaatggtacatgcagatatggaaagaaatgttgttttaaccatccagagcaagttcttgatgttcaacgccacactgcaacaggatgggatgatactaacttgcaatcttcaccacactcaaagaagtcacctgaacataaaactatggatgacatatcgtctggatctgaggttcttcctccaaacatacttcggatgcttttacctccccagaatgtgccccctagtacaaaagaaaaggaaatcaggataaaaaaggatcctgattgggcttcagcttcagatgattctgatggctgctgctcggccgatagttcagatgggcctttgtgcaagcaggaacatgaggactatcctgagaggcctgaatgccctttccttcttagatttggtaattgtaagtttgcatcatcatgccaatattaccacccaaaagacaaatttccaagtacctaccatccagaagacaaattccaaagtcgataccatcaaaaagaaaaatcaagtcgacaccatccaaaaaaagagccagcactatcaggagaactgatggtttatcctgacagacctagtgaacctgactgccccttctatgtgaaaactgggtcctgtaaatttggggcaaactgtaagtttcatcacccgaaggatataactccaaacatgcagggtccagcaagtccaaaaaggtcggtcgctgcaaaagagcaccacgcagcagctagagcgacattacaagaccagatgtaccagcaacaaaaattccctgagcggcctggccaaccagattgccggtactacatgcaatttgggaaatgtaaatttcaatcagcttgtatattcaatcattcaaaagacatactttcaagtgggtggcatccagcagaatgcccattctacatgaaaactaggacatgccaatttggatcagcttgtgagttttatcacccaaaagatcggtgctcaggcagagggggagtgattgatggtactgactatggacatgattttgccacgaagtcacggaatgttctgcaggaactggcaatatatcctgaaaggcctgatgaacttgagtgttctcactacatgaagcatggctactgtaaatataagatgaactgcaaatttcatcatccaagagatcgtcttccaaagaaataggaccatttgctacaaccactgttgtaactggctgtcgttgatgagtggagcaagtactgatgatgggacagaaatgcaggaaggaagccatagtcttccttttttgaagagctcgattctactcatgtctatgtcgaatttctgccctagtgtcgttagagttctcgtaccagatgcgaactgcctggtggcttcccaactcccgttcattcatatactaccaaacattgctgtgatctagatctagcccgatgcggtgctaacctgagattgtgggttactgtagctcagtatgcagctcaggtacctgcacttgctcaagattgcgataatgatcagattaaaatagcaggccacgcatattctgcaacttgcgacttttacatcgttgttgagtctcctgggttcagcctctttattgtttttgtttgtg

SEQ ID NO: 204669 - DNA, 2734 bp, Zea Mays
  misc_feature (1)..(1): n is a, c, g, or t
ngaattccaagagttggtggaccaagaaggtgccatttttgaaaagtgtgtgaccgctggtggcactactgttgaagatcaagacaaggaaatggagcaatctgcaggtgacgaatcaagagaaaccgaggctgagaatgctgtggaatataacaagaaggtggatcaagaagataccattaacagacaaggtacagctaaggaagacagtggtgtggagccacaagaggagaacgttgtggatccagatcaaggtgtggatgacttttctgtactagatgagggtaatgtggtggcacagtgcaccagtgatcaattgagaacaaccatggaagataatgctgcagagatgcaagaggtggtggagcaagaaggtgccatttttgaaaagggtgtgacctcagatggcattactgttgaagatcaagacaaggaaatggaacaatctgcaggcgatgaatcaagagtgaccaagggtgagaatgctgtgaaagataaaaaggtgtatcaagaagatgccattgacaaacaaggtgcagctgaggatggcagcggtgtgaagtcacaagaggacaacatggtggttccaggtcaatgtacagatggccttcctgtactagatgagggtaatgtggtgccacagtacacaagtgatcaactgagaacaaccacagataacaatgctgcagttgatccagagttggtggagcaagaaggtgttgatagcatagtgggtgcagccaaggttggtattgctgtggaagaatcgcgagaggacatcatggtggaaaagcaagttgaaggtgttcttttacaagatcaagatgaggcagtggagcaatgcaccagtgatcaactgaggacaatcacagatggtaatgatgtggaagatcaagaggtgcacagagagaaggttggtctctctgaagggtacccacagaagcctggtaaactgaactgtcgtttttacatgtcaacagggaggtgctcatatgggtcatcgtgccacttcaatcatccacggaagtttcaagtttcccttccgaacaaagaaatcatgaagctgaatttctggaactgaaccgtgttggcctccccattagagaaggagcaaggaagtgtatctattacatgcgtaatggtacatgcagatatggaaagaaatgttgttttaaccatccagagcaagttcttgatgttcaacgccacactgcaacaggatgggatgatactaacttgcaatcttcaccacactcaaagaagtcacctgaacataaaactatggatgacatatcgtctggatctgaggttcttcctccaaacatacttcggatgcttttacctccccagaatgtgccccctagtacaaaagaaaaggaaatcaggataaaaaaggatcctgattgggcttcagcttcagatgattctgatggctgctgctcggccgatagttcagatgggcctttgtgcaagcaggaacatgaggactatcctgagaggcctgaatgccctttccttcttagatttggtaattgtaagtttgcatcatcatgccaatattaccacccaaaagacaaatttccaagtacctaccatccagaagacaaattccaaagtcgataccatcaaaaagaaaaatcaagtcgacaccatccaaaaaaagagccagcactatcaggagaactgatggtttatcctgacagacctagtgaacctgactgccccttctatgtgaaaactgggtcctgtaaatttggggcaaactgtaagtttcatcacccgaaggatataactccaaacatgcagggtccagcaagtccaaaaaggtcggtcgctgcaaaagagcaccacgcagcagctagagcgacattacaagaccagatgtaccagcaacaaaaattccctgagcggcctggccaaccagattgccggtactacatgcaatttgggaaatgtaaatttcaatcagcttgtatattcaatcattcaaaagacatactttcaagtgggtggcatccagcagaatgcccattctacatgaaaactaggacatgccaatttggatcagcttgtgagttttatcacccaaaagatcggtgctcaggcagagggggagtgattgatggtactgactatggacatgattttgccacgaagtcacggaatgttctgcaggaactggcaatatatcctgaaaggcctgatgaacttgagtgttctcactacatgaagcatggctactgtaaatataagatgaactgcaaatttcatcatccaagagatcgtcttccaaagaaataggaccatttgctacaaccactgttgtaactggctgtcgttgatgagtggagcaagtactgatgatgggacagaaatgcaggaaggaagccatagtcttccttttttgaagagctcgattctactcatgtctatgtcgaatttctgccctagtgtcgttagagttctcgtaccagatgcgaactgcctggtggcttcccaactcccgttcattcatatactaccaaacattgctgtgatctagatctagcccgatgcggtgctaacctgagattgtgggttactgtagctcagtatgcagctcaggtacctgcacttgctcaagattgcgataatgatcagattaaaatagcaggccacgcatattctgcaacttgcgacttttacatcgttgttgagtctcctgggttcagcctctttattgtttttgtttgtg

SEQ ID NO: 204670 - DNA, 2840 bp, Zea Mays
  misc_feature (1)..(2): n is a, c, g, or t
nngaattccaagagttggtggaccaagaaggtgccatttttgaaaagtgtgtgaccgctggtggcactactgttgaagatcaagacaaggaaatggagcaatctgcaggtgacgaatcaagagaaaccgaggctgagaatgctgtggaatataacaagaaggtggatcaagaagataccattaacagacaaggtacagctaaggaagacagtggtgtggagccacaagaggagaacgttgtggatccagatcaaggtgtggatgacttttctgtactagatgagggtaatgtggtggcacagtgcaccagtgatcaattgagaacaaccatggaagataatgctgcagagatgcaagaggtggtggagcaagaaggtgccatttttgaaaagggtgtgacctcagatggcattactgttgaagatcaagacaaggaaatggaacaatctgcaggcgatgaatcaagagtgaccaagggtgagaatgctgtgaaagataaaaaggtgtatcaagaagatgccattgacaaacaaggtgcagctgaggatggcagcggtgtgaagtcacaagaggacaacatggtggttccaggtcaatgtacagatggccttcctgtactagatgagggtaatgtggtgccacagtacacaagtgatcaactgagaacaaccacagataacaatgctgcagttgatccagagttggtggagcaagaaggtgttgatagcatagtgggtgcagccaaggttggtattgctgtggaagaatcgcgagaggacatcatggtggaaaagcaagttgaaggtgttcttttacaagatcaagatgaggcagtggagcaatgcaccagtgatcaactgaggacaatcacagatgggaggtgctcatatgggtcatcgtgccacttcaatcatccacggctcaaagcaaaactagaagtttcaagtttcccttccgaacaaagaaatcatgaagctgaatttctggaactgaaccgtgttggcctccccattagagaaggagcaaggaagtgtatctattacatgcgtaatggtacatgcagatatggaaagaaatgttgttttaaccatccagagcaagttcttgatgttcaacgccacactgcaacaggatgggatgatactaacttgcaatcttcaccacactcaaagaagtcacctgaacataaaactatggatgacatatcgtctggatctgaggttcttcctccaaacatacttcggatgcttttacctccccagaatgtgccccctagtacaaaagaaaaggaaatcaggataaaaaaggatcctgattgggcttcagcttcagatgattctgatggctgctgctcggccgatagttcagatgggcctttgtgcaagcaggaacatgaggactatcctgagaggcctgaatgccctttccttcttagatttggtaattgtaagtttgcatcatcatgccaatattaccacccaaaagacaaatttccaagtacctaccatccagaagacaaattccaaagtcgataccatcaaaaagaaaaatcaagtcgacaccatccaaaaaaagagccagcactatcaggagaactgatggtttatcctgacagacctagtgaacctgactgccccttctatgtgaaaactgggtcctgtaaatttggggcaaactgtaagtttcatcacccgaaggatataactccaaacatgcagggtccagcaagtccaaaaaggtcggtcgctgcaaaagagcaccacgcagcagctagagcgacattacaagaccagatgtaccagcaacaaaaattccctgagcggcctggccaaccagattgccggtactacatgcaatttgggaaatgtaaatttcaatcagcttgtatattcaatcattcaaaagacatactttcaagtgggtggcatccagcagaatgcccattctacatgaaaactaggacatgccaatttggatcagcttgtgagttttatcacccaaaagatcggtgctcaggcagagggggagtgattgatggtactgactatggacatgattttgccacgaagtcacggaatgttctgcaggaactggcaatatatcctgaaaggcctgatgaacttgagtgttctcactacatgaagcatggctactgtaaatataagatgaactgcaaatttcatcatccaagagatcgtcttccaaagaaatagtctacagtgcaaaacaatattttaggtggccatatgagtgaacggttggacacaatcttaaggaaaaagaagaaaaaggcatctagcactcagtttattactctcttagtgtccttttcttggtataggtactgcatttcctgtttaccaggtacacgagaatcacactaggagatacctttttgcaattgctggaccatttgctacaaccactgttgtaactggctgtcgttgatgagtggagcaagtactgatgatgggacagaaatgcaggaaggaagccatagtcttccttttttgaagagctcgattctactcatgtctatgtcgaatttctgccctagtgtcgttagagttctcgtaccagatgcgaactgcctggtggcttcccaactcccgttcattcatatactaccaaacattgctgtgatctagatctagcccgatgcggtgctaacctgagattgtgggttactgtagctcagtatgcagctcaggtacctgcacttgctcaagattgcgataatgatcagattaaaatagcaggccacgcatattctgcaacttgcgacttttacatcgttgttgagtctcctgggttcagcctctttattgtttttgtttgtg

SEQ ID NO: 204671 - DNA, 1929 bp, Zea Mays
  misc_feature (1)..(2): n is a, c, g, or t
nngaattccaagagttggtggaccaagaaggtgccatttttgaaaagtgtgtgaccgctggtggcactactgttgaagatcaagacaaggaaatggagcaatctgcaggtgacgaatcaagagaaaccgaggctgagaatgctgtggaatataacaagaaggtggatcaagaagataccattaacagacaaggtacagctaaggaagacagtggtgtggagccacaagaggagaacgttgtggatccagatcaaggtgtggatgacttttctgtactagatgagggtaatgtggtggcacagtgcaccagtgatcaattgagaacaaccatggaagataatgctgcagagatgcaagaggtggtggagcaagaaggtgccatttttgaaaagggtgtgacctcagatggcattactgttgaagatcaagacaaggaaatggaacaatctgcaggcgatgaatcaagagtgaccaagggtgagaatgctgtgaaagataaaaaggtgtatcaagaagatgccattgacaaacaaggtgcagctgaggatggcagcggtgtgaagtcacaagaggacaacatggtggttccaggtcaatgtacagatggccttcctgtactagatgagggtaatgtggtgccacagtacacaagtgatcaactgagaacaaccacagataacaatgctgcagttgatccagagttggtggagcaagaaggtgttgatagcatagtgggtgcagccaaggttggtattgctgtggaagaatcgcgagaggacatcatggtggaaaagcaagttgaaggtgttcttttacaagatcaagatgaggcagtggagcaatgcaccagtgatcaactgaggacaatcacagatgggaggtgctcatatgggtcatcgtgccacttcaatcatccacggctcaaagcaaaactagaagtttcaagtttcccttccgaacaaagaaatcatgaagctgaatttctggaactgaaccgtgttggcctccccattagagaaggagcaaggaagtgtatctattacatgcgtaatggtacatgcagatatggaaagaaatgttgttttaaccatccagagcaagttcttgatgttcaacgccacactgcaacaggatgggatgatactaacttgcaatcttcaccacactcaaagaagtcacctgaacataaaactatggatgacatatcgtctggatctgaggttcttcctccaaacatacttcggatgcttttacctccccagaatgtgccccctagtacaaaagaaaaggaaatcaggataaaaaagggagtgattgatggtactgactatggacatgattttgccacgaagtcacggaatgttctgcaggaactggcaatatatcctgaaaggcctgatgaacttgagtgttctcactacatgaagcatggctactgtaaatataagatgaactgcaaatttcatcatccaagagatcgtcttccaaagaaataggaccatttgctacaaccactgttgtaactggctgtcgttgatgagtggagcaagtactgatgatgggacagaaatgcaggaaggaagccatagtcttccttttttgaagagctcgattctactcatgtctatgtcgaatttctgccctagtgtcgttagagttctcgtaccagatgcgaactgcctggtggcttcccaactcccgttcattcatatactaccaaacattgctgtgatctagatctagcccgatgcggtgctaacctgagattgtgggttactgtagctcagtatgcagctcaggtacctgcacttgctcaagattgcgataatgatcagattaaaatagcaggccacgcatattctgcaacttgcgacttttacatcgttgttgagtctcctgggttcagcctctttattgtttttgtttgtg

SEQ ID NO: 204672 - DNA, 2707 bp, Zea Mays
  misc_feature (1)..(2): n is a, c, g, or t
nngaattccaagagttggtggaccaagaaggtgccatttttgaaaagtgtgtgaccgctggtggcactactgttgaagatcaagacaaggaaatggagcaatctgcaggtgacgaatcaagagaaaccgaggctgagaatgctgtggaatataacaagaaggtggatcaagaagataccattaacagacaaggtacagctaaggaagacagtggtgtggagccacaagaggagaacgttgtggatccagatcaaggtgtggatgacttttctgtactagatgagggtaatgtggtggcacagtgcaccagtgatcaattgagaacaaccatggaagataatgctgcagagatgcaagaggtggtggagcaagaaggtgccatttttgaaaagggtgtgacctcagatggcattactgttgaagatcaagacaaggaaatggaacaatctgcaggcgatgaatcaagagtgaccaagggtgagaatgctgtgaaagataaaaaggtgtatcaagaagatgccattgacaaacaaggtgcagctgaggatggcagcggtgtgaagtcacaagaggacaacatggtggttccaggtcaatgtacagatggccttcctgtactagatgagggtaatgtggtgccacagtacacaagtgatcaactgagaacaaccacagataacaatgctgcagttgatccagagttggtggagcaagaaggtgttgatagcatagtgggtgcagccaaggttggtattgctgtggaagaatcgcgagaggacatcatggtggaaaagcaagttgaaggtgttcttttacaagatcaagatgaggcagtggagcaatgcaccagtgatcaactgaggacaatcacagatggtaatgatgtggaagatcaagaggtgcacagagagaaggttggtctctctgaagggtacccacagaagcctggtaaactgaactgtcgtttttacatgtcaacagggaggtgctcatatgggtcatcgtgccacttcaatcatccacggctcaaagcaaaactagaagtttcaagtttcccttccgaacaaagaaatcatgaagctgaatttctggaactgaaccgtgttggcctccccattagagaaatatggaaagaaatgttgttttaaccatccagagcaagttcttgatgttcaacgccacactgcaacaggatgggatgatactaacttgcaatcttcaccacactcaaagaagtcacctgaacataaaactatggatgacatatcgtctggatctgaggttcttcctccaaacatacttcggatgcttttacctccccagaatgtgccccctagtacaaaagaaaaggaaatcaggataaaaaaggatcctgattgggcttcagcttcagatgattctgatggctgctgctcggccgatagttcagatgggcctttgtgcaagcaggaacatgaggactatcctgagaggcctgaatgccctttccttcttagatttggtaattgtaagtttgcatcatcatgccaatattaccacccaaaagacaaatttccaagtacctaccatccagaagacaaattccaaagtcgataccatcaaaaagaaaaatcaagtcgacaccatccaaaaaaagagccagcactatcaggagaactgatggtttatcctgacagacctagtgaacctgactgccccttctatgtgaaaactgggtcctgtaaatttggggcaaactgtaagtttcatcacccgaaggatataactccaaacatgcagggtccagcaagtccaaaaaggtcggtcgctgcaaaagagcaccacgcagcagctagagcgacattacaagaccagatgtaccagcaacaaaaattccctgagcggcctggccaaccagattgccggtactacatgcaatttgggaaatgtaaatttcaatcagcttgtatattcaatcattcaaaagacatactttcaagtgggtggcatccagcagaatgcccattctacatgaaaactaggacatgccaatttggatcagcttgtgagttttatcacccaaaagatcggtgctcaggcagagggggagtgattgatggtactgactatggacatgattttgccacgaagtcacggaatgttctgcaggaactggcaatatatcctgaaaggcctgatgaacttgagtgttctcactacatgaagcatggctactgtaaatataagatgaactgcaaatttcatcatccaagagatcgtcttccaaagaaataggaccatttgctacaaccactgttgtaactggctgtcgttgatgagtggagcaagtactgatgatgggacagaaatgcaggaaggaagccatagtcttccttttttgaagagctcgattctactcatgtctatgtcgaatttctgccctagtgtcgttagagttctcgtaccagatgcgaactgcctggtggcttcccaactcccgttcattcatatactaccaaacattgctgtgatctagatctagcccgatgcggtgctaacctgagattgtgggttactgtagctcagtatgcagctcaggtacctgcacttgctcaagattgcgataatgatcagattaaaatagcaggccacgcatattctgcaacttgcgacttttacatcgttgttgagtctcctgggttcagcctctttattgtttttgtttgtg

SEQ ID NO: 204673 - DNA, 2879 bp, Zea Mays
  misc_feature (1)..(2): n is a, c, g, or t
nngaattccaagagttggtggaccaagaaggtgccatttttgaaaagtgtgtgaccgctggtggcactactgttgaagatcaagacaaggaaatggagcaatctgcaggtgacgaatcaagagaaaccgaggctgagaatgctgtggaatataacaagaaggtggatcaagaagataccattaacagacaaggtacagctaaggaagacagtggtgtggagccacaagaggagaacgttgtggatccagatcaaggtgtggatgacttttctgtactagatgagggtaatgtggtggcacagtgcaccagtgatcaattgagaacaaccatggaagataatgctgcagagatgcaagaggtggtggagcaagaaggtgccatttttgaaaagggtgtgacctcagatggcattactgttgaagatcaagacaaggaaatggaacaatctgcaggcgatgaatcaagagtgaccaagggtgagaatgctgtgaaagataaaaaggtgtatcaagaagatgccattgacaaacaaggtgcagctgaggatggcagcggtgtgaagtcacaagaggacaacatggtggttccaggtcaatgtacagatggccttcctgtactagatgagggtaatgtggtgccacagtacacaagtgatcaactgagaacaaccacagataacaatgctgcagttgatccagagttggtggagcaagaaggtgttgatagcatagtgggtgcagccaaggttggtattgctgtggaagaatcgcgagaggacatcatggtggaaaagcaagttgaaggtgttcttttacaagatcaagatgaggcagtggagcaatgcaccagtgatcaactgaggacaatcacagatggtaatgatgtggaagatcaagaggtgcacagagagaaggttggtctctctgaagggtacccacagaagcctggtaaactgaactgtcgtttttacatgtcaacagggaggtgctcatatgggtcatcgtgccacttcaatcatccacggctcaaagcaaaactagaagtttcaagtttcccttccgaacaaagaaatcatgaagctgaatttctggaactgaaccgtgttggcctccccattagagaaggagcaaggaagtgtatctattacatgcgtaatggtacatgcagatatggaaagaaatgttgttttaaccatccagagcaagttcttgatgttcaacgccacactgcaacaggatgggatgatactaacttgcaatcttcaccacactcaaagaagtcacctgaacataaaactatggatgacatatcgtctggatctgaggttcttcctccaaacatacttcggatgcttttacctccccagaatgtgccccctagtacaaaagaaaaggaaatcaggataaaaaaggatcctgattgggcttcagcttcagatgattctgatggctgctgctcggccgatagttcagatgggcctttgtgcaagcaggaacatgaggactatcctgagaggcctgaatgccctttccttcttagatttggtaattgtaagtttgcatcatcatgccaatattaccacccaaaagacaaatttccaagtacctaccatccagaagacaaattccaaagtcgataccatcaaaaagaaaaatcaagtcgacaccatccaaaaaaagagccagcactatcaggagaactgatggtttatcctgacagacctagtgaacctgactgccccttctatgtgaaaactgggtcctgtaaatttggggcaaactgtaagtttcatcacccgaaggatataactccaaacatgcagggtccagcaagtccaaaaaggtcggtcgctgcaaaagagcaccacgcagcagctagagcgacattacaagaccagatgtaccagcaacaaaaattccctgagcggcctggccaaccagattgccggtactacatgcaatttgggaaatgtaaatttcaatcagcttgtatattcaatcattcaaaagacatactttcaagtgggtggcatccagcagaatgcccattctacatgaaaactaggacatgccaatttggatcagcttgtgagttttatcacccaaaagatcggtgctcaggcagagggggagtgattgatggtactgactatggacatgattttgccacgaagtcacggaatgttctgcaggaactggcaatatatcctgaaaggcctgatgaacttgagtgttctcactacatgaagcatggctactgtaaatataagatgaactgcaaatttcatcatccaagagatcgtcttccaaagaaatagtctacagtgcaaaacaatattttaggtggccatatgagtgaacggttggacacaatcttaaggaaaaagaagaaaaaggcatctagcactcagtttattactctcttagtgtccttttcttggtataggaccatttgctacaaccactgttgtaactggctgtcgttgatgagtggagcaagtactgatgatgggacagaaatgcaggaaggaagccatagtcttccttttttgaagagctcgattctactcatgtctatgtcgaatttctgccctagtgtcgttagagttctcgtaccagatgcgaactgcctggtggcttcccaactcccgttcattcatatactaccaaacattgctgtgatctagatctagcccgatgcggtgctaacctgagattgtgggttactgtagctcagtatgcagctcaggtacctgcacttgctcaagattgcgataatgatcagattaaaatagcaggccacgcatattctgcaacttgcgacttttacatcgttgttgagtctcctgggttcagcctctttattgtttttgtttgtg

SEQ ID NO: 204674 - DNA, 4475 bp, Zea Mays
caaacacaaaagtctccaaccaacaggaaccaacaaggacgagggccacgaggccacgagggcagaacgaggagaaagcctgaagtgggtgacagaagaacgaggtgagcgaagtggttgggaagagcttccagactgatcgagggtttagggtttcttctccctcccttcctccactccacccctcggccctcgcccccgtccctggccccgtcgccgctgccgacgctgccatggctggggtggaggatgaggacgagttcaaggacgcctcggtggccgccgatccgccaccttgctcgccgaagcccgcctccaagtccatgaccgctaccggcagcggcggtggcctcgggaggaggctgttcgcttccattcctctccccgccaccctctccgccgccatcggccgcttctccggccccaacccgctggctaccaatgtgggcctcgggctcctactcgacgcggggcccgctgcctcctctgacggcccccttgcctccgacgcggcctcgggcggcagcagcctccacctgccctcgttgcctgctctccagcggcagcacggggatgatcaggttgctgggcgtggcgcgggtgagtgggaggaggagctagggttgttaccggccgaggaagggtgggatacagctgaagacagtcgggagaaggagggtcttgctgttgatgggcgctctgcgaacagaaattgtttcccgacgcgtggtcaggaggagggggcacagagacagagacctggtgatgagttgggggcagccgtggcccaagaccaggaggtggtggtgaagcaacaaggggccactgaggattgtgctgctgtggtggaagatgagagtaactactctgcggtagagcaatgtgctggtgatgaaacaagggcagtcaaggctagtaatgctgtggaaataaataagagggtgatcgagcaagaatgtgctggtggcatactggatgaagccaaatatggtgtttctttaggattgcaagaggagaatgccatggtggaagagcaaggtgtggatgtcatttctgtacaaaatcaacgtgtggcgatggagcaatgcgctggtgatcagttgacaacaaccacaggcggtagtgctgtacaagaggtggtggtggagcaagaaggggacactgagtgttacactgctgtggaagctgtagaacaatgcaccaatcatggatcaagagcagacaaggatggcaatgttgtgaagagaaaggagaaggcggtggagcaagaagtttctgttggtgtacgtgatgcagctaaggattgtgttactgtggaaccacaagaggagaatgtggtggtggtggagcatggtgaggatggcatttctgtgcaagatcaacataaggcggtggagcaatgtactagtggtcaacttagaacaaccatggatgatactgctgcagaaggtcaaagggtggtggagcagggaggtgccattttctatttggatgcaacagcatatgatattgctgttgaagatcaagagaaggaaatgaaggaatctgatggtgacgaatcaagatcaaccagggatagaaatcctgcggaagtcaaagataaggaggtgaaccaagaagatgtcgtagacagacacaatgtgatcaaggatggaagtggtgtggagttactagagaataacatagtggctatagagcaaggtgaggatggcatctctctatcagatgaggataatatggtggaactatatacaagtgatcaactgagagcaaccctggatgatcatgctgcagcaaatcgaaaggtggtggagcaagaaggtgacattgttgaaagggttgtgaccacagatggtatttctattgaagactatgagaaggaagtagagcaatctactggtgacgaatcaagagaaaccgaggctgagaatgctgtggaatataacaagaaggtggatcaagaagataccattaacagacaaggtacagctaaggaagacagtggtgtggagccacaagaggagaacgttgtggatccagatcaaggtgtggatgacttttctgtactagatgagggtaatgtggtggcacagtgcaccagtgatcaattgagaacaaccatggaagataatgctgcagagatgcaagaggtggtggagcaagaaggtgccatttttgaaaagggtgtgacctcagatggcattactgttgaagatcaagacaaggaaatggaacaatctgcaggcgatgaatcaagagtgaccaagggtgagaatgctgtgaaagataaaaaggtgtatcaagaagatgccattgacaaacaaggtgcagctgaggatggcagcggtgtgaagtcacaagaggacaacatggtggttccaggtcaatgtacagatggccttcctgtactagatgagggtaatgtggtgccacagtacacaagtgatcaactgagaacaaccacagataacaatgctgcagttgatccagagttggtggagcaagaaggtgttgatagcatagtgggtgcagccaaggttggtattgctgtggaagaatcgcgagaggacatcatggtggaaaagcaagttgaaggtgttcttttacaagatcaagatgaggcagtggagcaatgcaccagtgatcaactgaggacaatcacagatggtaatgatgtggaagatcaagaggtgcacagagagaagggaggtgctcatatgggtcatcgtgccacttcaatcatccacggctcaaagcaaaactagaagtttcaagtttcccttccgaacaaagaaatcatgaagctgaatttctggaactgaaccgtgttggcctccccattagagaaggagcaaggaagtgtatctattacatgcgtaatggtacatgcagatatggaaagaaatgttgttttaaccatccagagcaagttcttgatgttcaacgccacactgcaacaggatgggatgatactaacttgcaatcttcaccacactcaaagaagtcacctgaacataaaactatggatgacatatcgtctggatctgaggttcttcctccaaacatacttcggatgcttttacctccccagaatgtgccccctagtacaaaagaaaaggaaatcaggataaaaaaggatcctgattgggcttcagcttcagatgattctgatggctgctgctcggccgatagttcagatgggcctttgtgcaagcaggaacatgaggactatcctgagaggcctgaatgccctttccttcttagatttggtaattgtaagtttgcatcatcatgccaatattaccacccaaaagacaaatttccaagtacctaccatccagaagacaaattccaaagtcgataccatcaaaaagaaaaatcaagtcgacaccatccaaaaaaagagccagcactatcaggagaactgatggtttatcctgacagacctagtgaacctgactgccccttctatgtgaaaactgggtcctgtaaatttggggcaaactgtaagtttcatcacccgaaggatataactccaaacatgcagggtccagcaagtccaaaaaggtcggtcgctgcaaaagagcaccacgcagcagctagagcgacattacaagaccagatgtaccagcaacaaaaattccctgagcggcctggccaaccagattgccggtactacatgcaatttgggaaatgtaaatttcaatcagcttgtatattcaatcattcaaaagacatactttcaagtgggtggcatccagcagaatgcccattctacatgaaaactaggacatgccaatttggatcagcttgtgagttttatcacccaaaagatcggtgctcaggcagagggggagtgattgatggtactgactatggacatgattttgccacgaagtcacggaatgttctgcaggaactggcaatatatcctgaaaggcctgatgaacttgagtgttctcactacatgaagcatggctactgtaaatataagatgaactgcaaatttcatcatccaagagatcgtcttccaaagaaataggaccatttgctacaaccactgttgtaactggctgtcgttgatgagtggagcaagtactgatgatgggacagaaatgcaggaaggaagccatagtcttccttttttgaagagctcgattctactcatgtctatgtcgaatttctgccctagtgtcgttagagttctcgtaccagatgcgaactgcctggtggcttcccaactcccgttcattcatatactaccaaacattgctgtgatctagatctagcccgatgcggtgctaacctgagattgtgggttactgtagctcagtatgcagctcaggtacctgcacttgctcaagattgcgataatgatcagattaaaatagcaggccacgcatattctgcaacttgcgacttttacatcgttgttgagtctcctgggttcagcctctttattgtttttgtttgtg

SEQ ID NO: 204675 - DNA, 4437 bp, Zea Mays
caaacacaaaagtctccaaccaacaggaaccaacaaggacgagggccacgaggccacgagggcagaacgaggagaaagcctgaagtgggtgacagaagaacgaggtgagcgaagtggttgggaagagcttccagactgatcgagggtttagggtttcttctccctcccttcctccactccacccctcggccctcgcccccgtccctggccccgtcgccgctgccgacgctgccatggctggggtggaggatgaggacgagttcaaggacgcctcggtggccgccgatccgccaccttgctcgccgaagcccgcctccaagtccatgaccgctaccggcagcggcggtggcctcgggaggaggctgttcgcttccattcctctccccgccaccctctccgccgccatcggccgcttctccggccccaacccgctggctaccaatgtgggcctcgggctcctactcgacgcggggcccgctgcctcctctgacggcccccttgcctccgacgcggcctcgggcggcagcagcctccacctgccctcgttgcctgctctccagcggcagcacggggatgatcaggttgctgggcgtggcgcgggtgagtgggaggaggagctagggttgttaccggccgaggaagggtgggatacagctgaagacagtcgggagaaggagggtcttgctgttgatgggcgctctgcgaacagaaattgtttcccgacgcgtggtcaggaggagggggcacagagacagagacctggtgatgagttgggggcagccgtggcccaagaccaggaggtggtggtgaagcaacaaggggccactgaggattgtgctgctgtggtggaagatgagagtaactactctgcggtagagcaatgtgctggtgatgaaacaagggcagtcaaggctagtaatgctgtggaaataaataagagggtgatcgagcaagaatgtgctggtggcatactggatgaagccaaatatggtgtttctttaggattgcaagaggagaatgccatggtggaagagcaaggtgtggatgtcatttctgtacaaaatcaacgtgtggcgatggagcaatgcgctggtgatcagttgacaacaaccacaggcggtagtgctgtacaagaggtggtggtggagcaagaaggggacactgagtgttacactgctgtggaagctgtagaacaatgcaccaatcatggatcaagagcagacaaggatggcaatgttgtgaagagaaaggagaaggcggtggagcaagaagtttctgttggtgtacgtgatgcagctaaggattgtgttactgtggaaccacaagaggagaatgtggtggtggtggagcatggtgaggatggcatttctgtgcaagatcaacataaggcggtggagcaatgtactagtggtcaacttagaacaaccatggatgatactgctgcagaaggtcaaagggtggtggagcagggaggtgccattttctatttggatgcaacagcatatgatattgctgttgaagatcaagagaaggaaatgaaggaatctgatggtgacgaatcaagatcaaccagggatagaaatcctgcggaagtcaaagataaggaggtgaaccaagaagatgtcgtagacagacacaatgtgatcaaggatggaagtggtgtggagttactagagaataacatagtggctatagagcaaggtgaggatggcatctctctatcagatgaggataatatggtggaactatatacaagtgatcaactgagagcaaccctggatgatcatgctgcagcaaatcgaaaggtggtggagcaagaaggtgacattgttgaaagggttgtgaccacagatggtatttctattgaagactatgagaaggaagtagagcaatctactggtgacgaatcaagagaaaccgaggctgagaatgctgtggaatataacaagaaggtggatcaagaagataccattaacagacaaggtacagctaaggaagacagtggtgtggagccacaagaggagaacgttgtggatccagatcaaggtgtggatgacttttctgtactagatgagggtaatgtggtggcacagtgcaccagtgatcaattgagaacaaccatggaagataatgctgcagagatgcaagaggtggtggagcaagaaggtgccatttttgaaaagggtgtgacctcagatggcattactgttgaagatcaagacaaggaaatggaacaatctgcaggcgatgaatcaagagtgaccaagggtgagaatgctgtgaaagataaaaaggtgtatcaagaagatgccattgacaaacaaggtgcagctgaggatggcagcggtgtgaagtcacaagaggacaacatggtggttccaggtcaatgtacagatggccttcctgtactagatgagggtaatgtggtgccacagtacacaagtgatcaactgagaacaaccacagataacaatgctgcagttgatccagagttggtggagcaagaaggtgttgatagcatagtgggtgcagccaaggttggtattgctgtggaagaatcgcgagaggacatcatggtggaaaagcaagttgaaggtgttcttttacaagatcaagatgaggcagtggagcaatgcaccagtgatcaactgaggacaatcacagatgggaggtgctcatatgggtcatcgtgccacttcaatcatccacggctcaaagcaaaactagaagtttcaagtttcccttccgaacaaagaaatcatgaagctgaatttctggaactgaaccgtgttggcctccccattagagaaggagcaaggaagtgtatctattacatgcgtaatggtacatgcagatatggaaagaaatgttgttttaaccatccagagcaagttcttgatgttcaacgccacactgcaacaggatgggatgatactaacttgcaatcttcaccacactcaaagaagtcacctgaacataaaactatggatgacatatcgtctggatctgaggttcttcctccaaacatacttcggatgcttttacctccccagaatgtgccccctagtacaaaagaaaaggaaatcaggataaaaaaggatcctgattgggcttcagcttcagatgattctgatggctgctgctcggccgatagttcagatgggcctttgtgcaagcaggaacatgaggactatcctgagaggcctgaatgccctttccttcttagatttggtaattgtaagtttgcatcatcatgccaatattaccacccaaaagacaaatttccaagtacctaccatccagaagacaaattccaaagtcgataccatcaaaaagaaaaatcaagtcgacaccatccaaaaaaagagccagcactatcaggagaactgatggtttatcctgacagacctagtgaacctgactgccccttctatgtgaaaactgggtcctgtaaatttggggcaaactgtaagtttcatcacccgaaggatataactccaaacatgcagggtccagcaagtccaaaaaggtcggtcgctgcaaaagagcaccacgcagcagctagagcgacattacaagaccagatgtaccagcaacaaaaattccctgagcggcctggccaaccagattgccggtactacatgcaatttgggaaatgtaaatttcaatcagcttgtatattcaatcattcaaaagacatactttcaagtgggtggcatccagcagaatgcccattctacatgaaaactaggacatgccaatttggatcagcttgtgagttttatcacccaaaagatcggtgctcaggcagagggggagtgattgatggtactgactatggacatgattttgccacgaagtcacggaatgttctgcaggaactggcaatatatcctgaaaggcctgatgaacttgagtgttctcactacatgaagcatggctactgtaaatataagatgaactgcaaatttcatcatccaagagatcgtcttccaaagaaataggaccatttgctacaaccactgttgtaactggctgtcgttgatgagtggagcaagtactgatgatgggacagaaatgcaggaaggaagccatagtcttccttttttgaagagctcgattctactcatgtctatgtcgaatttctgccctagtgtcgttagagttctcgtaccagatgcgaactgcctggtggcttcccaactcccgttcattcatatactaccaaacattgctgtgatctagatctagcccgatgcggtgctaacctgagattgtgggttactgtagctcagtatgcagctcaggtacctgcacttgctcaagattgcgataatgatcagattaaaatagcaggccacgcatattctgcaacttgcgacttttacatcgttgttgagtctcctgggttcagcctctttattgtttttgtttgtg

SEQ ID NO: 204676 - DNA, 3019 bp, Zea Mays
caggcctccacaacaaagctagggtttgcctcccccaccctcctggcctcctcccgctttccctcatcctcgtgcgaacctcgcgagccaaggaccgctcgtcgtctcttgtctcgccgtcgccatgggtacggagcggaagcggaaggtgagtcttttcgacgtggtcgacgagacctccgtctccggcaagctgggccgcgccgcctccaacggcgccgccgccactgcggcggggaccaatccgtctgtcaaccggtggaacggccggccctacacggcacggtacttcgagatcctcgagaagcgccgcacactgcccgtgtggcagcagaaggaggagttcctccgccgcctccgcgacaaccagaccctcatcctcgtcggcgaaacgggaagcggaaagacaactcagattccacaatttgttcttgagactgaaggcttgggtaaccgttccatggttgcctgcactcagcctcggagggtcgcggcaatgtcagtctccaggcgtgtggcagaggagatggatgttactattggggaagaagtgggttacagtattcggtttgaagattgcagcagccacaaaactgttctcaagtattctgatctaatcctgttgtgttgaacactattgcttcctatcagatatttgacagatggtatgcttctgagagaagcaatggcagacccacttttagagaagtacaaggtgattgttcttgatgaggctcatgagaggactttggcaacagatgttttgtttgggcttctgaaggaggttctaaaaaatagaccggatttgaagcttgttgttatgagtgctactctcgaagcagagaaattccagggttactttagtgatgcaccgttgatgaaggtgcctgggagacttcatccagttgagatattttacacccaagaaccagagagggactatctagaggctgctatcaggacagttgtgcaaatacatatgtgtgaacctgctggtgatatccttgtattccttactggagaagaggagattgaggacgcatgtcggaaaatcaataaggaaatcaataatatgggagatcaggttggcccagttaaagtcgtgcctttatactctacactgcccccagccatgcagcagaagatttttgaacctgctcctgccccattgaaggaacgaggtcctcctggaaggaaaattgttgtgtccaccaacattgctgaaacatccttaactatagatggcatagtttatgtgatagacccggggttttctaaacagaaagtttacaacccaagaataagggtggaatccctcctggtgtcaccaatttctaaggcaagtgctcatcagagagctggtcgtgctggacgaacgcaacctgggaagtgctttaggctatacacagagaagagctttaatgaggatttgcaaccacagacatacccagaaattcttcggtcgaacctggcaaatacagttcttaccttgaagaaacttggaattgatgatttagtgcattttgactttatggatcctccagcaccagaaactctaatgagggccttagaagttttgaactatttggctgcactagatgatgaaggtaatctaacacagttaggtgagatgatgagtgagtttcccctggatccacaaatgtcaaagatgcttgtcatcagtccaaagtacaactgttcgaatgagatcttatcaatatctgccatgctgtcagataattgctgtttgttgagttattctgacaaagcaaatggtacagtctcgcctctttgcatctgctgactaccgtggacttcgtctgttattaccatattctttctctagcacccaattgcttcctccggcctagggaagctcaaaaggctgctgatgaggccaaggctcgatttggccatattgatggggaccatctgacgcttctgaatgtataccatgcatacaagcaaaacaatgaagatccccagtggtgttatgagaactttatcaattccagagcactcaagtctgcagacaatgtcagacaacagcttgttcgcatcatgactagattcaacctcaagatgtgcagcacggatttcaatagccgtgagtactacgtcaatatcaggaaaaccctgcttgcagggtatttcatgcaggtcgctcacctggaacgaactggacattacctgactgtaaaagataaccaggtcgtccatcttcatccctccaattgcatggaccataagccagagtgggtcatctacaatgaatacgtcttgactaccaggaatttcatccgcacagtcaccgatatccgtggggaatggctaattgatattgcgccgcattactatgacctgagcaatttcccgtcatgtgaggccaagcgtgttcttgagaggctgtataacaagcgggagagggaaagagctgcaaatagaggctgaagttgatacttccacaaacctggtgcttcataattccacagcaggttatcacagatggcggacccgtttgtcatatgcatgatgtcttccacagcctgttgcctagtgtttcatcagcatgatcattatgcagacagcctcgagaaatcccttggcagctcaattagttatgatgcagattaattttgtgccattctccttatttttgtatgcgtaagatatttatattttgcgtttctatgtgattaactggttatccttcggttggaatgaaattccactgattttggtttattagcttagctggggttatgtatgcctataatatgcttacttccggttgcaggaggaagggttgaacgaggttggcaccgaagaaaatttggtgtccctttttatttatagatagatagtttctgtgtggtacgccaaggataaggcgatctgaaattggattgcgtctatctaatgtgtaacaaaatggaaacttttttggtgggtgcaatgtagcacttgcctatctgacacttgtgcacgttcgatctccagctaaacagctatgtgagcc

SEQ ID NO: 204677 - DNA, 2909 bp, Zea Mays
caggcctccacaacaaagctagggtttgcctcccccaccctcctggcctcctcccgctttccctcatcctcgtgcgaacctcgcgagccaaggaccgctcgtcgtctcttgtctcgccgtcgccatgggtacggagcggaagcggaaggtgagtcttttcgacgtggtcgacgagacctccgtctccggcaagctgggccgcgccgcctccaacggcgccgccgccactgcggcggggaccaatccgtctgtcaaccggtggaacggccggccctacacggcacggtacttcgagatcctcgagaagcgccgcacactgcccgtgtggcagcagaaggaggagttcctccgccgcctccgcgacaaccagaccctcatcctcgtcggcgaaacgggaagcggaaagacaactcagattccacaatttgttcttgagactgaaggcttgggtaaccgttccatggttgcctgcactcagcctcggagggtcgcggcaatgtcagtctccaggcgtgtggcagaggagatggatgttactattggggaagaagtgggttacagtattcggtttgaagattgcagcagccacaaaactgttctcaagtattctgatctaatcctgttgtgttgaacactattgcttcctatcagatatttgacagatggtatgcttctgagagaagcaatggcagacccacttttagagaagtacaaggtgattgttcttgatgaggctcatgagaggactttggcaacagatgttttgtttgggcttctgaaggaggttctaaaaaatagaccggatttgaagcttgttgttatgagtgctactctcgaagcagagaaattccagggttactttagtgatgcaccgttgatgaaggtgcctgggagacttcatccagttgagatattttacacccaagaaccagagagggactatctagaggctgctatcaggacagttgtgcaaatacatatgtgtgaacctgctggtgatatccttgtattccttactggagaagaggagattgaggacgcatgtcggaaaatcaataaggaaatcaataatatgggagatcaggttggcccagttaaagtcgtgcctttatactctacactgcccccagccatgcagcagaagatttttgaacctgctcctgccccattgaaggaacgaggtcctcctggaaggaaaattgttgtgtccaccaacattgctgaaacatccttaactatagatggcatagtttatgtgatagacccggggttttctaaacagaaagtttacaacccaagaataagggtggaatccctcctggtgtcaccaatttctaaggcaagtgctcatcagagagctggtcgtgctggacgaacgcaacctgggaagtgctttaggctatacacagagaagagctttaatgaggatttgcaaccacagacatacccagaaattcttcggtcgaacctggcaaatacagttcttaccttgaagaaacttggaattgatgatttagtgcattttgactttatggatcctccagcaccagaaactctaatgagggccttagaagttttgaactatttggctgcactagatgatgaaggtaatctaacacagttaggtgagatgatgagtgagtttcccctggatccacaaatgtcaaagatgcttgtcatcagtccaaagtacaactgttcgaatgagatcttatcaatatctgccatgctgtcagcacccaattgcttcctccggcctagggaagctcaaaaggctgctgatgaggccaaggctcgatttggccatattgatggggaccatctgacgcttctgaatgtataccatgcatacaagcaaaacaatgaagatccccagtggtgttatgagaactttatcaattccagagcactcaagtctgcagacaatgtcagacaacagcttgttcgcatcatgactagattcaacctcaagatgtgcagcacggatttcaatagccgtgagtactacgtcaatatcaggaaaaccctgcttgcagggtatttcatgcaggtcgctcacctggaacgaactggacattacctgactgtaaaagataaccaggtcgtccatcttcatccctccaattgcatggaccataagccagagtgggtcatctacaatgaatacgtcttgactaccaggaatttcatccgcacagtcaccgatatccgtggggaatggctaattgatattgcgccgcattactatgacctgagcaatttcccgtcatgtgaggccaagcgtgttcttgagaggctgtataacaagcgggagagggaaagagctgcaaatagaggctgaagttgatacttccacaaacctggtgcttcataattccacagcaggttatcacagatggcggacccgtttgtcatatgcatgatgtcttccacagcctgttgcctagtgtttcatcagcatgatcattatgcagacagcctcgagaaatcccttggcagctcaattagttatgatgcagattaattttgtgccattctccttatttttgtatgcgtaagatatttatattttgcgtttctatgtgattaactggttatccttcggttggaatgaaattccactgattttggtttattagcttagctggggttatgtatgcctataatatgcttacttccggttgcaggaggaagggttgaacgaggttggcaccgaagaaaatttggtgtccctttttatttatagatagatagtttctgtgtggtacgccaaggataaggcgatctgaaattggattgcgtctatctaatgtgtaacaaaatggaaacttttttggtgggtgcaatgtagcacttgcctatctgacacttgtgcacgttcgatctccagctaaacagctatgtgagcc

SEQ ID NO: 204678 - DNA, 3491 bp, Zea Mays
caggcctccacaacaaagctagggtttgcctcccccaccctcctggcctcctcccgctttccctcatcctcgtgcgaacctcgcgagccaaggaccgctcgtcgtctcttgtctcgccgtcgccatgggtacggagcggaagcggaaggtgagtcttttcgacgtggtcgacgagacctccgtctccggcaagctgggccgcgccgcctccaacggcgccgccgccactgcggcggggaccaatccgtctgtcaaccggtggaacggccggccctacacggcacggtacttcgagatcctcgagaagcgccgcacactgcccgtgtggcagcagaaggaggagttcctccgccgcctccgcgacaaccagaccctcatcctcgtcggcgaaacgggaagcggaaagacaactcagattccacaatttgttcttgagactgaaggcttgggtaaccgttccatggttgcctgcactcagcctcggagggtcgcggcaatgtcagtctccaggcgtgtggcagaggagatggatgttactattggggaagaagtgggttacagtattcggtttgaagattgcagcagccacaaaactgttctcaaatatttgacagatggtatgcttctgagagaagcaatggcagacccacttttagagaagtacaaggtgattgttcttgatgaggctcatgagaggactttggcaacagatgttttgtttgggcttctgaaggaggttctaaaaaatagaccggatttgaagcttgttgttatgagtgctactctcgaagcagagaaattccagggttactttagtgatgcaccgttgatgaaggtgcctgggagacttcatccagttgagatattttacacccaagaaccagagagggactatctagaggctgctatcaggacagttgtgcaaatacatatgtgtgaacctgctggtgatatccttgtattccttactggagaagaggagattgaggacgcatgtcggaaaatcaataaggaaatcaataatatgggagatcaggttggcccagttaaagtcgtgcctttatactctacactgcccccagccatgcagcagaagatttttgaacctgctcctgccccattgaaggaacgaggtcctcctggaaggaaaattgttgtgtccaccaacattgctgaaacatccttaactatagatggcatagtttatgtgatagacccggggttttctaaacagaaagtttacaacccaagaataagggtggaatccctcctggtgtcaccaatttctaaggcaagtgctcatcagagagctggtcgtgctggacgaacgcaacctgggaagtgctttaggctatacacagagaagagctttaatgaggatttgcaaccacagacatacccagaaattcttcggtcgaacctggcaaatacagttcttaccttgaagaaacttggaattgatgatttagtgcattttgactttatggatcctccagcaccagaaactctaatgagggccttagaagttttgaactatttggctgcactagatgatgaaggtaatctaacacagttaggtgagatgatgagtgagtttcccctggatccacaaatgtcaaagatgcttgtcatcagtccaaagtacaactgttcgaatgagatcttatcaatatctgccatgctgtcaggtatgttaattatcactaaaggttaataaattgcatttctacaagttatcttctctatatttttgtctggagtactccctccatcccaaaatgtgtcattctcacttgtcatgccactttagctttgatcaaatatatataagaaagtattaagatttatggtgcataattagtatcatcagatgaatccttgattatatatttatgataaacttgtttggagatattaatgttgctaattttttctacaaatatagttaaactcaagtaacttcgaccagcacgcatcccgtagtgacacttgttttgagatagagtactttccttgtcagttctgttcaagcgaaataccacatttgtaatatagcatgtgagcttgcatgcatactactgcatgtgcgcttggcatcatttattcattttcttgtgcatttctttaatgtgctgtcatcagcaactgtcattcacctggcttcttgagctattggtcgaaatgatcatacagtttaggctgatgcagataattgctgtttgttgagttattctgacaaagcaaatggtacagtctcgcctctttgcatctgctgactaccgtggacttcgtctgttattaccatattctttctctagcacccaattgcttcctccggcctagggaagctcaaaaggctgctgatgaggccaaggctcgatttggccatattgatggggaccatctgacgcttctgaatgtataccatgcatacaagcaaaacaatgaagatccccagtggtgttatgagaactttatcaattccagagcactcaagtctgcagacaatgtcagacaacagcttgttcgcatcatgactagattcaacctcaagatgtgcagcacggatttcaatagccgtgagtactacgtcaatatcaggaaaaccctgcttgcagggtatttcatgcaggtcgctcacctggaacgaactggacattacctgactgtaaaagataaccaggtcgtccatcttcatccctccaattgcatggaccataagccagagtgggtcatctacaatgaatacgtcttgactaccaggaatttcatccgcacagtcaccgatatccgtggggaatggctaattgatattgcgccgcattactatgacctgagcaatttcccgtcatgtgaggccaagcgtgttcttgagaggctgtataacaagcgggagagggaaagagctgcaaatagaggctgaagttgatacttccacaaacctggtgcttcataattccacagcaggttatcacagatggcggacccgtttgtcatatgcatgatgtcttccacagcctgttgcctagtgtttcatcagcatgatcattatgcagacagcctcgagaaatcccttggcagctcaattagttatgatgcagattaattttgtgccattctccttatttttgtatgcgtaagatatttatattttgcgtttctatgtgattaactggttatccttcggttggaatgaaattccactgattttggtttattagcttagctggggttatgtatgcctataatatgcttacttccggttgcaggaggaagggttgaacgaggttggcaccgaagaaaatttggtgtccctttttatttatagatagatagtttctgtgtggtacgccaaggataaggcgatctgaaattggattgcgtctatctaatgtgtaacaaaatggaaacttttttggtgggtgcaatgtagcacttgcctatctgacacttgtgcacgttcgatctccagctaaacagctatgtgagcc

SEQ ID NO: 204679 - DNA, 3189 bp, Zea Mays
caggcctccacaacaaagctagggtttgcctcccccaccctcctggcctcctcccgctttccctcatcctcgtgcgaacctcgcgagccaaggaccgctcgtcgtctcttgtctcgccgtcgccatgggtacggagcggaagcggaaggtgagtcttttcgacgtggtcgacgagacctccgtctccggcaagctgggccgcgccgcctccaacggcgccgccgccactgcggcggggaccaatccgtctgtcaaccggtggaacggccggccctacacggcacggtacttcgagatcctcgagaagcgccgcacactgcccgtgtggcagcagaaggaggagttcctccgccgcctccgcgacaaccagaccctcatcctcgtcggcgaaacgggaagcggaaagacaactcagattccacaatttgttcttgagactgaaggcttgggtaaccgttccatggttgcctgcactcagcctcggagggtcgcggcaatgtcagtctccaggcgtgtggcagaggagatggatgttactattggggaagaagtgggttacagtattcggtttgaagattgcagcagccacaaaactgttctcaaatatttgacagatggtatgcttctgagagaagcaatggcagacccacttttagagaagtacaaggtgattgttcttgatgaggctcatgagaggactttggcaacagatgttttgtttgggcttctgaaggaggttctaaaaaatagaccggatttgaagcttgttgttatgagtgctactctcgaagcagagaaattccagggttactttagtgatgcaccgttgatgaaggtgcctgggagacttcatccagttgagatattttacacccaagaaccagagagggactatctagaggctgctatcaggacagttgtgcaaatacatatgtgtgaacctgctggtgatatccttgtattccttactggagaagaggagattgaggacgcatgtcggaaaatcaataaggaaatcaataatatgggagatcaggttggcccagttaaagtcgtgcctttatactctacactgcccccagccatgcagcagaagatttttgaacctgctcctgccccattgaaggaacgaggtcctcctggaaggaaaattgttgtgtccaccaacattgctgaaacatccttaactatagatggcatagtttatgtgatagacccggggttttctaaacagaaagtttacaacccaagaataagggtggaatccctcctggtgtcaccaatttctaaggcaagtgctcatcagagagctggtcgtgctggacgaacgcaacctgggaagtgctttaggctatacacagagaagagctttaatgaggatttgcaaccacagacatacccagaaattcttcggtcgaacctggcaaatacagttcttaccttgaagaaacttggaattgatgatttagtgcattttgactttatggatcctccagcaccagaaactctaatgagggccttagaagttttgaactatttggctgcactagatgatgaaggtaatctaacacagttaggtgagatgatgagtgagtttcccctggatccacaaatgtcaaagatgcttgtcatcagtccaaagtacaactgttcgaatgagatcttatcaatatctgccatgctgtcaggtatgttaattatcactaaaggttaataaattgcatttctacaagttatcttctctatatttttgtctggagtactccctccatcccaaaatgtgtcattctcacttgtcatgccactttagctttgatcaaatatatataagaaagtattaagatttatggtgcataattagtatcatcagatgaatccttgattatatatttatgataaacttgtttggagatattaatgttgctaattttttctacaaatatagttaaactcaagtaacttcgaccagcacgcatcccgtagtgacacttgttttgagatagagtactttccttgtcagttctgttcaagcgaaataccacatttgtaatatagcatgtgagcttgcatgcatactactgcatgtgcgcttggcatcatttattcattttcttgtgcatttctttaatgtgctgtcatcagcaactgtcattcacctggcttcttgagctattggtcgaaatgatcatacagtttaggctgatgcagataattgctgtttgttgagttattctgacaaagcaaatggtacagtctcgcctctttgcatctgctgactaccgtggacttcgtctgttattaccatattctttctctagcacccaattgcttcctccggcctagggaagctcaaaaggctgctgatgaggccaaggctcgatttggccatattgatggggaccatctgacgcttctgaatgtataccatgcatacaagcaaaacaatgaagatccccagtggtgttatgagaactttatcaattccagagcactcaagtctgcagacaatgtcagacaacagcttgttcgcatcatgactagattcaacctcaagatgtgcagcacggatttcaatagccgtgagtactacgtcaatatcaggaaaaccctgcttgcagggtatttcatgcaggtcgctcacctggaacgaactggacattacctgactgtaaaagataaccaggtcgtccatcttcatccctccaattgcatggaccataagccagagtgggtcatctacaatgaatacgtcttgactaccaggaatttcatccgcacagtcaccgatatccgtggggaatggctaattgatattgcgccgcattactatgacctgagcaatttcccgtcatgtgaggccaagcgtgttcttgagaggctgtataacaagcgggagagggaaagagctgcaaatagaggctgaagttgatacttccacaaacctggtgcttcataattccacagcaggaggaagggttgaacgaggttggcaccgaagaaaatttggtgtccctttttatttatagatagatagtttctgtgtggtacgccaaggataaggcgatctgaaattggattgcgtctatctaatgtgtaacaaaatggaaacttttttggtgggtgcaatgtagcacttgcctatctgacacttgtgcacgttcgatctccagctaaacagctatgtgagcc

SEQ ID NO: 204680 - DNA, 2958 bp, Zea Mays
aaaacccccaaatatagatcgagcggaccctccaggcctccacaacaaagctagggtttgcctcccccaccctcctggcctcctcccgctttccctcatcctcgtgcgaacctcgcgagccaaggaccgctcgtcgtctcttgtctcgccgtcgccatgggtacggagcggaagcggaaggtgagtcttttcgacgtggtcgacgagacctccgtctccggcaagctgggccgcgccgcctccaacggcgccgccgccactgcggcggggaccaatccgtctgtcaaccggtggaacggccggccctacacggcacggtacttcgagatcctcgagaagcgccgcacactgcccgtgtggcagcagaaggaggagttcctccgccgcctccgcgacaaccagaccctcatcctcgtcggcgaaacgggaagcggaaagacaactcagattccacaatttgttcttgagactgaaggcttgggtaaccgttccatggttgcctgcactcagcctcggagggtcgcggcaatgtcagtctccaggcgtgtggcagaggagatggatgttactattggggaagaagtgggttacagtattcggtttgaagattgcagcagccacaaaactgttctcaaatatttgacagatggtatgcttctgagagaagcaatggcagacccacttttagagaagtacaaggtgattgttcttgatgaggctcatgagaggactttggcaacagatgttttgtttgggcttctgaaggaggttctaaaaaatagaccggatttgaagcttgttgttatgagtgctactctcgaagcagagaaattccagggttactttagtgatgcaccgttgatgaaggtgcctgggagacttcatccagttgagatattttacacccaagaaccagagagggactatctagaggctgctatcaggacagttgtgcaaatacatatgtgtgaacctgctggtgatatccttgtattccttactggagaagaggagattgaggacgcatgtcggaaaatcaataaggaaatcaataatatgggagatcaggttggcccagttaaagtcgtgcctttatactctacactgcccccagccatgcagcagaagatttttgaacctgctcctgccccattgaaggaacgaggtcctcctggaaggaaaattgttgtgtccaccaacattgctgaaacatccttaactatagatggcatagtttatgtgatagacccggggttttctaaacagaaagtttacaacccaagaataagggtggaatccctcctggtgtcaccaatttctaaggcaagtgctcatcagagagctggtcgtgctggacgaacgcaacctgggaagtgctttaggctatacacagagaagagctttaatgaggatttgcaaccacagacatacccagaaattcttcggtcgaacctggcaaatacagttcttaccttgaagaaacttggaattgatgatttagtgcattttgactttatggatcctccagcaccagaaactctaatgagggccttagaagttttgaactatttggctgcactagatgatgaaggtaatctaacacagttaggtgagatgatgagtgagtttcccctggatccacaaatgtcaaagatgcttgtcatcagtccaaagtacaactgttcgaatgagatcttatcaatatctgccatgctgtcagtctcgcctctttgcatctgctgactaccgtggacttcgtctgttattaccatattctttctctagcacccaattgcttcctccggcctagggaagctcaaaaggctgctgatgaggccaaggctcgatttggccatattgatggggaccatctgacgcttctgaatgtataccatgcatacaagcaaaacaatgaagatccccagtggtgttatgagaactttatcaattccagagcactcaagtctgcagacaatgtcagacaacagcttgttcgcatcatgactagattcaacctcaagatgtgcagcacggatttcaatagccgtgagtactacgtcaatatcaggaaaaccctgcttgcagggtatttcatgcaggtcgctcacctggaacgaactggacattacctgactgtaaaagataaccaggtcgtccatcttcatccctccaattgcatggaccataagccagagtgggtcatctacaatgaatacgtcttgactaccaggaatttcatccgcacagtcaccgatatccgtggggaatggctaattgatattgcgccgcattactatgacctgagcaatttcccgtcatgtgaggccaagcgtgttcttgagaggctgtataacaagcgggagagggaaagagctgcaaatagaggctgaagttgatacttccacaaacctggtgcttcataattccacagcaggttatcacagatggcggacccgtttgtcatatgcatgatgtcttccacagcctgttgcctagtgtttcatcagcatgatcattatgcagacagcctcgagaaatcccttggcagctcaattagttatgatgcagattaattttgtgccattctccttatttttgtatgcgtaagatatttatattttgcgtttctatgtgattaactggttatccttcggttggaatgaaattccactgattttggtttattagcttagctggggttatgtatgcctataatatgcttacttccggttgcaggaggaagggttgaacgaggttggcaccgaagaaaatttggtgtccctttttatttatagatagatagtttctgtgtggtacgccaaggataaggcgatctgaaattggattgcgtctatctaatgtgtaacaaaatggaaacttttttggtgggtgcaatgtagcacttgcctatctgacacttgtgcacgttcgatctccagctaaacagctatgtgagcc

SEQ ID NO: 204681 - DNA, 3061 bp, Zea Mays
tcgaaatcgaactctcgtaataacgaaattctaaatttctcaatttgatctatgcaaaacccccaaatatagatcgagcggaccctccaggcctccacaacaaagctagggtttgcctcccccaccctcctggcctcctcccgctttccctcatcctcgtgcgaacctcgcgagccaaggaccgctcgtcgtctcttgtctcgccgtcgccatgggtacggagcggaagcggaaggtgagtcttttcgacgtggtcgacgagacctccgtctccggcaagctgggccgcgccgcctccaacggcgccgccgccactgcggcggggaccaatccgtctgtcaaccggtggaacggccggccctacacggcacggtacttcgagatcctcgagaagcgccgcacactgcccgtgtggcagcagaaggaggagttcctccgccgcctccgcgacaaccagaccctcatcctcgtcggcgaaacgggaagcggaaagacaactcagattccacaatttgttcttgagactgaaggcttgggtaaccgttccatggttgcctgcactcagcctcggagggtcgcggcaatgtcagtctccaggcgtgtggcagaggagatggatgttactattggggaagaagtgggttacagtattcggtttgaagattgcagcagccacaaaactgttctcaagtattctgatctaatcctgttgtgttgaacactattgcttcctatcagatatttgacagatggtatgcttctgagagaagcaatggcagacccacttttagagaagtacaaggtgattgttcttgatgaggctcatgagaggactttggcaacagatgttttgtttgggcttctgaaggaggttctaaaaaatagaccggatttgaagcttgttgttatgagtgctactctcgaagcagagaaattccagggttactttagtgatgcaccgttgatgaaggtgcctgggagacttcatccagttgagatattttacacccaagaaccagagagggactatctagaggctgctatcaggacagttgtgcaaatacatatgtgtgaacctgctggtgatatccttgtattccttactggagaagaggagattgaggacgcatgtcggaaaatcaataaggaaatcaataatatgggagatcaggttggcccagttaaagtcgtgcctttatactctacactgcccccagccatgcagcagaagatttttgaacctgctcctgccccattgaaggaacgaggtcctcctggaaggaaaattgttgtgtccaccaacattgctgaaacatccttaactatagatggcatagtttatgtgatagacccggggttttctaaacagaaagtttacaacccaagaataagggtggaatccctcctggtgtcaccaatttctaaggcaagtgctcatcagagagctggtcgtgctggacgaacgcaacctgggaagtgctttaggctatacacagagaagagctttaatgaggatttgcaaccacagacatacccagaaattcttcggtcgaacctggcaaatacagttcttaccttgaagaaacttggaattgatgatttagtgcattttgactttatggatcctccagcaccagaaactctaatgagggccttagaagttttgaactatttggctgcactagatgatgaaggtaatctaacacagttaggtgagatgatgagtgagtttcccctggatccacaaatgtcaaagatgcttgtcatcagtccaaagtacaactgttcgaatgagatcttatcaatatctgccatgctgtcagtctcgcctctttgcatctgctgactaccgtggacttcgtctgttattaccatattctttctctagcacccaattgcttcctccggcctagggaagctcaaaaggctgctgatgaggccaaggctcgatttggccatattgatggggaccatctgacgcttctgaatgtataccatgcatacaagcaaaacaatgaagatccccagtggtgttatgagaactttatcaattccagagcactcaagtctgcagacaatgtcagacaacagcttgttcgcatcatgactagattcaacctcaagatgtgcagcacggatttcaatagccgtgagtactacgtcaatatcaggaaaaccctgcttgcagggtatttcatgcaggtcgctcacctggaacgaactggacattacctgactgtaaaagataaccaggtcgtccatcttcatccctccaattgcatggaccataagccagagtgggtcatctacaatgaatacgtcttgactaccaggaatttcatccgcacagtcaccgatatccgtggggaatggctaattgatattgcgccgcattactatgacctgagcaatttcccgtcatgtgaggccaagcgtgttcttgagaggctgtataacaagcgggagagggaaagagctgcaaatagaggctgaagttgatacttccacaaacctggtgcttcataattccacagcaggttatcacagatggcggacccgtttgtcatatgcatgatgtcttccacagcctgttgcctagtgtttcatcagcatgatcattatgcagacagcctcgagaaatcccttggcagctcaattagttatgatgcagattaattttgtgccattctccttatttttgtatgcgtaagatatttatattttgcgtttctatgtgattaactggttatccttcggttggaatgaaattccactgattttggtttattagcttagctggggttatgtatgcctataatatgcttacttccggttgcaggaggaagggttgaacgaggttggcaccgaagaaaatttggtgtccctttttatttatagatagatagtttctgtgtggtacgccaaggataaggcgatctgaaattggattgcgtctatctaatgtgtaacaaaatggaaacttttttggtgggtgcaatgtagcacttgcctatctgacacttgtgcacgttcgatctccagctaaacagctatgtgagcc

SEQ ID NO: 204682 - DNA, 1089 bp, Zea Mays
atctttattatctgtgattctgcaatccacatgtttgattttttacttagtttctctttgagaccggtcgccatgtttggttagcacatctagaatgcattacaattggaggcaatagctgttcactatccactataacctgaaagcttagctgttcaactgagctttctgattcttccattttttcccattcaagtatatgatattcttgtgtgctattcaatattacaaataacaaatttgcatatgagaataattaagtaaatttggccacctaatcagtaggattgtttggttggaggaatttttgtagcatgtgaaacttgagctaattagaaagcaaccactaccttctcttcagcatgaaaaaatagcttagccatttcttagagttaagcccttagccacttgctggccttatcgtctggaagaagaaatggtactcaactgctggtctctttggcaaatttttctttgcacttttcttgttcgaactggcaatccacaaccaagtaccttgcttgcaccaacaaaagtcccttctactgtagggcaatccatggatttattgcttgtcctgaaatttgatagaggcattcatgatatcagttgctcgttaattccatttgtttcttgttctcttgtgcattgttatgacatatttgcaccttttgcggggaacgatcgaccaacaatggagtggcccactagattaaagatcgctctgggtgctgccaagggtttagctcatcttcatgaagactgtcatccaaagatcatccaccgcgacattaaggcatctaacattcttcttgacttcaaatttgaatataaggttgctgactttggacttgcaaagttcactactgataataacacccatgtttcaacaagagtaatgggaacctttgggtatttggcacctgagtatgcagcgtctggcaagctcacagaaaaatctgatgtattttctttcggagtcatgcttcttgagcttattactgggcggcgaccaattgacacaacccaattggcactgcttgctataagcacatatgtacttccatttgcatgttcaaaaaaaaaaaa

SEQ ID NO: 204683 - DNA, 2115 bp, Zea Mays
cgcaactttcacctgtgaataacgttcttgcataatcgcacgggcgaagccttcagaagcacacgttggttgtgtggctcactggcaccgcgccactcagctcagcaacgatgcaaccacctgacaatggcatctctttgcgcgccctcggcgctcctcgaccacccccatcgccgtcggagacgagacgagcacctatacctagccgtataaaggcggcagggcttagacaagctagtgcaggcttcccgggcccctagattctctctcgcgcttccgctttccttctcctggtcctggccatggcccacgaacgggagccgctcctgcagcaacgacagaccggcgtcggcaatgcctgcggtgccaaggactcgtcctcggcgccggcgccgtcggctgccgcgctgccgtcgctggctaggaccgtgctcaagttcctgatgtgggcggtgttcctcacctgggccgcggggatcttcctctacccgaccaagcccgtgcaggccgtgttcaggaagtgggtcgggctcaccagggactccatgttcggcatcgccgggggtattttcctgaccttcagcgcgccaattctgatcattgcgcttctcgcatatgtgtacatctccttcttcccgagtgagcatgtggtggagaaaaggaagctgcgctcactgagtttcaggctctggactttccctgttcttgtagacggcccctttggagttgtctctgcagttgagttcatcggaattgtcttgtttatagtttttgttgtctactcaatgacctattatgccgtggaagctgtgagccttgtctcgaaatttgatatcccatcaatgactgagagtgaattgatactggatgtcattggcctccgtttaggggcggttgggttgttctgcatgctcttcctcttcctgccagtcgcccgaggctcggttctcttacggcttatcgatattccatttgagcatgctacaagataccacgtctggttggggcatctcacgatggctctatttacattgcatggcttgttctatgtgatctcatggtccatgcaagggcgcctccgtgaagaactgagacagtggaaggaaattggagtagcaaacctgcctggtgtgatcagcttggcagccggcctacttatgtgggtgacatcacttcacccagtgaggaagaggttcttcgagctcttcttctacacccaccagctctacgtcgtcttcgtcgtgttcttggcgtttcatgttggtgacttcatcttcagtatttgtgccggagctgtgttcctcttcatgctcgaccgctttttgaggttctggcaatcaagggccaaagtcgacatcatttcagccgcctgccgcccgtgtgggacggtggagctagtattctcaaaaccagcaagcctccactacaatgctttgagtttcatcttcattcaagtgcgcgagctatcgttcttgcagtggcacccgttcagtgtatcttcaagtcccatggatgggagataccacatgtcggttctcataaaagtactcggcacgtggactgaaaaactgaggagcatcatcaccgatgtacaggagaagaacgggggtgactctgagctgcaatgcgggcgcatgacagcctgcgtggaaggcccatatgggcatgaatcaccctaccacttgatgtacgagaatctcgtcttggtcgcaggaggcattggaatatcgccattcttggcgatcttgagcgacataatccacaggatcgaggagggcaagcaatgcatgcccaagaacgtgctggtcctttggtcagttaagaagtccaaggagctttctctgctgtccgccgttgatgcccagaccatcagctcatctgtctcggacaggttgcaactggatatccaggccttcgtgactcaagaaccccatcctcctttggaggatggcatcgtcggggacgaccagaaagtccctggcatgttcgtcaagaacggtacagccatgtctgggctggtcggcaccggggacaacttctgggcggccatgtacttcctggcgtccacgctcggcttcctcctggcgtacgccctggtgcagaaagagaaagaga

SEQ ID NO: 204684 - DNA, 1989 bp, Zea Mays
cttaatttttggttgacggcatatactgagacagtggaaggaaattggagtagcaaacctgcctggtgtgatcagcttggcagccggcctacttatgtgggtgacatcacttcacccagtgaggaagaggttcttcgagctcttcttctacacccaccagctctacgtcgtcttcgtcgtgttcttggcgtttcatgttggtgacttcatcttcagtatttgtgccggagctgtgttcctcttcatgctcgaccgctttttgaggttctggcaatcaagggccaaagtcgacatcatttcagccgcctgccgcccgtgtgggacggtggagctagtattctcaaaaccagcaagcctccactacaatgctttgagtttcatcttcattcaagtgcgcgagctatcgttcttgcagtggcacccgttcagtgtatcttcaagtcccatggatgggagataccacatgtcggttctcataaaagtactcggcacgtggactgaaaaactgaggagcatcatcaccgatgtacaggagaagaacgggggtgactctgagctgcaatgcgggcgcatgacagcctgcgtggaaggcccatatgggcatgaatcaccctaccacttgatgtacgagaatctcgtcttggtcgcaggaggcattggaatatcgccattcttggcgatcttgagcgacataatccacaggatcgaggagggcaagcaatgcatgcccaagaacgtgctggtcctttggtcagttaagaagtccaaggagctttctctgctgtccgccgttgatgcccagaccatcagctcatctgtctcggacaggttgcaactggatatccaggccttcgtgactcaagaaccccatcctcctttggaggatggcatcgtcggggacgaccagaaagtccctggcatgttcgtcaagaacggtacagccatgtctgggctggtcggcaccggggacaacttctgggcggccatgtacttcctggcgtccacgctcggcttcctcctggcgtacgccctggtgcaggtgtactacgtgaagccgcacaacgtggtggcgtggtggtacctgggcctcctgttcatgctgtgcatggttgccggcgtcgctctacccggcgggctcgtggtcctcctgtggcatctgtcggagaagcagaggttggaggacgacaagtgggacgcctctcagtcaccgcgcgccgagcagacaggccccttggctgcggcgggtggtggtgacgacgacgctgctcccagcgtcagcctcgccgccctgcggacgacccggtacggctgccggccgaacttcgaagcgaggccgggcgaattaaacgaccgaccgatttgtttgtggactaatttcagcggagttcgcggcgttcgcggagcgcgccggggacgcggcggacgtgggcgtgctggtgtgcggaccgcaggggctgcagacgagcgtagcgagggagtgcagggcgcggaacctccgccgcggcggcttgggggcggccaagagcaggagcggcgcggtcttccatttcaacagccacagcttcgacctgtaaactacgtacgtctcgtttggtcggttcaacgatcatcagtacatgttgcacagcacacacgcacagacgatagttggatgtacatgttgatccgtcataatttgatatcgtgtatatatatgtatagctgatagttaatatagttaagttatataagagatgtataaatctgtatgcgtatactataggtgtagcatatgcatgcatgatagaagcacgaaggttaaatgctgacgaatcacgtgaaatcatgtcatgtttcgcgtctaatgcgtgaatttgtatttttcttatgcgtttgtgagtacgtcaaaactacgttgcaacgcaagatttatctttgggcgcgttggtgtgtaaaattgttttggtggactaagttaccatttttcctcttttccgagtcagaaaaaat

SEQ ID NO: 204685 - DNA, 813 bp, Zea Mays
cagaaacgcaggcagcccagcccacgccgcgaggaagcctgaggccgagagaggactgagcaagcgtcccgcgagaaactggtgttccggaccaccacgcggatgggctcgggcgacccggcggccgaccccctttcttccttcctccgccaccccggcgcgttctccttctcccgtcgcgtcgccatggcgcgcgacgccaccgccacatccgtgccagcgctccgcccctggatcgttgacctcctcccgctcctcgtcgtcctcctcatcgccgcccacgtcctcgccctcgctcgccacggacgggtccaggcagcccgcgcggagcaagaagcactaaggggacggcgcccgcggccggatgcttgaaaccagtttgttatttcagtcctgcatccttggcttgttgatctccaaccttccaacgtcagatgatggcgtggaaagttcctgaaagaactaggacagggaaccgatcttatccaatggtttgttcagatgttggtgtcaaaagtgacgatagctgaatagctgatatgtggaaggaggcccttttgagcataaatagttttcggttgctggataggtttgacatctctcgacctctccgtgtaaagaacagtagctagacagatgtgccgtttcatatgttgtggcctggtgggcttttgtaattcatgagcagcattttattactgggcaattaagttaacgaggcatactataatgttatgagagagagctatcgaatatcgtctaagagaaataataaggatctatataaactaatttggttttatgcttgaaaga

SEQ ID NO: 204686 - DNA, 871 bp, Zea Mays
cagaaacgcaggcagcccagcccacgccgcgaggaagcctgaggccgagagaggactgagcaagcgtcccgcgagaaactggtgttccggaccaccacgcggatgggctcgggcgacccggcggccgaccccctttcttccttcctccgccaccccggcgcgttctccttctcccgtcgcgtcgccatggcgcgcgacgccaccgccacatccgtgccagcgctccgcccctggatcgttgacctcctcccgctcctcgtcgtcctcctcatcgccgcccacgtcctcgccctcggttactggatctacaggctcgccacggacgggtccaggcagcccgcgcggagcaagaagcactaaggggacggcgcccgcggccggatgtttggtaccttgcttgttgagcacttgttgaataaaaaaggcttgaaaccagtttgttatttcagtcctgcatccttggcttgttgatctccaaccttccaacgtcagatgatggcgtggaaagttcctgaaagaactaggacagggaaccgatcttatccaatggtttgttcagatgttggtgtcaaaagtgacgatagctgaatagctgatatgtggaaggaggcccttttgagcataaatagttttcggttgctggataggtttgacatctctcgacctctccgtgtaaagaacagtagctagacagatgtgccgtttcatatgttgtggcctggtgggcttttgtaattcatgagcagcattttattactgggcaattaagttaacgaggcatactataatgttatgagagagagctatcgaatatcgtctaagagaaataataaggatctatataaactaatttggttttatgcttgaaaga

SEQ ID NO: 204687 - DNA, 861 bp, Zea Mays
ctcgtgcacgcgcagagtaatcggctcagaaacgcaggcagcccagcccacgccgcgaggaagcctgaggccgagagaggactgagcaagcgtcccgcgagaaactggtgttccggaccaccacgcggatgggctcgggcgacccggcggccgaccccctttcttccttcctccgccaccccggcgcgttctccttctcccgtcgcgtcgccatggcgcgcgacgccaccgccacatccgtgccagcgctccgcccctggatcgttgacctcctcccgctcctcgtcgtcctcctcatcgccgcccacgtcctcgccctcggttactggatctacaggctcgccacggacgggtccaggcagcccgcgcggagcaagaagcactaaggggacggcgcccgcggccggatgtaaggcttgaaaccagtttgttatttcagtcctgcatccttggcttgttgatctccaaccttccaacgtcagatgatggcgtggaaagttcctgaaagaactaggacagggaaccgatcttatccaatggtttgttcagatgttggtgtcaaaagtgacgatagctgaatagctgatatgtggaaggaggcccttttgagcataaatagttttcggttgctggataggtttgacatctctcgacctctccgtgtaaagaacagtagctagacagatgtgccgtttcatatgttgtggcctggtgggcttttgtaattcatgagcagcattttattactgggcaattaagttaacgaggcatactataatgttatgagagagagctatcgaatatcgtctaagagaaataataaggatctatataaactaatttggttttatgcttgaaaga

SEQ ID NO: 204688 - DNA, 1061 bp, Zea Mays
cggaagctgcggtttgagctggtcgctcgcacagagccagggccaagggagagaccaatgcagtgctttatcaagaggaataagaacaactctacattctacctctaccttggcttcacaagttcacctgtggataaagggaagtttctcatggctgctagaagatttaggcgtggtccccataccgagtacattatatctcttgatgcagaagacttatcacaagggagcaatgcatacatggggaaactgagatctgatttctgggggacaaacttcaaaatatatgatagcaagccaccatatgatggtgctaaagcatcaagtagtcgatctagtcgtcgtttcggaagcagaaggattagtccccaggtatcggctggcaattatgaagttggacaggtttcatacaaatacaacttgctcaaatccagaggccccaggagaatgtattgcactctcgaatgcccttcagcccaagagacttgggaaaactcactcaagacaaagttcaggcgccccctgggccccacaactttacgaaataaagcaccccgctggcatgagcacctgcaatgctggtgcttaaacttccatgggcgggtaacagttgcatcagtcaagaatttccagcttgtggctgctgccgaccccagtgagcctactaccaacgtggatgatgaaacggttctgctgcagtttggtaaggtcgatagcgatatgttcacaatggattaccggcaaccactctccgcgtttcaagcatttgccatcagcctcagcagctttgggaccaagctagcctgtgaatagcgatgcagtttgatgctcttcgtgtggctatatggtttgtgttggtggttgcttgcttgtttcttgttgttacgatgtgatccgttcttcgttttagttgagtatttatgtactatttgtaccacaagagatgtaataaactattgtattgtcaaacggatttgttcaaggaaattatgtgtaatgaacttttgctctagttccatgcaaaagacaaaaaaaaatgctaagcaacagtaagaaaaata

SEQ ID NO: 204689 - DNA, 1631 bp, Zea Mays
acggactctacggtgaccacggtacttgtcagctacagcctacagttccgcggttttgagtaaacaagcgagcgaaaaaataagaagagagagaaaaagaaaaaggagaggcccgcgactgtagtgggattgtgggaagatgcctcgggatggcgcgcaggcggcgccgccaccggagcgcggcgagatggacgaggtggtagaggcggacccggatacggaggcggaggatcaggaggagaggtgggcgaggctgctgccggagctgctctccgacgtggtgcggcgcgtcgaggcgtccggcggcgagcggtggccggcgcggaaggacgtcgtctcctgcgcctgcgtgtgccgccggtggcgggaggccgccgtctccgtcgtgcgtccgccggcggagtccggcaagatcaccttcccctcctcgctcaagcaggtcgattgcatggcttcccttatatggcgtcatcagcggttttgatacgtaccggccattcagatatttaggatatagtttgagaagtttcctggccaattcagtgtcgtagtgttttttatttgacatctgtgtacctaaatcttacaccatttctcaaaacacagccagggccaagggagagaccaatgcagtgctttatcaagaggaataagaacaactctacattctacctctaccttggcttcacaagttcacctgtggataaagggaagtttctcatggctgctagaagatttaggcgtggtccccataccgagtacattatatctcttgatgcagaagacttatcacaagggagcaatgcatacatggggaaactgagatctgatttctgggggacaaacttcaaaatatatgatagcaagccaccatatgatggtgctaaagcatcaagtagtcgatctagtcgtcgtttcggaagcagaaggattagtccccaggtatcggctggcaattatgaagttggacaggtttcatacaaatacaacttgctcaaatccagaggccccaggagaatgtattgcactctcgaatgcccttcagcccaagagacttgggaaaactcactcaagacaaagttcaggcgccccctgggccccacaactttacgaaataaagcaccccgctggcatgagcacctgcaatgctggtgcttaaacttccatgggcgggtaacagttgcatcagtcaagaatttccagcttgtggctgctgccgaccccagtgagcctactaccaacgtggatgatgaaacggttctgctgcagtttggtaaggtcgatagcgatatgttcacaatggattaccggcaaccactctccgcgtttcaagcatttgccatcagcctcagcagctttgggaccaagctagcctgtgaatagcgatgcagtttgatgctcttcgtgtggctatatggtttgtgttggtggttgcttgcttgtttcttgttgttacgatgtgatccgttcttcgttttagttgagtatttatgtactatttgtaccacaagagatgtaataaactattgtattgtcaaacggatttgttcaaggaaattatgtgtaatgaacttttgctctagttccatgcaaaagacaaaaaaaaatgctaagcaacagtaagaaaaata

SEQ ID NO: 204690 - DNA, 1335 bp, Zea Mays
agtggcccacgaacacccccagctcctcctcccagtcccactggcccgagcgcgaccccacgttggataagccaagtagagtatcgtggcaggctacacgtgtcctacgaaaatctgccaaatccgggcggtgactggcagccagcgggccagctttgcatcgcagccaggccaggccaggcccaggcggaccgtcgccgtcgtccgtccagtgaagcttttactataaagcccctgctagaccgctagaaaccacacgtccgcccctgccagtttgcgttcgccacccgtccaaaaccccccaaccaaagcccgctccggcagcccccaccccaccatcgcgtcaatggcggcgccgcctgtccagcctgtgccaaccgcggcggcggcggcggcggctgtgaacggggacgcgttccgtctgggcttcgtcggcgcgggcaacctggccgagagcatcgcccgcggcgtggcggcgtcgggcgtcctcccggcctccgccatccgcaccgcgccccaccgccgccccgagcgcggcgaggccttcgcgtccttcggcgcgtgcttgctccaaaccaatgcccatgttgtggacgacagcgatgtgatcgtcatctccgtgaagcctcagatcgtgaagcaagttctacttcagctgaggccacggctgtcagaaaaaaagcttctcgtgtccattgctgccggcatcaagatgcaagatttgcaggattggtctggtcaacgacgtattattagagtaatgcccaacaccccttcagctgttggacaagctgcatcagtcatgtgtttgggagagatggctactcaggatgatgaaaaccgtgtaagaaaactgttcagtgccattggaaaagtctggacagctgaagagaaatattttgatgctgtaactggtctgagtggtagtggcccggcctatatcttcctagcaatagaggccatggctgatggtggagttgctgctgggcttcctcgggaccttgcccttggtcttgcatctcaaacagttcttggtgctgcaactatggtgagccagacaggcaaacatccagggcaactgaaagatcaggttacttctccagcaggtactaccattgccgggattcaggagctcgagaagggcgcattccgtggaacgctgattagtgctgttgttgctgccgcaaagcgctgccgcgaactgtcatagagttcgaaacaaggctgcattttgttgatatacatgcgttggtatgcaaggtgcaaatcttctggaatagtagactaataatgtactgggtggcttcagaatcatgtgatatgataagtaaagaa

SEQ ID NO: 204691 - DNA, 2180 bp, Zea Mays
ctgaggcccgcttgactcgcagcggcaggggcggacgacgcgcgcacgacggcttggctcccgcctccccgcgcgcggcaagccggcaccgcaatggcgctccggaccttccctccccgcgtcctcctcctctccgtcgtcctcctcgctgcccccgccgccggcgccggcactggttcggagttcgacgacggcacctcgcccaagttccccggatgcgacaacacgctgcagaaggtgaaagtgacgtactgggtggacggcgacgagcggagcagccttacggggatcagcgcgaggttcggcgcggtcctgccggacgcggcgcccgacgacgagaagcagcgggccgccgtgcccagccccgagagcggctgcgccaagtcgtcgacgccgctcgcgggctccgtcgccgtggctgtgcgcggggagtgcacgttcatcgagaaggccaaggcggccgaggccggcggcgccgtggcgttgctcctcgtcaacgacgaggacgacctgcagaggatggtctgctccgacaaggactcgccgcccaacatcggcatccccgtcgtcatggtgtccaagtccgccggcgacaaggtgcagtcggccatcggggacgggtccaaggtcgacattctcatgtacgcgccgctgaagccgtccttcgatggcgccatacctttcctctggatgatggccgtcggcacggtggcctgcgcttccgtgtggactgtcgtcgtcgtcggagaagagcctaccaagcagggcgacgtctccctgggtggggaggagaaccccgacgccgaggtcgtggagctgcaagccaatacggcgctcgtgttcatcgtcacgtcctcgctcgtccttctcttcctcttcttcttcaactccaactggtccgcctggctcctggtttgcctcttctgcctcgggagtctccagggtatggaattcgtggtatcttctctcgttgtcaggtgtgtgcacctacgtactgcatgataactgcctgtttgctctgcaattcttgggcctagccagttcttgcgtcgtctgcctgcgtgttgcagactatgccagcggtgtcgcgaggccaaagtgaagcttcctgctctaggaaacgtgaaggtggtcacgctagtggtcctgccgctggccttcatcttcgccgtcacctgggctgcacaccaggactcgccggttgcttgggttggtcagaacctcatgggcatctgcatgatgattctagtactgcaagtggtgcacatgccaaatataaaagttgcgtcggcgctccttgtctcggcctttttctacgacattttctgggtcttcatatcacccctcatattcaagaaaagcgtcatgatcacagttgctcgtggcagcgatgacgggccgagcctccccatggtactgaagatgccgaaggagttcgattcgtggaatgggtacgacatgattgggttcggggacattctcttccccggactgcttgttgctttcagtttcagaacacacggcaaggacttgacagatggatacttcctctgcttaatgattggttatgccttcggattgtcatgcacatacgttggcttgtacctgatgaacagcgggcagccagctctgctctaccttgttccttcaacactaggagttatcgtcctgcttggagcgaggaggggggagctcggtcagctctggaacgccaaggtgtagcctgcctgggaggcccgtgcatatagctgatacgatgacactggttgcaggcttcaaatgggctttggtttagctagacatgcatctgatggttttttggtgaaattatgccaagcatcagcatgatccatggttaggaaatttctttgttattagagtacacaacacacaccacacatacgaaggctggttggtttgttactagcctgctgctgtagggcacactgcacgtcaaaatccctagcgtgatgcaaatttcagcaaaatttatagacagatatgcatcaataatacctactatatcaaagtagtttttattgagcctatcagaaaatatatgtttagttgtgtgtttatttggttagtaagagcctctagctagatcgggtggtttgagtagcacttctaggttgagttttttttttaaaaaaaatctttttatcaaaatacagtggtag

SEQ ID NO: 204692 - DNA, 1167 bp, Zea Mays
aagcccctcctcactccccaagtcctcccgtgtcatcgccattcacctccagccaggctccggaaccttatcaccaaaatcctcgtcccctacccgaggcgagcatcatggcggccgcgctcttctccagctcgctctcgccccgcttcctcgccctatcctccccgaagccggccgcgcccgcggccacagccttcctccccttcaggctgccgccgcgcgctgtctcggcgccgggtaggcgggtcttcgagcccgtcgccgtcgcggtgtcgtcggagtacaagacggagggcgcggagcaggagggggaggatggatccgaggagttctccgaggacctgaagctgttcgtcggcaacctaccgttcagcgtcgacagcgcgcagctcgcagggctcttcgagcaggccggctccgtcgagatggtcgaggcatttcaaggaagacaactgagggtgaactgcgggccaccgccacctagagatgaatccacaccaagagcaccaaggggtggtggtggcggcggcggcggcggctttgtcgattcagctaacaaggtctacgtggggaaccttgcgtggggcgttgacaactcgactctggagaacctgttcagtgagcaagggcaagtgcttgatgctaaggtcatctacgacagggatagcggcaggtcaagggggtttggtttcgtcacctatggctccgcccaagaggtcaacaatgccatatcaaacctcgatggcatcgacttggatggtagacagatccgagtcacggctgcggagtcaaagccgagacgtcaattttgagattattttcttatgggggtttagaggctgatagtgtgtttcaaaacttttagtttgtagtgtctattctttcctccatatgagtaccaagaagatgataatgagagactggctgtgaaatggctgtatacaggaagacttttccccgctggaaagatgcatttatttgtttcagctgtaccacaaaattggcagttcaaatttcccttccatctactcactttattttaaattataagagaatttagcttttctaaatactagcttttgctatgtgtacgccatatgtagatgtataggaaaaacaatgtttctgagatatttaagaaggacaacaactaatatgccagcaatc

SEQ ID NO: 204693 - DNA, 1553 bp, Zea Mays
aagcccctcctcactccccaagtcctcccgtgtcatcgccattcacctccagccaggctccggaaccttatcaccaaaatcctcgtcccctacccgaggcgagcatcatggcggccgcgctcttctccagctcgctctcgccccgcttcctcgccctatcctccccgaagccggccgcgcccgcggccacagccttcctccccttcaggctgccgccgcgcgctgtctcggcgccgggtaggcgggtcttcgagcccgtcgccgtcgcggtgtcgtcggagtacaagacggagggcgcggagcaggagggggaggatggatccgaggagttctccgaggacctgaagctgttcgtcggcaacctaccgttcagcgtcgacagcgcgcagctcgcagggctcttcgagcaggccggctccgtcgagatggtcgaggttgtatatgacagaatgactggacggagccgaggatttggattcgtgacaatgtcttcggccgaagaagccgaagctgctgtcgagcagttcaacggttatgtgaggatactttcactcttttaagctaactgtctcttttggtatgttactgaggaaaaatatgtggcagcagtgctgataatgccagttcttaggattttcggattcggggtttgcactaaagcttgcattgctcggaaacctgacatcggaatcataccttctatccaatcattggtcatagcttctggctagctgtttgggactgaattgcttctatcgagtgcatagtgcgtgacattgcagataagactattgactaattaacctcgcctcgcaaacaggcatttcaaggaagacaactgagggtgaactgcgggccaccgccacctagagatgaatccacaccaagagcaccaaggggtggtggtggcggcggcggcggcggctttgtcgattcagctaacaaggtctacgtggggaaccttgcgtggggcgttgacaactcgactctggagaacctgttcagtgagcaagggcaagtgcttgatgctaaggtcatctacgacagggatagcggcaggtcaagggggtttggtttcgtcacctatggctccgcccaagaggtcaacaatgccatatcaaacctcgatggcatcgacttggatggtagacagatccgagtcacggctgcggagtcaaagccgagacgtcaattttgagattattttcttatgggggtttagaggctgatagtgtgtttcaaaacttttagtttgtagtgtctattctttcctccatatgagtaccaagaagatgataatgagagactggctgtgaaatggctgtatacaggaagacttttccccgctggaaagatgcatttatttgtttcagctgtaccacaaaattggcagttcaaatttcccttccatctactcactttattttaaattataagagaatttagcttttctaaatactagcttttgctatgtgtacgccatatgtagatgtataggaaaaacaatgtttctgagatatttaagaaggacaacaactaatatgccagcaatc

SEQ ID NO: 204694 - DNA, 6633 bp, Zea Mays
ccgctccgccgctccgctcccgtcgcgactccaaactcactccatatttcgttaccatttcccacctccagaaagtgtttttttgcctttttatcttcgctcgttttccttcccccgctctctctccaccccctccgtcctccgatccaaactaccgacgaacgccaccacccgaattcgaaaccctaggcggccgctgtagaacacgtgaggctgtagtgcctcttgttcggtggagccggcccgcggcagccggctatgtcgacggaggacgagaagctcctcaaggaggcgaagaagttgccgtgggacgagaggttgcagcataagaactggaaggtgaggaacgacgcaaacatcgacctcgccgctctatgcgactccatcaccgaccctaaggatgcccgcctccgcgagttcgggccgttgtttaggaagacggttgcagattccaatgcgccggtacaggagaaggcgctcgatgcccttctcgcgttccagcgagctgctgacgccgatgcatcaagatacgcgaaggaggtctgtgattcaatcgtggccaagtgcctcactggccgaccaaagactgtcgagaaagctcaagctgcattcctcctatgggtggaactggaggcatcagaggtcttccttgaagctatggagaaggctgtgaagaacaaagtggctaaagcagttgtacctgctattgatgtgatgtttcaagcactaagcgaatttggaactaaggtagtgccacccaaaaagattctgaagatgctacctgagctgtttgaccatccagaccagaatgtccgggcttcttctaagggtttgacactagagctttgtcggtggattggcaaagaccctgtaaagtctattttatttgagaagatgagagatactatgaaaaaggagttggaagcagagttggcaaatgtgtccggacttgctaagccaactcgaaaaataagatccgaacaagaaaaggaacttgaggaggagtctgtgcccgagacaagcggggctaacacttctgaagaggcagcgacagatgcccctgtggagatcgatgaatatgaccttgttgatcctgtagacattttaaccccactagaaaagtctggattctgggacggtgtgaaagcaacaaaatggtctgagagaagggatgctgtggcagaattaaccaagcttggttcggcaaaaaaaattgctcctggtgattttcatgaaatttgccggacactgaagaagctcatcacagatgttaatttggctgtttcggtggaagctactcaggcaattgggaatttagctagaggtttaagagcccaattttctggaaatgcacgaatgctccttccggttttacttgaaaaattgaaagaaaaaaagccaacaatgacagaagcactatctcaaacacttcaagcgatgcacaagtctggttgttttacacttattgatgtgattgaagatgttcgtgcggcagtaaaaaacaaggtgccccttgttcgttctttaacgctgacctgggttgcattttgcattgaaaccagcaataaagcaactgtactaaagttgcacaaggaatatgttcctatctgcatggagtgcttgaatgatggtactccagaagtacgagatgcatccttttctgttttgactgccattgccaagatggttggtatgaaaccattggaacgatccttggagaaattagatgatgtgaggaaaaagaagttatcagatatgattggttcttccagtgacagtgttttgagttcaggaacagctccaatcacaacatcaggagcagccacatctgctcgcggggttgcagatagcatgtcaatgaagagatctgctgcaagcatgcttagtggaaagaagcctgtccaggcagcggctgctaccaagaaatctggaccgtccaaatccactgcagcaaaaaagacagatggtgggtcacagtctaaggcatcagctgctcttgagattgaagacgttgagccggcagaaatgagtttcgaggaaatagaagagaggttaaagtctgttgtgaaagctgagacaatttcccagctaaagagctctgtctggaaagagcgtcttgaagctattggcgtactcaaacaagaggtggaaaatcttacggaacttgataagtctgctgaacttctgattcgtttgttgtgtgctgtgcctggatggagcgaaaagaatgttcaggtacaacagcaagttatagaggtcaacacctatattgcctcgactgtaaacaaatttccaaagcgatgtgtggttttatgccttcttggcgtaagtgaaagggttgctgatataaaaacacggacctctgcaatgaaatgtctcactgccttctgtgaggcagtgggtcctggatttgtgtttgagaggctttacaaaataatgaaggagcacaagaatcccaaggttcttagtgagggtattctttggatggtctctgctgtggaagactttgggatctccaatttaaagctaaaggacatgattgatttttgcaaagacaccggtcttcagtctagtgctgctgtaacaagaaatgctactataaaattaattgggatgctacataagtttgtgggcccagatattaaaggctttttaagtgatgttaaaccagcacttctaagtgccctcgatactgaatatgagaaaaatccttttgagggtgctgctgctgctgctccgaagagaacagttcgagttctggataccgcatcttctgtatctgctggcttgtttgatgggttgccacgagaagacattagtgctaagataacacctactttactaaaaaatctgggcagtccggactggaaggtacgattggagtccatagatgcagtcaccaaaattgtggaggaggctaataaacgtatccagcctacaggaacagctgacctgttcagtgcacttagaggccgtctttatgacagcaacaaaaatttagtaatggcaaccttgtccactattggtggccttgcatatgctatgggaccttctgttgaaaagtcaagcaagggtattttggcagatgtgctgaagtgtcttggtgacaataagaagcacatgcgagaatgcacattgactgctctagattcatggattgctgcagcccaacttgacaaaatggttccatatattatagtgtctttgggtgatcagaaaacaggttcagaagggcgaaaagatctctttgattggttgtctaagcacgtttctaaaatgagtgatccatctgaggctttgcctttgttgaagccatctgcatcttctttgatggataaatcttctgaagtccgcaaagctgctgaatcctttatgaatgaaattctcaggatctgtggccaagaagtggttggaaggaacttgaaagatttgccatcacctactttggctattgtatcagaaaggctgaaactgtctactgtacatgaaggattttctgaatctgttaagatggtgacaacaagcatgagtttgccatcaaaagctggtttgaagaacaataaacatggtcttaatgatcgtggttctaatgtgggcaaacttgtgtcccaaagaggacttcccgccagggcatctgttactatggtttccacccaagaccctgcacaatcccaagcattatttaacataaaggactcaaacaaggaagagcgggagagacgtgttttggtaagaaaattcaagttcgaagaaccacgtcgtgaacagatagatgaactaaagattgatttgtttaagcatttccgagaagatgtaagcctgcgattatggaactcagactttaagaggcaaatcgatggtattgaattgctacaaaaggcacttccttcaagttggaaagaagtgattgaacttcttgacatattattaaggtggtttgtcttacgcttttgtgaatcgaacacaacatgtttgttgaaggttcttgactttcttcctgagctttttgatattttaaaagaccagtcatacatgttgacagaagctgaagctgcaatttttcttccttgcctcatagagaagtctggtcataacattgaaaaagtcagggaaaaaatgggggagctgataaagcaaatgatcaacatttactctcttcccaaactaattccctatatacttgaggggctccgctccaagaataaccggacaaggatagaatgtgttgatattgttggatatttcattgaccatcatgggaccgaggttggtgggttgatgaaaaacttgccatctgttgcagcactgacagcagagcgtgatggtgagattaggaaagctgcccttaatacgcttgcaacagcctacaagaaccttggggatgatgtatggcgatatgttggaaaactctcagatgcccaaagaagcatgctcgatgataggtttaaatggaaggcaagagaaatggataaaaggcgagaaggaaggcctggtgatgcacgagcagctctgaggcgttcagttagggagaatgggtctgatatagcagaacaaagcggagaagtagtgtcccgtccagtggctggatcaatgatctcaagggacttcggatatgcagatgctcatatggataggcacatggtacctaggcagattccaagtacaagtggtcctgtggactggcgcgaagctctcgagatagttgcattaggtttgcctgagcagtccgttgaaggtatgaaagttatatgccatgagctaacacaggcagctgaccctgaaagcacattgcttgaagatcttattaaggaagctgacagattagtgtcatgcttggctgttatggttccgaaaaccttcaattttagcttatctggtgcttcttcaaggtcttgcaaatatgtgttaaacacactcatgcagacatttcagatcaaacgtcttgctcatgctgtgaaggagggtacccttgacaaccttattacggagttacttctttggcttttagatgaaagggttcctcttatggatgatggcagccaattactcaaagcactaaatgttttgatgcttaaaatcttggataatgctgagagaacatcctcgtttgttgtgctgattaatttgctgaggcctttggacccttcaagatggccatcgcctacaccaacggagtctcttgctgtaaaaaatcagaagttttcagacttagttgtcaaatgtttaattaagttgacgaaggttcttcagagtacaatatatgaagttgaccttgatcgaattcttcagagcatccatatttatttacaagaacttgggatggaagaaatacggagaagggctggtgctgatgacaagccattgagaatggtcaaaactgtcttgcatgaacttgtgaagcttcggggaacggcaataaagggtcacctttcaatggttcctatagatgctgaacctcagccaataattctagcatacattgatctcaatctccagacccttgcagccgctagaatgttgacgccatcggggcctatgggtcaaactcactggggtgatgctgcatcgaacaatccaaatccatctactcactcagctgacgcgcaattgaagcaagagcttgctgctattttcaagaaaattggtgacaagcaaacatgtaccattggcctctatgaactgtatcggataactcagctctacccaaaggttgatatatttgctcagcttcagaatgctagtgaagcgtttagaacctatatcagagatggcctagctcaggtggagaagaatgcagcagctggaagaatgccttccagtcttccattatccacgccgcccccaatagcagcaatacccaatccaaaatttgcaccatcccctgttcacacaaaatcaatcggtaaaacagattataacgaagataatgccagtggtgagacacaacccttcagaggtcaaggtgccatcaccgaccaacaaactgatagataccatacctcaggcacgttggatgctcttagggaaaggatgaaaagcattcaagcggcagctataggtcattttgacggtgctcaggctcggccgttggcaagtatgaacggaagtaatatggtgcatgggggaactcgattggacggtgaaccccaacaacgaagtaatataccacccatggatgagcgagctctatctgggctgcaagcacgaatggagagactaaagagtgggtctatggaattacaatagatacgataacaattctgagaaataccaactattgtagttctttgtaaatttgaggcatagtgatggtgttctttgtagataggtatttgaatgtcggaagaactatatggcacggggtcaacatttcgtaacccatgtgtcaagccattcttgcagagcctttggatgcagttttagataagaggtagccaaatgttttccttgttgctactccaagggctaattagtgttgacacattttgccgtactgtattggttttcctgtggtgtacagcaatagaatttttcattctaaattaactggaaatgttacttgtgaaatatatggtttttgaaatgcatatccgtatggtttcacatttatttgattatctgaatgggattttg

SEQ ID NO: 204695 - DNA, 6405 bp, Zea Mays
tctccaccccctccgtcctccgatccaaactaccgacgaacgccaccacccgaattcgaaaccctaggcggccgctgtagaacacgtgaggctgtagtgcctcttgttcggtggagccggcccgcggcagccggctatgtcgacggaggacgagaagctcctcaaggaggcgaagaagttgccgtgggacgagaggttgcagcataagaactggaaggtgaggaacgacgcaaacatcgacctcgccgctctatgcgactccatcaccgaccctaaggatgcccgcctccgcgagttcgggccgttgtttaggaagacggttgcagattccaatgcgccggtacaggagaaggcgctcgatgcccttctcgcgttccagcgagctgctgacgccgatgcatcaagatacgcgaaggaggtctgtgattcaatcgtggccaagtgcctcactggccgaccaaagactgtcgagaaagctcaagctgcattcctcctatgggtggaactggaggcatcagaggtcttccttgaagctatggagaaggctgtgaagaacaaagtggctaaagcagttgtacctgctattgatgtgatgtttcaagcactaagcgaatttggaactaaggtagtgccacccaaaaagattctgaagatgctacctgagctgtttgaccatccagaccagaatgtccgggcttcttctaagggtttgacactagagctttgtcggtggattggcaaagaccctgtaaagtctattttatttgagaagatgagagatactatgaaaaaggagttggaagcagagttggcaaatgtgtccggacttgctaagccaactcgaaaaataagatccgaacaagaaaaggaacttgaggaggagtctgtgcccgagacaagcggggctaacacttctgaagaggcagcgacagatgcccctgtggagatcgatgaatatgaccttgttgatcctgtagacattttaaccccactagaaaagtctggattctgggacggtgtgaaagcaacaaaatggtctgagagaagggatgctgtggcagaattaaccaagcttggttcggcaaaaaaaattgctcctggtgattttcatgaaatttgccggacactgaagaagctcatcacagatgttaatttggctgtttcggtggaagctactcaggcaattgggaatttagctagaggtttaagagcccaattttctggaaatgcacgaatgctccttccggttttacttgaaaaattgaaagaaaaaaagccaacaatgacagaagcactatctcaaacacttcaagcgatgcacaagtctggttgttttacacttattgatgtgattgaagatgttcgtgcggcagtaaaaaacaaggtgccccttgttcgttctttaacgctgacctgggttgcattttgcattgaaaccagcaataaagcaactgtactaaagttgcacaaggaatatgttcctatctgcatggagtgcttgaatgatggtactccagaagtacgagatgcatccttttctgttttgactgccattgccaagatggttggtatgaaaccattggaacgatccttggagaaattagatgatgtgaggaaaaagaagttatcagatatgattggttcttccagtgacagtgttttgagttcaggaacagctccaatcacaacatcaggagcagccacatctgctcgcggggttgcagatagcatgtcaatgaagagatctgctgcaagcatgcttagtggaaagaagcctgtccaggcagcggctgctaccaagaaatctggaccgtccaaatccactgcagcaaaaaagacagatggtgggtcacagtctaaggcatcagctgctcttgagattgaagacgttgagctattggcgtactcaaacaagaggtggaaaatcttacggaacttgataagtctgctgaacttctgattcgtttgttgtgtgctgtgcctggatggagcgaaaagaatgttcaggtacaacagcaagttatagaggtcaacacctatattgcctcgactgtaaacaaatttccaaagcgatgtgtggttttatgccttcttggcgtaagtgaaagggttgctgatataaaaacacggacctctgcaatgaaatgtctcactgccttctgtgaggcagtgggtcctggatttgtgtttgagaggctttacaaaataatgaaggagcacaagaatcccaaggttcttagtgagggtattctttggatggtctctgctgtggaagactttgggatctccaatttaaagctaaaggacatgattgatttttgcaaagacaccggtcttcagtctagtgctgctgtaacaagaaatgctactataaaattaattgggatgctacataagtttgtgggcccagatattaaaggctttttaagtgatgttaaaccagcacttctaagtgccctcgatactgaatatgagaaaaatccttttgagggtgctgctgctgctgctccgaagagaacagttcgagttctggataccgcatcttctgtatctgctggcttgtttgatgggttgccacgagaagacattagtgctaagataacacctactttactaaaaaatctgggcagtccggactggaaggtacgattggagtccatagatgcagtcaccaaaattgtggaggaggctaataaacgtatccagcctacaggaacagctgacctgttcagtgcacttagaggccgtctttatgacagcaacaaaaatttagtaatggcaaccttgtccactattggtggccttgcatatgctatgggaccttctgttgaaaagtcaagcaagggtattttggcagatgtgctgaagtgtcttggtgacaataagaagcacatgcgagaatgcacattgactgctctagattcatggattgctgcagcccaacttgacaaaatggttccatatattatagtgtctttgggtgatcagaaaacaggttcagaagggcgaaaagatctctttgattggttgtctaagcacgtttctaaaatgagtgatccatctgaggctttgcctttgttgaagccatctgcatcttctttgatggataaatcttctgaagtccgcaaagctgctgaatcctttatgaatgaaattctcaggatctgtggccaagaagtggttggaaggaacttgaaagatttgccatcacctactttggctattgtatcagaaaggctgaaactgtctactgtacatgaaggattttctgaatctgttaagatggtgacaacaagcatgagtttgccatcaaaagctggtttgaagaacaataaacatggtcttaatgatcgtggttctaatgtgggcaaacttgtgtcccaaagaggacttcccgccagggcatctgttactatggtttccacccaagaccctgcacaatcccaagcattatttaacataaaggactcaaacaaggaagagcgggagagacgtgttttggtaagaaaattcaagttcgaagaaccacgtcgtgaacagatagatgaactaaagattgatttgtttaagcatttccgagaagatgtaagcctgcgattatggaactcagactttaagaggcaaatcgatggtattgaattgctacaaaaggcacttccttcaagttggaaagaagtgattgaacttcttgacatattattaaggtggtttgtcttacgcttttgtgaatcgaacacaacatgtttgttgaaggttcttgactttcttcctgagctttttgatattttaaaagaccagtcatacatgttgacagaagctgaagctgcaatttttcttccttgcctcatagagaagtctggtcataacattgaaaaagtcagggaaaaaatgggggagctgataaagcaaatgatcaacatttactctcttcccaaactaattccctatatacttgaggggctccgctccaagaataaccggacaaggatagaatgtgttgatattgttggatatttcattgaccatcatgggaccgaggttggtgggttgatgaaaaacttgccatctgttgcagcactgacagcagagcgtgatggtgagattaggaaagctgcccttaatacgcttgcaacagcctacaagaaccttggggatgatgtatggcgatatgttggaaaactctcagatgcccaaagaagcatgctcgatgataggtttaaatggaaggcaagagaaatggataaaaggcgagaaggaaggcctggtgatgcacgagcagctctgaggcgttcagttagggagaatgggtctgatatagcagaacaaagcggagaagtagtgtcccgtccagtggctggatcaatgatctcaagggacttcggatatgcagatgctcatatggataggcacatggtacctaggcagattccaagtacaagtggtcctgtggactggcgcgaagctctcgagatagttgcattaggtttgcctgagcagtccgttgaaggtatgaaagttatatgccatgagctaacacaggcagctgaccctgaaagcacattgcttgaagatcttattaaggaagctgacagattagtgtcatgcttggctgttatggttccgaaaaccttcaattttagcttatctggtgcttcttcaaggtcttgcaaatatgtgttaaacacactcatgcagacatttcagatcaaacgtcttgctcatgctgtgaaggagggtacccttgacaaccttattacggagttacttctttggcttttagatgaaagggttcctcttatggatgatggcagccaattactcaaagcactaaatgttttgatgcttaaaatcttggataatgctgagagaacatcctcgtttgttgtgctgattaatttgctgaggcctttggacccttcaagatggccatcgcctacaccaacggagtctcttgctgtaaaaaatcagaagttttcagacttagttgtcaaatgtttaattaagttgacgaaggttcttcagagtacaatatatgaagttgaccttgatcgaattcttcagagcatccatatttatttacaagaacttgggatggaagaaatacggagaagggctggtgctgatgacaagccattgagaatggtcaaaactgtcttgcatgaacttgtgaagcttcggggaacggcaataaagggtcacctttcaatggttcctatagatgctgaacctcagccaataattctagcatacattgatctcaatctccagacccttgcagccgctagaatgttgacgccatcggggcctatgggtcaaactcactggggtgatgctgcatcgaacaatccaaatccatctactcactcagctgacgcgcaattgaagcaagagcttgctgctattttcaagaaaattggtgacaagcaaacatgtaccattggcctctatgaactgtatcggataactcagctctacccaaaggttgatatatttgctcagcttcagaatgctagtgaagcgtttagaacctatatcagagatggcctagctcaggtggagaagaatgcagcagctggaagaatgccttccagtcttccattatccacgccgcccccaatagcagcaatacccaatccaaaatttgcaccatcccctgttcacacaaaatcaatcggtaaaacagattataacgaagataatgccagtggtgagacacaacccttcagaggtcaaggtgccatcaccgaccaacaaactgatagataccatacctcaggcacgttggatgctcttagggaaaggatgaaaagcattcaagcggcagctataggtcattttgacggtgctcaggctcggccgttggcaagtatgaacggaagtaatatggtgcatgggggaactcgattggacggtgaaccccaacaacgaagtaatataccacccatggatgagcgagctctatctgggctgcaagcacgaatggagagactaaagagtgggtctatggaattacaatagatacgataacaattctgagaaataccaactattgtagttctttgtaaatttgaggcatagtgatggtgttctttgtagataggtatttgaatgtcggaagaactatatggcacggggtcaacatttcgtaacccatgtgtcaagccattcttgcagagcctttggatgcagttttagataagaggtagccaaatgttttccttgttgctactccaagggctaattagtgttgacacattttgccgtactgtattggttttcctgtggtgtacagcaatagaatttttcattctaaattaactggaaatgttacttgtgaaatatatggtttttgaaatgcatatccgtatggtttcacatttatttgattatctgaatgggattttg

SEQ ID NO: 204696 - DNA, 861 bp, Zea Mays
ggaagagagattgcgcgacgggactggggtcatgatgatgatgatgatggggattttcagcgtagcaggcgctgcggcaaccgccatcatcgcagcttgtctggttgggcgcgctcgtcgcgatgtcgagggggcatggacgactgttacagttccaatgacaagcagcgacacttaactccctttcgtcgccatggctgggagtcgaagctgtcttctcgctgggtacccaaggtgaaggtccgatctgtttcttttgcagaccccatcgttaccgctgtttggccgcaggaggataaatgtgggcaagctgaggatattggtgacaggtctggttcgatgggcgctgttattctggaacctgtgcgcagccctgctacaaccacatgcaagctggcgaggcatttctctaggcctttgaccaaggaacaaatggaggcaattatggagctggcaactctggggaaggaaaaggaagggatcaagaagaagggcagcaaggtgacgcccctcaaggctcctattatcgaggcttctgagatgctataagttgtaatttgagttgtgggggtagttctagtgcatcatgttgtgtcgctggtgtacttgcctgtgggtcgcccaggttcttttgctggctgtttcgtgtgccaggttgttgcctgggcagcggtgtttgtttctttggttggtattttcggtgtctctatctgtcttagtatatgttgtaagacgctggtcttttgcttctggaagcaagttacgaatggttgaagcctggttggctcctattcttctctcctatcctgtgttccccatgtgtgacaattttttaattagtggagctgttttggattaatg

SEQ ID NO: 204697 - DNA, 178 bp, Zea Mays
cacactccacaagaccacaacaccgtgattacacgatgccactggtggcgagccggccatttcagccaaagcggtgggccgcgcttccttcctcagtcctcactactcactcgtccccttccagttccgcttccgatctgcgcttcgatctccctcttcgcagaggtgcttgtgagct

SEQ ID NO: 204698 - DNA, 386 bp, Zea Mays
ctccacaagaccacaacaccgtgattacacgatgccactggtggcgagccggccatttcagccaaagcggtgggccgcgcttccttcctcagtcctcactactcactcgtccccttccagttccgcttccgatctgcgcttcgatctccctcttcgcagaggtgatgtacctgtatgttatcgcaggataatcacatttagtgctagtcctttgggccccggattggaagaagggtctcaatctgcattgtagagcaatgcttatgaattttgacgagtccatatgtaagttgacaaaatttgctagggagagggactgcaggtgatccgatttcacaatttttagtacaatgattgcaatgtgatgcatttacatggaacctgat

SEQ ID NO: 204699 - DNA, 1112 bp, Zea Mays
gcacggcacggcaccgcaccgggagtccatccgtccgtccggcacgcacgcacgccctttgaatgccccctcccgcctgcctgctgcctctgacccggccccgtatcgtatgattcattgattcgtatctcctctcctctcccggctcggaataacccgtctctctcgcccgccctgtccttgccggccggccccggccccggtctcttctcttcttcttctttttcttcccgctatatatactgcgcgcctcaccttcccctctttgcaatccgtatcatcatcttggcctcgtcaatccaccaccaccgtcgtcgctgagctcctcctccggcttcgcttcgctgtcttgcctcctcctcggtcgaagaagaaaacatgtgtccgggatccgtggagtcgtcgtcggcggcggcggcgggcaagagcgtgtgcgtgatggacgccgcggggccgctgggccacgcgctcgtggaccgcctcctccggcgcgggtacaccgtccacgccgccacgtacgcccgcgacggggaggagggcgcggctgccgccgcgctgctcggccacctgtcgtgcgccgccgacgcgtgcaggcaccggctgaagctgttccgcgccgacccgttcgactaccacgccatcgccgacgccgtgcggggctgcgccggcgtcttctgcatgttcaacacgcccgacgaccaggcccaatgcgatgagtcgacggtggagacggaggtgcgcgcggcgcacaacgtgctggaggcgtgcgcgcagacggacgccatggagcgggtcgtcttcacctcctccgtcaccgccgtcgtctggagcggcgccggcgccggcgtcggcgcccacagggaggaggtcgccgacgagaggagctggagcgacctcgccttctgcaggaagttcaaggagaagagcaggtggtcgaagaggagccgcctaacactgaggctttcgacttgatctaggtggcgtctccgagtcaactttctggcgccaaggatagattttagaccctgttatatttatcttttatttttgtaagtcttccgctatgtaataaatactctgattatcatgacatttatctctatacactctgt

SEQ ID NO: 204700 - DNA, 3518 bp, Zea Mays
ctcaatccctccacccacccacctcgcctgcatatcactcgtgtgctcgcaaacaagcgtccgagttggaggcgtggcggcccgttttgcatgccgtagctctcccggtgttcctccccttccgaacccctcgccgcctctccgtctcgtgattcgaatcactgccccattgcgaacgagccgccacagctgctgccagcctcaaggaagggccccggttcccaatcccagacgggccagcggatcgatcgaacaggcggccggccactcgggatcgggccggggccgcggcggcgcatgagctctgacgccgcgagggggcagcgcggcatcaactgcacgaggggcgacgcggcggcgatgccaacctcatcgccctttgtcggcgacagcggcggcgcgggctccccgatccgcgtcgagcgaatggtccgcgagcgtagccgccgctacgacatcttcgcgtcggacgcgatggataccgacgccgaggcggccttcgcgctggatggggtccagtcgcctggacgtgcgtcacccgccaacatggaggatgctggcggcgcggccgcagcgcgaccgccgctcgccggctcccgcagcggtttccgccgcctaggcctccgtggcatgaagcagcgcctcctcgtcgtggccaaccgcctgcctgtatccgccaaccgccgcggagaggaccactggtcgcttgagatcagcgccggcggccttgtgagcgccctccttggcgtgaaggacgtcgacgcgaagtggattggctgggcaggcgtcaacgtaccggacgaggttggtcagcgagccctcactaaagctcttgcggagaagagatgcataccagtgttcctggacgaggagattgtgcaccagtactacaatggatactgcaacaacatcctgtggccactgttccactacctaggactaccacaggaggacaggctggcaacaacgaggaactttgagtcacagttcgacgcgtacaagcgtgctaaccagatgttcgctgatgtcgtgtacgagcactaccaggacggggatgtgatctggtgccatgactaccacctcatgtttctgcccaagtgcctcaaggaccatgacatcaatatgaaggtcgggtggttcctgcacacgccgttcccgtcatcagagatttaccggacactgccgtcccgcttggagctgcttcggtcggtgctgtgtgccgatttagttggatttcatacttacgactatgcgaggcattttgtgagtgcttgcactagaatacttggacttgagggtacccctgagggcgttgaagatcaaggaaggctaaccagggttgcagcgtttcctattgggatagactctgatcgtttcaagcgagcattggagcttccagcagtgaaaaggcacgtcagtgaattgacagaacgttttgccggtcgaaaggtaatgcttggtgttgaccgacttgacatgattaagggaattccgcaaaagattttggcctttgaaaagtttcttgaggaaaacccagactggaacaacaaagttgttctactgcagattgctgtgccaacaagaactgacgtccctgaatatcaaaagctaacgagccaagtgcatgaaattgttgggcgcataaacggtcgatttggaacgttgactgctgtccctattcatcatctggaccgatctcttgatttccatgccttgtgtgctctttatgcagtcactgatgttgctcttgtaacatcactgagagatgggatgaaccttgtgagctatgaatatgttgcatgccaagggtctaagaaaggagttctgatacttagcgagtttgctggggcagcacaatcacttggagctggtgccattctagtaaacccttggaatattacagaagttgcagactcaatacggcatgctttaacgatgccatccgatgagagagagaaacgacacagacacaactacgcacatgtcacaactcacacggctcaagattgggctgaaacttttgtatttgagctaaatgacacggttgctgaagcactactgaggacaagacaagttcctcctggtcttcctagtcaaatggcaattcagcaatatttgcgctctaaaaatcgtctgctcatattgggtttcaattcgacattgactgagccagtcgaatcctctgggagaaggggtggtgaccaaatcaaggaaatggaactcaagttgcatcctgacttaaagggtcctctgagagccctctgtgaggatgagcgcactacagttattgttcttagcggcagtgacaggagtgttcttgatgaaaattttggagaatttaaaatgtggttggcggcagagcatgggatgtttttacgcccgacttacggagaatggatgacaacaatgcctgagcatctgaacatggattgggttgacagcgtaaagcatgtttttgaatactttacagaaagaaccccaagatcccatttcgaacatcgtgaaacatcatttgtgtggaactataagtatgctgatgttgagttcggaaggctacaagcaagagatatgctgcagcacttgtggacaggtccgatctcaaatgcagctgttgatgttgttcaagggagtcgatcagttgaagttcggtctgttggagttaccaagggtgctgcaattgatcgtattttaggggagatagttcacagcgaaaacatgattactccaattgactatgtcctgtgcatagggcatttccttgggaaggatgaggacatctacgtcttctttgatcccgagtacccttctgaatccaaagtaaagccagagggcggctcagcatcacttgaccggaggccgaacgggaggccaccatcgaatggcaggagtaactccaggaacccacagtccaggacacagaaggcgcagcaggctgcatccgagaggtcatcctcatcaagtcacagcagcacgagcagcaaccacgactggcgcgaagggtcctcggtccttgatctcaagggcgagaactacttctcctgcgccgtcgggaggaagcggtccaacgcccgctacctgctgagctcgtcggaggaggttgtctccttcctcaaagagttggcgacagcgacagctggcttccaggccacctgtgctgactacatgcatgttcttggataggcagtaaatagactgaagttgaagcctccgtgctttaccagagacagagagaagaagaatattcattcctcgtatgcgcgacagagctacacccgtagctagtcagcgtgctgtacaatcatgtacaaaatttatgctcgtgataaaactgcgagaggggagctagcaaatgggaaaggataaaggagtttagttgcttctggtacgagacacaatcgcctgattttgagttctcttcgatttgttgtcctttaaattgcgcttttgaactggtttgggtgcacctgaaatacgcctgcgctatatatgagaccacatctcatatttttcatcttaac

SEQ ID NO: 204701 - DNA, 3475 bp, Zea Mays
atatcactcgtgtgctcgcaaacaagcgtccgagttggaggcgtggcggcccgttttgcatgccgtagctctcccggtgttcctccccttccgaacccctcgccgcctctccgtctcgtgattcgaatcactgccccattgcgaacgagccgccacagctgctgccagcctcaaggaagggccccggttcccaatcccagacgggccagcggatcgatcgaacaggcggccggccactcgggatcgggtgggccggggccgcggcggcgcatgagctctgacgccgcgagggggcagcgcggcatcaactgcacgaggggcgacgcggcggcgatgccaacctcatcgccctttgtcggcgacagcggcggcgcgggctccccgatccgcgtcgagcgaatggtccgcgagcgtagccgccgctacgacatcttcgcgtcggacgcgatggataccgacgccgaggcggccttcgcgctggatggggtccagtcgcctggacgtgcgtcacccgccaacatggaggatgctggcggcgcggccgcagcgcgaccgccgctcgccggctcccgcagcggtttccgccgcctaggcctccgtggcatgaagcagcgcctcctcgtcgtggccaaccgcctgcctgtatccgccaaccgccgcggagaggaccactggtcgcttgagatcagcgccggcggccttgcgtgaaggacgtcgacgcgaagtggattggctgggcaggcgtcaacgtaccggacgaggttggtcagcgagccctcactaaagctcttgcggagaagagatgcataccagtgttcctggacgaggagattgtgcaccagtactacaatggatactgcaacaacatcctgtggccactgttccactacctaggactaccacaggaggacaggctggcaacaacgaggaactttgagtcacagttcgacgcgtacaagcgtgctaaccagatgttcgctgatgtcgtgtacgagcactaccaggacggggatgtgatctggtgccatgactaccacctcatgtttctgcccaagtgcctcaaggaccatgacatcaatatgaaggtcgggtggttcctgcacacgccgttcccgtcatcagagatttaccggacactgccgtcccgcttggagctgcttcggtcggtgctgtgtgccgatttagttggatttcatacttacgactatgcgaggcattttgtgagtgcttgcactagaatacttggacttgagggtacccctgagggcgttgaagatcaaggaaggctaaccagggttgcagcgtttcctattgggatagactctgatcgtttcaagcgagcattggagcttccagcagtgaaaaggcacgtcagtgaattgacagaacgttttgccggtcgaaaggtaatgcttggtgttgaccgacttgacatgattaagggaattccgcaaaagattttggcctttgaaaagtttcttgaggaaaacccagactggaacaacaaagttgttctactgcagattgctgtgccaacaagaactgacgtccctgaatatcaaaagctaacgagccaagtgcatgaaattgttgggcgcataaacggtcgatttggaacgttgactgctgtccctattcatcatctggaccgatctcttgatttccatgccttgtgtgctctttatgcagtcactgatgttgctcttgtaacatcactgagagatgggatgaaccttgtgagctatgaatatgttgcatgccaagggtctaagaaaggagttctgatacttagcgagtttgctggggcagcacaatcacttggagctggtgccattctagtaaacccttggaatattacagaagttgcagactcaatacggcatgctttaacgatgccatccgatgagagagagaaacgacacagacacaactacgcacatgtcacaactcacacggctcaagattgggctgaaacttttgtatttgagctaaatgacacggttgctgaagcactactgaggacaagacaagttcctcctggtcttcctagtcaaatggcaattcagcaatatttgcgctctaaaaatcgtctgctcatattgggtttcaattcgacattgactgagccagtcgaatcctctgggagaaggggtggtgaccaaatcaaggaaatggaactcaagttgcatcctgacttaaagggtcctctgagagccctctgtgaggatgagcgcactacagttattgttcttagcggcagtgacaggagtgttcttgatgaaaattttggagaatttaaaatgtggttggcggcagagcatgggatgtttttacgcccgacttacggagaatggatgacaacaatgcctgagcatctgaacatggattgggttgacagcgtaaagcatgtttttgaatactttacagaaagaaccccaagatcccatttcgaacatcgtgaaacatcatttgtgtggaactataagtatgctgatgttgagttcggaaggctacaagcaagagatatgctgcagcacttgtggacaggtccgatctcaaatgcagctgttgatgttgttcaagggagtcgatcagttgaagttcggtctgttggagttaccaagggtgctgcaattgatcgtattttaggggagatagttcacagcgaaaacatgattactccaattgactatgtcctgtgcatagggcatttccttgggaaggatgaggacatctacgtcttctttgatcccgagtacccttctgaatccaaagtaaagccagagggcggctcagcatcacttgaccggaggccgaacgggaggccaccatcgaatggcaggagtaactccaggaacccacagtccaggacacagaaggcgcagcaggctgcatccgagaggtcatcctcatcaagtcacagcagcacgagcagcaaccacgactggcgcgaagggtcctcggtccttgatctcaagggcgagaactacttctcctgcgccgtcgggaggaagcggtccaacgcccgctacctgctgagctcgtcggaggaggttgtctccttcctcaaagagttggcgacagcgacagctggcttccaggccacctgtgctgactacatgcatgttcttggataggcagtaaatagactgaagttgaagcctccgtgctttaccagagacagagagaagaagaatattcattcctcgtatgcgcgacagagctacacccgtagctagtcagcgtgctgtacaatcatgtacaaaatttatgctcgtgataaaactgcgagaggggagctagcaaatgggaaaggataaaggagtttagttgcttctggtacgagacacaatcgcctgattttgagttctcttcgatttgttgtcctttaaattgcgcttttgaactggtttgggtgcacctgaaatacgcctgcgctatatatgagaccacatctcatatttttcatcttaac

SEQ ID NO: 204702 - DNA, 2167 bp, Zea Mays
ttctggaaggtattagcggcaaaaggtaatgcttggtgttgaccgacttgacatgattaagggaattccgcaaaagattttggcctttgaaaagtttcttgaggaaaacccagactggaacaacaaagttgttctactgcagattgctgtgccaacaagaactgacgtccctgaatatcaaaagctaacgagccaagtgcatgaaattgttgggcgcataaacggtcgatttggaacgttgactgctgtccctattcatcatctggaccgatctcttgatttccatgccttgtgtgctctttatgcagtcactgatgttgctcttgtaacatcactgagagatgggatgaaccttgtgagctatgaatatgttgcatgccaagggtctaagaaaggagttctgatacttagcgagtttgctggggcagcacaatcacttggagctggtgccattctagtaaacccttggaatattacagaagttgcagactcaatacggcatgctttaacgatgccatccgatgagagagagaaacgacacagacacaactacgcacatgtcacaactcacacggctcaagattgggctgaaacttttgtatttgagctaaatgacacggttgctgaagcactactgaggacaagacaagttcctcctggtcttcctagtcaaatggcaattcagcaatatttgcgctctaaaaatcgtctgctcatattgggtttcaattcgacattgactgagccagtcgaatcctctgggagaaggggtggtgaccaaatcaaggaaatggaactcaagttgcatcctgacttaaagggtcctctgagagccctctgtgaggatgagcgcactacagttattgttcttagcggcagtgacaggagtgttcttgatgaaaattttggagaatttaaaatgtggttggcggcagagcatgggatgtttttacgcccgacttacggagaatggatgacaacaatgcctgagcatctgaacatggattgggttgacagcgtaaaggtttgtctgtttcatgaataatgttctgttgcgtcaaattaatagcaagtttctgatatttttttttctccagcatgtttttgaatactttacagaaagaaccccaagatcccatttcgaacatcgtgaaacatcatttgtgtggaactataagtatgctgatgttgagttcggaaggctacaagcaagagatatgctgcagcacttgtggacaggtccgatctcaaatgcagctgttgatgttgttcaagggagtcgatcagttgaagttcggtctgttggagttaccaagggtgctgcaattgatcgtattttaggggagatagttcacagcgaaaacatgattactccaattgactatgtcctgtgcatagggcatttccttgggaaggatgaggacatctacgtcttctttgatcccgagtacccttctgaatccaaagtaaagccagagggcggctcagcatcacttgaccggaggccgaacgggaggccaccatcgaatggcaggagtaactccaggaacccacagtccaggacacagaaggcgcagcaggctgcatccgagaggtcatcctcatcaagtcacagcagcacgagcagcaaccacgactggcgcgaagggtcctcggtccttgatctcaagggcgagaactacttctcctgcgccgtcgggaggaagcggtccaacgcccgctacctgctgagctcgtcggaggaggttgtctccttcctcaaagagttggcgacagcgacagctggcttccaggccacctgtgctgactacatgcatgttcttggataggcagtaaatagactgaagttgaagcctccgtgctttaccagagacagagagaagaagaatattcattcctcgtatgcgcgacagagctacacccgtagctagtcagcgtgctgtacaatcatgtacaaaatttatgctcgtgataaaactgcgagaggggagctagcaaatgggaaaggataaaggagtttagttgcttctggtacgagacacaatcgcctgattttgagttctcttcgatttgttgtcctttaaattgcgcttttgaactggtttgggtgcacctgaaatacgcctgcgctatatatgagaccacatctcatatttttcatcttaac

SEQ ID NO: 204703 - DNA, 1885 bp, Zea Mays
aggacctaacttttcttaagcgttataccacactgctgagaaggcactacccatttgaccgatctcttgatttccatgccttgtgtgctctttatgcagtcactgatgttgctcttgtaacatcactgagagatgggatgaaccttgtgagctatgaatatgttgcatgccaagggtctaagaaaggagttctgatacttagcgagtttgctggggcagcacaatcacttggagctggtgccattctagtaaacccttggaatattacagaagttgcagactcaatacggcatgctttaacgatgccatccgatgagagagagaaacgacacagacacaactacgcacatgtcacaactcacacggctcaagattgggctgaaacttttgtatttgagctaaatgacacggttgctgaagcactactgaggacaagacaagttcctcctggtcttcctagtcaaatggcaattcagcaatatttgcgctctaaaaatcgtctgctcatattgggtttcaattcgacattgactgagccagtcgaatcctctgggagaaggggtggtgaccaaatcaaggaaatggaactcaagttgcatcctgacttaaagggtcctctgagagccctctgtgaggatgagcgcactacagttattgttcttagcggcagtgacaggagtgttcttgatgaaaattttggagaatttaaaatgtggttggcggcagagcatgggatgtttttacgcccgacttacggagaatggatgacaacaatgcctgagcatctgaacatggattgggttgacagcgtaaagcatgtttttgaatactttacagaaagaaccccaagatcccatttcgaacatcgtgaaacatcatttgtgtggaactataagtatgctgatgttgagttcggaaggctacaagcaagagatatgctgcagcacttgtggacaggtccgatctcaaatgcagctgttgatgttgttcaagggagtcgatcagttgaagttcggtctgttggagttaccaagggtgctgcaattgatcgtattttaggggagatagttcacagcgaaaacatgattactccaattgactatgtcctgtgcatagggcatttccttgggaaggatgaggacatctacgtcttctttgatcccgagtacccttctgaatccaaagtaaagccagagggcggctcagcatcacttgaccggaggccgaacgggaggccaccatcgaatggcaggagtaactccaggaacccacagtccaggacacagaaggcgcagcaggctgcatccgagaggtcatcctcatcaagtcacagcagcacgagcagcaaccacgactggcgcgaagggtcctcggtccttgatctcaagggcgagaactacttctcctgcgccgtcgggaggaagcggtccaacgcccgctacctgctgagctcgtcggaggaggttgtctccttcctcaaagagttggcgacagcgacagctggcttccaggccacctgtgctgactacatgcatgttcttggataggcagtaaatagactgaagttgaagcctccgtgctttaccagagacagagagaagaagaatattcattcctcgtatgcgcgacagagctacacccgtagctagtcagcgtgctgtacaatcatgtacaaaatttatgctcgtgataaaactgcgagaggggagctagcaaatgggaaaggataaaggagtttagttgcttctggtacgagacacaatcgcctgattttgagttctcttcgatttgttgtcctttaaattgcgcttttgaactggtttgggtgcacctgaaatacgcctgcgctatatatgagaccacatctcatatttttcatcttaac

SEQ ID NO: 204704 - DNA, 1032 bp, Zea Mays
ccgtgttgctagttgcatctcaacacaacctcagagattttttttttcttctgttcgcttggctggcagcgcatcgtccggtcatcttgtggccccagtgccagtggccactgctggctacagcaattccaaccaaatgggcaggcaccgatctctagcacggacaagcaaatcccagcacaggtgaaccattccggtgacgtcaacacgttcgcggtgcctcggagactagagacagaggagataccacacgtcgtcaatgacttccgggttgccgccagaaacgccatcaaagcaggctttgatggagtggagatccacgcggcaaacgggtacctgttcgatcagttcatgaaggacagcaccaatgaccgagacgactcctacgggggcagcttggagaaccggtgccgtttcacagccgaggtgatggcagccgtcgcggacgaggtcggtgccaaccgcctcggtgtgcgcctctctccgttcgcggattatatggactgccacgactccaacccagaggcgctcgcgcttcatgtcatcgacgagacgctgaacccgctcggcgtgctttactgccacatggtagagccaaggatgcgggtgaacccagacgacggtattatgactctcgagcacatgctgctaccgttcaggagggcgtttcgcgggacgttcattgctaatggaggctacgaccgtgaggaaggcaatgacgccattgcccgtggccgtggctatgcagatctcatcgcatacggccggatattccttgccaacccggaccttccgatgcgttttgccaagaatgccccgctgaacaagtatgataggagcaccttctatacctctgatccggtggttgggtacacagattatccatttctcgatcaactctaggatgattggcttataaacaatttccccacctggagtactatcttgaccttaaaataaaatgagtgtcactataatattaatgtcgatcaaagttttctaagtttaactaaatctacaaaaattattatt

SEQ ID NO: 204705 - DNA, 2978 bp, Zea Mays
atgtgtttgtgccctcatgtttttttcattcccattttttcagtgttttttataatagatcaagatcagaatgtcacaggccagcaaggcgctcatgctgtccgtcgctctccccgtgttgaaaacaagagaaagcaattagataaaaatgaattgaaggaaaggaagaagagattaaggttgaaagtccctcctatacaagacgccgaaagtgatgatgaaaaagacacagagtttgttcctggtggcgatgggtctggtgatgacaatgttggtattgttggtggagatgaaaataagggtataactaagacacgagctattcgatgctcacctgggaagtttataaagcttgtgaattctctatctgatgaattgaaaagtcaagtggttgctaaggggtttggcggcctgcttagattcaagccacatttattgtcgagaaagttgcttagctggctgatgcggaagcttaacccagaaacaatgaaattagagattggtggtgggaaagagattcaaatcaccgaacacagtgtttggtgtgttttgcagttaccaaacgttggcagtgatccgccccccatgtctgatgcagatgctcgttccttgcgggacgagctgggggagcaaatttgtggcaaatcttatagacggatatctggtatcaatatatctgttatcactgatagattgcagaagaggactctcaatggggagctgggcctgagagcctttttcatggcagcatttcagtgtcttctattctccaatactgacactcgcatcagaattgatgatgtgaagtacactcaggacatccagaacatgggcaacaagaactggtgcaaagctgtagtagacaggctgagcatagctgctcgtctttatagaaaggattttgcggagaaaggcattaacgcacccatcagtggatgcgggatctttgtagctatgctttatgtcgacaacctgcaacatggattagacacaagtcctttttcaatccctcgatgtgctttcttggactccaagatgattgatgctatagcaaatatggatctcaggggagatgttcctcctgggaccactgagtttggacacctcaggccccatcccgcgcccggcgcagccgcggacgcgccgctctcgcggtggctgcgccggctcgaggcgttcctgtcggcggcggggctggcggcgtcgacgccgctgggcgtggcggcggccgcctcggcgctggccgtcgtgggcctggcgctgccggccgccgccgtcgcgctctccccgtgccgcggcggcgccgccgcatgcggcgacttcgaggtcgaggtgttcgaggtctgcgtcctgctctcgcaggcggccgccgcggccgttgcgctcgcctgcgtctcgcgcaaggtggccgtgcacggcctccgcaggttcctcttcgtcgacccggacctcggcatgcggatccgcttccagaaggagtacgtcgccaggatccaggacttcttccgcactctgacgtggtggatagtgccgtgcctagccgtgaaggtgacccgggaggtctcccgcttcgcgcacatcctgcagcaggggtcgtcgtcggcctggacctggagggcctgcgcggtgctgttcgcgtccgtggcgtcgtggacgtacctgacgacgatcatcctgtcgtcctgcatgctcttcaacctggtgtgcagcctgcaggtcatccacttcgacgactacggcaagctgctggagcaggacgcggacccgcttgtgtacctcaaggagcacctgcagctccgccacaacctgtccaagatcagccacaggttccgcgtgttcctcctcctgctcttcctctccgtcaccgccggccagttcgccatcctcttcaagaccacggcgtacagcgggccgatcaacttcaccaacggaggggacatcgctgtgtcttcggtggttcaggtggtcggcctcgtcctctgcctgcacgccgctgccaagatctcccaccgagctcagaacatcgctgcgctggctagccggtggcacgcgctggcgacgtgctctaccgactccacctacgtgaccaccccgaacagttccgggaacctcgcgcctttccccgcgcacctgttcctgagagactactcggggagtgacctggagtccctggacagcgcgtcggttcagggcagctcccacggcacggcccagctggcctcctacatgtcctcgtaccacaagagggagtcgcttgtgctgtacctgctggccaacccaggcggcatcacgatatttggctggatcgtcgaccgggcgttcctgaacaccatcctgatgctcgagctgacccttgtgctcttcgtgcttagcaagaccgttgtgatcccggccaagacactggtgcacagttacatcggctacccatgattacgaccagattcaggttcaggttcagttaggcgatgggatttgatgacaggcaggttgccggggtttgcacgctacggtgaatgaaactggtaggaatggtgggtctcccccctcaagcgcagatcatatgcgctggcaatccaagcatgccgcaggttgaaggcaggctgagggctagggtcgtgacgtgtacagtttttttggggaaaaaaatctctacagccggttgcagaaagcggtcctgcaggttgcaaagcaggttgcttcagatttacacttctgcaccaatcaatgatcagagattgtttttctctgcagccagttgaagagaatttctcccggtacatatactactaatactataaaccaatatatgtattattgtacgtatacacgcacgcaatgtatatgcactcttataataatataaactaatatactacctccgttcacaaatatatgataccattaactttttttcaaaaattttgactattcgtcttattcaaaatatttattaaaaaaatataaattttaaatcaaac

SEQ ID NO: 204706 - DNA, 1404 bp, Zea Mays
aacaaaaagaagaggtgaaaatccatttcctattttcctcacgtattatcctcttgcttgttcgtccggttcttcgccctcgccgcgcgggactaccaatccaaactggcgacgaccctgctgccaccccacagcagatttgaggagcggacgcccgtttaaatggctattggagtcccatccatggagctccaccgctcctcaccgttgctctcgggtggccgaggaggaaatacatgcctacagaagaagcccttctttgtccaagcaaagagactagtggggatggagaaagcaagtacgaggccaggaacacaagagtctggacagacaaagaaaagagcacccctggttcgtggaactgttagcccacctcttccagtaccaggaaacatacctcggcctccttatgtcggcacagaatatgtaccagagatagcaaaagagatacaaatgcatgacaaagagggcattgtccacatgagagctgcttgcgagctcgcggctcgtgttcttgactatgcaggaacgttagtgaaatgcacaagatgatcatcgatgctggagcctatccatcaccacttggatatggtgggtttccaaaaagtgtatgcacctcagtgaatgagtgcatgtgccatggaattcctgattcacgcgagctacaggatggagacataattaacattgatgtcactgtctacttgaatgttactgaagagtgcttgctcaggggcatatcaacatgcaaacatggtaccagctttaagaagattggcagaagaataagtgagcatgctgagaggaacggttttggtgttgtggagtgttttgttgggcatggagtcggcagggtatttcactcagaaccaattatctatcaccagaggaacaacagaccgggccagatgattgaagggcagactttcacaatagagccgatcatatcgatggggagcatcgagtgcgacatgtgggacgacggctggactgccgtgacgacggacggcagcttggcggcgcagttcgagcacaccatactgatcaccaggaccggagccgagatcctcaccaagtgctaggaggaaaggaaatcgcatgtgcccgatagccgacggtaggtaatctgtattcgtgaggtggtgaggatgcttgaggtgacctattttgtctcgcaaaatgggcgtgctacagaatagtgaagaaaagggttgagagattgcaaatggcaggtttgggcaaagaggaccaagttctaggcgtccgggacacgactctgtgtctggcgttcccttctgttgtcgacatcccgtggttcagttgaggccatgtctcgtgacgttctcctcccgccagttggcccaccgcttgccgttggcgcgttggcgtcatggcagcggccac

SEQ ID NO: 204707 - DNA, 1431 bp, Zea Mays
agaagaggtgaaaatccatttcctattttcctcacgtattatcctcttgcttgttcgtccggttcttcgccctcgccgcgcgggactaccaatccaaactggcgacgaccctgctgccaccccacagcagatttgaggagcggacgcccgtttaaatggctattggagtcccatccatggagctccaccgctcctcaccgttgctctcgggtggccgaggaggaaatacatgcctacagaagaagcccttctttgtccaagcaaagagactagtggggatggagaaagcaagtacgaggccaggaacacaagagtctggacagacaaagaaaagagcacccctggttcgtggaactgttagcccacctcttccagtaccaggaaacatacctcggcctccttatgtcggcacagaatatgtaccagagatagcaaaagagatacaaatgcatgacaaagagggcattgtccacatgagagctgcttgcgagctcgcggctcgtgttcttgactatgcaggaacgttagtgaaaccctctgtaacaacagacgaaattgataaagcagtgcacaagatgatcatcgatgctggagcctatccatcaccacttggatatggtgggtttccaaaaagtgtatgcacctcagtgaatgagtgcatgtgccatggaattcctgattcacgcgagctacaggatggagacataattaacattgatgtcactgtctacttgaatgttactgaagagtgcttgctcaggggcatatcaacatgcaaacatggtaccagctttaagaagattggcagaagaataagtgagcatgctgagaggaacggttttggtgttgtggagtgttttgttgggcatggagtcggcagggtatttcactcagaaccaattatctatcaccagaggaacaacagaccgggccagatgattgaagggcagactttcacaatagagccgatcatatcgatggggagcatcgagtgcgacatgtgggacgacggctggactgccgtgacgacggacggcagcttggcggcgcagttcgagcacaccatactgatcaccaggaccggagccgagatcctcaccaagtgctaggaggaaaggaaatcgcatgtgcccgatagccgacggtaggtaatctgtattcgtgaggtggtgaggatgcttgaggtgacctattttgtctcgcaaaatgggcgtgctacagaatagtgaagaaaagggttgagagattgcaaatggcaggtttgggcaaagaggaccaagttctaggcgtccgggacacgactctgtgtctggcgttcccttctgttgtcgacatcccgtggttcagttgaggccatgtctcgtgacgttctcctcccgccagttggcccaccgcttgccgttggcgcgttggcgtcatggcagcggccac

SEQ ID NO: 204708 - DNA, 1388 bp, Zea Mays
atttcctattttcctcacgtattatcctcttgcttgttcgtccggttcttcgccctcgccgcgcgggactaccaatccaaactggcgacgaccctgctgccaccccacagcagatttgaggagcggacgcccgtttaaatggctattggagtcccatccatggagctccaccgctcctcaccgttgctctcgggtggccgaggaggaaatacatgcctacagaagaagcccttctttgtccaagcaaagagactagtggggatggagaaagcaagtacgaggccaggaacacaagagtctggacagacaaagaaaagagcacccctggttcgtggaactgttagcccacctcttccagtaccaggaaacatacctcggcctccttatgtcggcacagaatatgtaccagagatagcaaaagagatacaaatgcatgacaaagagggcattgtccacatgagagctgcttgcgagctcgcggctcgtgttcttgactatgcaggaacgttagtgaaaccctctgtaacaacagacgaaattgataaagcagtgcacaagatgatcatcgatgctggagcctatccatcaccacttggatatggtgggtttccaaaaagtgtatgcacctcagtgaatgagtgcatgtgccatggaattcctgattcacgcgagctacaggatggagacataattaacattgatgtcactgtctacttgaatggttatcatggggatacctcaaaaacatttctttgtggagaagtcgatgaagccagtaaacgacttgtgaaggttactgaagagtgcttgctcaggggcatatcaacatgcaaacatggtaccagctttaagaagattggcagaagaataagggaacaacagaccgggccagatgattgaagggcagactttcacaatagagccgatcatatcgatggggagcatcgagtgcgacatgtgggacgacggctggactgccgtgacgacggacggcagcttggcggcgcagttcgagcacaccatactgatcaccaggaccggagccgagatcctcaccaagtgctaggaggaaaggaaatcgcatgtgcccgatagccgacggtaggtaatctgtattcgtgaggtggtgaggatgcttgaggtgacctattttgtctcgcaaaatgggcgtgctacagaatagtgaagaaaagggttgagagattgcaaatggcaggtttgggcaaagaggaccaagttctaggcgtccgggacacgactctgtgtctggcgttcccttctgttgtcgacatcccgtggttcagttgaggccatgtctcgtgacgttctcctcccgccagttggcccaccgcttgccgttggcgcgttggcgtcatggcagcggccac

SEQ ID NO: 204709 - DNA, 1210 bp, Zea Mays
atttcctattttcctcacgtattatcctcttgcttgttcgtccggttcttcgccctcgccgcgcgggactaccaatccaaactggcgacgaccctgctgccaccccacagcagatttgaggagcggacgcccgtttaaatggctattggagtcccatccatggagctccaccgctcctcaccgttgctctcgggtggccgaggaggaaatacatgcctacagaagaagcccttctttgtccaagcaaagagactagtggggatggagaaagcaagtacgaggccaggaacacaagagtctggacagacaaagaaaagagcacccctggttcgtggaactgttagcccacctcttccagtaccaggaaacatacctcggcctccttatgtcggcacagaatatgtaccagagatagcaaaagagatacaaatgcatgacaaagagggcattgtccacatgagagctgcttgcgagctcgcggctcgtgttcttgactatgcaggaacgttagtgaaagttactgaagagtgcttgctcaggggcatatcaacatgcaaacatggtaccagctttaagaagattggcagaagaataagtgagcatgctgagaggaacggttttggtgttgtggagtgttttgttgggcatggagtcggcagggtatttcactcagaaccaattatctatcaccagaggaacaacagaccgggccagatgattgaagggcagactttcacaatagagccgatcatatcgatggggagcatcgagtgcgacatgtgggacgacggctggactgccgtgacgacggacggcagcttggcggcgcagttcgagcacaccatactgatcaccaggaccggagccgagatcctcaccaagtgctaggaggaaaggaaatcgcatgtgcccgatagccgacggtaggtaatctgtattcgtgaggtggtgaggatgcttgaggtgacctattttgtctcgcaaaatgggcgtgctacagaatagtgaagaaaagggttgagagattgcaaatggcaggtttgggcaaagaggaccaagttctaggcgtccgggacacgactctgtgtctggcgttcccttctgttgtcgacatcccgtggttcagttgaggccatgtctcgtgacgttctcctcccgccagttggcccaccgcttgccgttggcgcgttggcgtcatggcagcggccac

SEQ ID NO: 204710 - DNA, 1481 bp, Zea Mays
atttcctattttcctcacgtattatcctcttgcttgttcgtccggttcttcgccctcgccgcgcgggactaccaatccaaactggcgacgaccctgctgccaccccacagcagatttgaggagcggacgcccgtttaaatggctattggagtcccatccatggagctccaccgctcctcaccgttgctctcgggtggccgaggaggaaatacatgcctacagaagaagcccttctttgtccaagcaaagagactagtggggatggagaaagcaagtacgaggaacacaagagtctggacagacaaagaaaagagcacccctggttcgtggaactgttagcccacctcttccagtaccaggaaacatacctcggcctccttatgtcggcacagaatatgtaccagagatagcaaaagagatacaaatgcatgacaaagagggcattgtccacatgagagctgcttgcgagctcgcggctcgtgttcttgactatgcaggaacgttagtgaaaccctctgtaacaacagacgaaattgataaagcagtgcacaagatgatcatcgatgctggagcctatccatcaccacttggatatggtgggtttccaaaaagtgtatgcacctcagtgaatgagtgcatgtgccatggaattcctgattcacgcgagctacaggatggagacataattaacattgatgtcactgtctacttgaatggttatcatggggatacctcaaaaacatttctttgtggagaagtcgatgaagccagtaaacgacttgtgaaggttactgaagagtgcttgctcaggggcatatcaacatgcaaacatggtaccagctttaagaagattggcagaagaataagtgagcatgctgagaggaacggttttggtgttgtggagtgttttgttgggcatggagtcggcagggtatttcactcagaaccaattatctatcaccagaggaacaacagaccgggccagatgattgaagggcagactttcacaatagagccgatcatatcgatggggagcatcgagtgcgacatgtgggacgacggctggactgccgtgacgacggacggcagcttggcggcgcagttcgagcacaccatactgatcaccaggaccggagccgagatcctcaccaagtgctaggaggaaaggaaatcgcatgtgcccgatagccgacggtaggtaatctgtattcgtgaggtggtgaggatgcttgaggtgacctattttgtctcgcaaaatgggcgtgctacagaatagtgaagaaaagggttgagagattgcaaatggcaggtttgggcaaagaggaccaagttctaggcgtccgggacacgactctgtgtctggcgttcccttctgttgtcgacatcccgtggttcagttgaggccatgtctcgtgacgttctcctcccgccagttggcccaccgcttgccgttggcgcgttggcgtcatggcagcggccac

SEQ ID NO: 204711 - DNA, 1344 bp, Zea Mays
atttcctattttcctcacgtattatcctcttgcttgttcgtccggttcttcgccctcgccgcgcgggactaccaatccaaactggcgacgaccctgctgccaccccacagcagatttgaggagcggacgcccgtttaaatggctattggagtcccatccatggagctccaccgctcctcaccgttgctctcgggtggccgaggaggaaatacatgcctacagaagaagcccttctttgtccaagcaaagagactagtggggatggagaaagcaagtacgaggccaggaacacaagagtctggacagacaaagaaaagagcacccctggttcgtggaactgttagcccacctcttccagtaccaggaaacatacctcggcctccttatgtcggcacagaatatgtaccagagatagcaaaagagatacaaatgcatgacaaagagggcattgtccacatgagagctgcttgcgagctcgcggctcgtgttcttgactatgcaggaacgttagtgaaaccctctgtaacaacagacgaaattgataaagcagtgcacaagatgatcatcgatgctggagcctatccatcaccacttggatatggtgggtttccaaaaagtgtatgcacctcagtgaatgagtgcatgtgccatggaattcctgattcacgcgagctacaggatggagacataattaacattgatgtcactgtctacttgaatgttactgaagagtgcttgctcaggggcatatcaacatgcaaacatggtaccagctttaagaagattggcagaagaataagtgagcatgctgagaggaacggttttggtgttgtggagtgttttgttgggcatggagtcggcagggtatttcactcagaaccaattatctatcaccagaggaacaacagaccgggccagatgattgaagggcagactttcacaataggttcgcggcatcctagctcattccacgccgactaaaggcagccatagccgatcatatcgatggggagcatcgagtgcgacatgtgggacgacggctggactgccgtgacgacggacggcagcttggcggcgcagttcgagcacaccatactgatcaccaggaccggagccgagatcctcaccaagtgctaggaggaaaggaaatcgcatgtgcccgatagccgacggtttgggcaaagaggaccaagttctaggcgtccgggacacgactctgtgtctggcgttcccttctgttgtcgacatcccgtggttcagttgaggccatgtctcgtgacgttctcctcccgccagttggcccaccgcttgccgttggcgcgttggcgtcatggcagcggccac

SEQ ID NO: 204712 - DNA, 1123 bp, Zea Mays
aattgctctacgtgaacgaagcttctggaaactcgctggcccgatggcatcggaggccgcgattgctcgtgcgcagtgcctccttcgcttccgccgctggtcgccactgccgcttcttcctctcccttcccctcccgctaccacacgagcagcttcctgccgccgcagcgtacgcatggcctcgtcgctgttcaagcagtggctgcggaacctgcagtcggagaagggcgtcctcacctacgggaggctgagcctcacgcgggttctcatccagggcgttgacatgttcgggaaacgggtgggctttctcaagttcaaggctgatatcgtggacgaggaaaccaaaaccaaggttccaggaattgtctttgcaagagggcccgcggttgctgtgttgattcttttggagtcgaatggagaaacatatgctgtgcttaccgaacaggttagagttcctattggaaaattcctgttggagctgcctgctgggatgctagatgacgaaaaaggtgattttgttggcaccgcagtccgtgaggtggaagaagagactggtataaagctgaatatagaagacatggttgatcttacggcactgctggaccctgctactggaggtcgaatgctaccatcaccggtaactggccaaaacttctattcacctgggtggctgcgacgaagagattggcctgttcctgtacaggggccgcgttgacgaggagaccataagatcgctccaggggaaggaaaccgggctgcgcgaccacggtgagctgatcaagctgcgcgtggttccgtacagcgagctctggcggtcgaccggcgacgcgaaagcactctccgcgatagccctgtacgagatggccaagagggaaggcctgctgccgcagccgacgccgtcggccaacttgtgaagacctgctagcactttaaaacagtggtggccgtcatgcctgtaaaatggaaggaggaacgtcactcgcgaaaccaaatcatatatatctctatctcttcgtttggtataacgcgcttaagcttgtctgtttgtgttatgtatacatatactaataatttaaaaataaaagtataatcgtgtttaaataaatatttcatttaatcctat

SEQ ID NO: 204713 - DNA, 2698 bp, Zea Mays
gctgtctcccgcggcacggggctccagcgccgaacggaaaaccccaccccaccaccactggctactcccgatccccagtccccatccctctcctcgcaaaaggccaccgcgacgcgaccgcgtactgggggcgagacgccagtgcaggcaggcaggcagaagaggagtcgccaggaagcaaccgcgagggagctgcaagcgagcacagcagcagcgcagaaaaaaaattctggaataatttttcttccctttggctccgtgaggttccggtgctcgctcgctcgcctgagcttcgatcgagcccggtcggcgaggcaggcgcccgatcgccgctctccgggagcttccggggggccgtcggatggagccgtacgcggcggcgaagagcggcggggccgacgccggcaccggcaccggactggaagactcgatgcggaggctggggctcggcgacgacggggaagcaggggaggagaagcttccggagcggccgggcgaggcggactgcgcctactacctccgcacgggcgcctgcggctacggggagcgctgccgctacaaccacccccgcgatcggccggccccggttaatggagttggaaagaccgcagttacagtggagtacccagagcgtcctggacagcctctctgtgagtactatgcaaagaatggcacctgtaaatttggttccaattgcaagtttgatcatcccagggagggtggttttgtacctgtcacattgaacagcggtggattccccctgcgtctgggtgaaaaggaatgttcctattacatgaaaactggacattgcaagtttggagctacatgtaaattccatcacccagaacttggtttccttacggagacgcctggcatgtacccaccagttcaaccaccacctatttcctcctcgcatccatatccacatcttgccaattggcaaatggggaggcctcctgttgtgccagggtcatttttaccaggctcgtatccaccaatggtgcttccacatacagttataccaatgcagggatggaacccttatgttgtatgtttctattatcattttgtactttattactttatataaggcactccattatataaattaggaagatatctttgttccaaattggctggtctaatattaagctaaataatgagaatccagagataagttcatgctgtcctttatgtaacatttttgcctatcacaagttcacgaatcacgacaaaacggaagcaatggccttaaaatggagattttataaggccgcaaataattggatgctagtaattccttcatgtcttgaaaatgcaattgtagtcatgattataagagaccgctgatcacctaatgatttttttactctatatggttctcagccacctatgaaccaagttacaccagctggaggacagcaagctgttccagtaggggcatcttatggtttgtcgcaccaggggcctacctctgccatgacttatggcagtcattatgcgcaattatattcttcatctgggacttcaagcagcaacatacaagaatatgcctttccagagcgaccggggcagcctgaatgtgaacattacatgaagactggaacctgtaaatatggggcagcctgcaaatatcatcatcctcaatacttcagtggaccaaagtctaactgcatactgagccctctgggtctccccctccgtcctggttctcagccatgtgcttactatgcacaccatgggtattgcaagtttgggccgacatgcaagtttgatcacccgatgggtactccaaactatagtatttcaacatcttcacttactgatgtgccaatcgctccatatcctcagagtttccctgttactcctatgccttcatatctgccatcttctgatctgcgtccacaatacactcaagtcaaggattcctctgctaatccaccaccatcgcctggaactacttatggtcctgttgggtctatatcaaaggtttatgctccccacacgcttatccgatccccggcttctgcagctgctggcatgcaagcgtcctaatgagacacggttgagagcattagtcctctctgtcatgaagatagttcttgggcaatcttctcaggtttttctaccattggcggaatgaggtctcgattcttttttgctccagttcgacttcccagcaattgtgaataaaggctgcagctgacatagaaaagtctcaataaatgcaaagataggaattggcaagctcattcacttgccatttttctgtccatctcggaaatgagaggagaaaattctgattgtagtaggatccagagctacgttattatcctgtataagatgcaccgatgcaagggattcgtatctgaaagctgatgggttctgtagctcaaaaccttttgtttatctcaccatcatatatatagagagggcagatcaccctaggtgatgattatccacgctggaatggtttaacaaatcttcaataattgttaaaccattcgtgctttttgttaaaccatctcaggatgggtgatcatcacctaggtgacgaatagccatatatatgaatatgagcagcagctatgacttcacaacatgtatatctacctatatatatgaactgggaacacggcatgttgtagcgagacgctttggaacccttgattgaatcatctgaaaccattcgctggtc

SEQ ID NO: 204714 - DNA, 970 bp, Zea Mays
cacgcgctgactcggacgtcgaccaccctgccccatttgctcccaaaggattacaagggatatgcttaaccatatcaccatgcaacatggttacttgttcaagaatggtcacagatcccgtagatttattgttccagagagccatgcgatttcattattgagtcgagatctacgtgtgatcctcttctttcatcgtttggcctgagcttctcagcatctgatgcaccagaaccatcaaaatcagcatcttctattccagacggtaccgcaatacgtaaggagacaccagttcagccttgggaatcaaggtttggagttgcagtatgatagttcagacttccgcaaccaacgaactcttctctttcaatggaaataatcttagtcttaaattgaattcattgagcaagcggttctttgatatttccagcacctctgcttaaaactaaatcacaagaagggtacactgacagtattgattcatctctcacgagcgaggaaagggagcaaaagcggaaacaggccaccgggagggcaacctttgtgcaaggcctagtgatgtctactctattcggagattgatcgctcaagcagccctaggttcttgcacttgctagatcggctctttctcctgcctggtccgtcgtcagatagtgctccacccggttcggactctgatggcagggaaaattcgccccaggaaacttagccgcgttcacctttttttttttcagaaaagtgcgccgttgattctagcatgatgcagcttgatttaagctagctgttgctgtacctgtacctttgtttttatcaatttatcggccagcaattcttatctgtaactcactggtacatcgtgttcgttaccaacatacatggtagctgtggcatctgcttacacaatgcaagaaaagacttgaaaattgctgctttcgtgaaggccccaaaaccacgcttgtccacgtgaacgcga

SEQ ID NO: 204715 - DNA, 2602 bp, Zea Mays
gtgagataagcgtgggcctaccaaccacacatgtcaattctcggaatttctcagaagattggagacgggcgttctcttttcatttggagttttggactagtcgaactgacgaactggcagagcgttcaggatagacatggctgccacctttgccttcatccctctcctgctactggtctgcgtccagagcgcggctcctgttctcggcttcacaaggagcgagttccctgaagatttcgtcttcggatccgctacctcggcttatcagtatgagggtgctgttggtgaggatggtaggagcccaagcatctgggacaccttcactcacgcagggagaatgccggacaaaagcaatggtgatgtagccgccgacgggtacaacaagtacaaggtgaaataaattagctgcgaatcagtttttctgctggtatcgaggtgctggtttcttactatgcctgtcaactaaccttttgtctgatctctattttttttattgaaaaaccctggcatctaaatatgaaagttgctgtcttaattttaacatgtagtttgttgggctgacgtactgtcacttctgagatcagcatgctgaatttttcagcatatggaaaggagcattcttgatctgtttcttgctttgatcttaaccatctaatgttttaggacgatgttaagctcataattgacaataacctggaggcatataggttctctatctcctggtccagacttataccaaatggaagaggtgctattaatccaaaagggatagagtactataacaatctcatagacgagctagttacacatggtgtccaagtccatgttatgatttaccagctggatctccctcagatcctggaagacgagtatggtggatggttaagtccaatgggaggatttcacggcatatgcagatgtgtgcttcagggagttcggtgacagggtttcacactggaccactctggatgaagtcaatgtggctgcaattgggtcctatgataatggacaaattgcaccgggaagatgttctgatccatttggaacaaaaaaatgtacagtggggaactcaagtgtggagccatatatagcagctcataacatgctactggcacatgcatcagctaccagactgtacagagaaaaataccaagctgtgcaaaaaggagttgttggtataaatatatatacaatgtggtcatacccactaacaaactccactgccgatttagaagcaactcaaagatttctggacttctattccggctggatactagaaccattggtgtttggagattatccaagcgtaatgaagaagaatgttggttctcgccttccgtcattcagtaaagttcaatctgaagccattcgtggcactctagatttcattggaataaaccactattattctttctatgtgaacgaccgccctttagaaaaaggcatccgtgacttctcactggacattgctgctgactatagaggtaaaacagtttgtcactcgatacatgattatccttttattgcttgcaattctttagatacattccctgggacttctgattcatttatctagagtcacacacacaatggcctacagaagttcaaaacggtgtcacatggaccaaataatttgatgatacttctgaaacatattcgcaattttatgaaacctacaagctaaatgctgtatataacaaaacaattatctgaaacaggttcgagaactgatccgccaataggtcaggtaaggtttttcatcaacaatcttcagaaattcgacatgatagatacatcccttttattttactgcagcatgccccaacatctattcccgctgatcccagaggattgcaacttttggtagagtacctgagtgaagcctatgggaaccttcccatctatatccaagagacaggttatgcaaccacaaacggcagcctccatgatactgacagggttgattacatgaagacccacataagcagcacattggctgctctaaggaatggggctaatgtgaaaggctacttcgcgtggtgcttcctggacgtcttcgagtacctgtcagggttcatgtcgcaatacggcctgtaccgtgttgatttcgaggacgaggcgctaccaaggcaagcaaggctatctgctcgctggtattctaaattcctagagaacaaggggatccatgtagaggacgagcttgatgatgcgggatcacacgttgagcaataagttttctacagcgacacattgatctgtacatcctctagcgagactattgaatactactgtgcgttgcaataagaacacttatattaaaaaaacaaattccatcaaaacctctgtccaggactccaggtaaacaccaccacaatattagggacacggtcctgccagaacaagggaccgtttgtacaactcaagcccatatctgctagagtgtgaggagaaatttcattatttgggtcttaattcggcttcctgtgatctttagggcctgttcgtttttcacggattcaagccctggaatagttcctagccggattacttctctaatttatataaattttgatgagctggaatgaatccgggttcattcctg

SEQ ID NO: 204716 - DNA, 2118 bp, Zea Mays
tgagataagcgtgggcctaccaaccacacatgtcaattctcggaatttctcagaagattggagacgggcgttctcttttcatttggagttttggactagtcgaactgacgaactggcagagcgttcaggatagacatggctgccacctttgccttcatccctctcctgctactggtctgcgtccagagcgcggctcctgttctcggcttcacaaggagcgagttccctgaagatttcgtcttcggatccgctacctcggcttatcagtatgagggtgctgttggtgaggatggtaggagcccaagcatctgggacaccttcactcacgcagggagaatgccggacaaaagcaatggtgatgtagccgccgacgggtacaacaagtacaaggtgtccaagtccatgttatgatttaccagctggatctccctcagatcctggaagacgagtatggtggatggttaagtccaatggttgtggaggatttcacggcatatgcagatgtgtgcttcagggagttcggtgacagggtttcacactggaccactctggatgaagtcaatgtggctgcaattgggtcctatgataatggacaaattgcaccgggaagatgttctgatccatttggaacaaaaaaatgtacagtggggaactcaagtgtggagccatatatagcagctcataacatgctactggcacatgcatcagctaccagactgtacagagaaaaataccaagctgtgcaaaaaggagttgttggtataaatatatatacaatgtggtcatacccactaacaaactccactgccgatttagaagcaactcaaagatttctggacttctattccggctggatactagaaccattggtgtttggagattatccaagcgtaatgaagaagaatgttggttctcgccttccgtcattcagtaaagttcaatctgaagccattcgtggcactctagatttcattggaataaaccactattattctttctatgtgaacgaccgccctttagaaaaaggcatccgtgacttctcactggacattgctgctgactatagaggtaaaacagtttgtcactcgatacatgattatccttttattgcttgcaattctttagatacattccctgggacttctgattcatttatctagagtcacacacacaatggcctacagaagttcaaaacggtgtcacatggaccaaataatttgatgatacttctgaaacatattcgcaattttatgaaacctacaagctaaatgctgtatataacaaaacaattatctgaaacaggttcgagaactgatccgccaataggtcagcatgccccaacatctattcccgctgatcccagaggattgcaacttttggtagagtacctgagtgaagcctatgggaaccttcccatctatatccaagagacaggttatgcaaccacaaacggcagcctccatgatactgacagggttgattacatgaagacccacataagcagcacattggctgctctaaggaatggggctaatgtgaaaggctacttcgcgtggtgcttcctggacgtcttcgagtacctgtcagggttcatgtcgcaatacggcctgtaccgtgttgatttcgaggacgaggcgctaccaaggcaagcaaggctatctgctcgctggtattctaaattcctagagaacaaggggatccatgtagaggacgagcttgatgatgcgggatcacacgttgagcaataagttttctacagcgacacattgatctgtacatcctctagcgagactattgaatactactgtgcgttgcaataagaacacttatattaaaaaaacaaattccatcaaaacctctgtccaggactccaggtaaacaccaccacaatattagggacacggtcctgccagaacaagggaccgtttgtacaactcaagcccatatctgctagagtgtgaggagaaatttcattatttgggtcttaattcggcttcctgtgatctttagggcctgttcgtttttcacggattcaagccctggaatagttcctagccggattacttctctaatttatataaattttgatgagctggaatgaatccgggttcattcctg

SEQ ID NO: 204717 - DNA, 2714 bp, Zea Mays
aagcgtgggcctaccaaccacacatgtcaattctcggaatttctcagaagattggagacgggcgttctcttttcatttggagttttggactagtcgaactgacgaactggcagagcgttcaggatagacatggctgccacctttgccttcatccctctcctgctactggtctgcgtccagagcgcggctcctgttctcggcttcacaaggagcgagttccctgaagatttcgtcttcggatccgctacctcggcttatcagtatgagggtgctgttggtgaggatggtaggagcccaagcatctgggacaccttcactcacgcagggagaatgccggacaaaagcaatggtgatgtagccgccgacgggtacaacaagtacaagatggaagaggtgctattaatccaaaagggatagagtactataacaatctcatagacgagctagttacacatggtgtccaagtccatgttatgatttaccagctggatctccctcagatcctggaagacgagtatggtggatggttaagtccaatggttgtgtaagatccagtaactttagatgttagggatattttcccaaaatgaacatatcttgatcatccatgctaccacaaaacgcagggaggatttcacggcatatgcagatgtgtgcttcagggagttcggtgacagggtttcacactggaccactctggatgaagtcaatgtggctgcaattgggtcctatgataatggacaaattgcaccgggaagatgttctgatccatttggaacaaaaaaatgtacagtggggaactcaagtgtggagccatatatagcagctcataacatgctactggcacatgcatcagctaccagactgtacagagaaaaataccaagtgagtaatcttgtacctgaaaacatcacatgtatcttaacattagtgttgtattgtttctttttttcttgaatacacaggagagctgagcatcgttgcattagaagaagaaatgtacatagtgtgcaaacacacacacccacacacttgtaatatcagaatctttttttttaccaagaaatactgtaggggaagcccctacagtaatatcagaatcttataccgtgacatgtgaggttgatccttataatagatcttacatttgaacatgtttcactcatgatccaaggcatcagtttgtcttctaactacaccaaaaacattccctttggctttatatcatcagatatttacccaaacataaaatgattgacctgtaggctgtgcaaaaaggagttgttggtataaatatatatacaatgtggtcatacccactaacaaactccactgccgatttagaagcaactcaaagatttctggacttctattccggctggatactagaaccattggtgtttggagattatccaagcgtaatgaagaagaatgttggttctcgccttccgtcattcagtaaagttcaatctgaagccattcgtggcactctagatttcattggaataaaccactattattctttctatgtgaacgaccgccctttagaaaaaggcatccgtgacttctcactggacattgctgctgactatagaggtaaaacagtttgtcactcgatacatgattatccttttattgcttgcaattctttagatacattccctgggacttctgattcatttatctagagtcacacacacaatggcctacagaagttcaaaacggtgtcacatggaccaaataatttgatgatacttctgaaacatattcgcaattttatgaaacctacaagctaaatgctgtatataacaaaacaattatctgaaacaggttcgagaactgatccgccaataggtcaggtaaggtttttcatcaacaatcttcagaaattcgacatgatagatacatcccttttattttactgcagcatgccccaacatctattcccgctgatcccagaggattgcaacttttggtagagtacctgagtgaagcctatgggaaccttcccatctatatccaagagacaggttatgcaaccacaaacggcagcctccatgatactgacagggttgattacatgaagacccacataagcagcacattggctgctctaaggaatggggctaatgtgaaaggctacttcgcgtggtgcttcctggacgtcttcgagtacctgtcagggttcatgtcgcaatacggcctgtaccgtgttgatttcgaggacgaggcgctaccaaggcaagcaaggctatctgctcgctggtattctaaattcctagagaacaaggggatccatgtagaggacgagcttgatgatgcgggatcacacgttgagcaataagttttctacagcgacacattgatctgtacatcctctagcgagactattgaatactactgtgcgttgcaataagaacacttatattaaaaaaacaaattccatcaaaacctctgtccaggactccaggtaaacaccaccacaatattagggacacggtcctgccagaacaagggaccgtttgtacaactcaagcccatatctgctagagtgtgaggagaaatttcattatttgggtcttaattcggcttcctgtgatctttagggcctgttcgtttttcacggattcaagccctggaatagttcctagccggattacttctctaatttatataaattttgatgagctggaatgaatccgggttcattcctg

SEQ ID NO: 204718 - DNA, 3158 bp, Zea Mays
aagcgtgggcctaccaaccacacatgtcaattctcggaatttctcagaagattggagacgggcgttctcttttcatttggagttttggactagtcgaactgacgaactggcagagcgttcaggatagacatggctgccacctttgccttcatccctctcctgctactggtctgcgtccagagcgcggctcctgttctcggcttcacaaggagcgagttccctgaagatttcgtcttcggatccgctacctcggcttatcagtatgagggtgctgttggtgaggatggtaggagcccaagcatctgggacaccttcactcacgcagggagaatgccggacaaaagcaatggtgatgtagccgccgacgggtacaacaagtacaagatggaagaggtgctattaatccaaaagggatagagtactataacaatctcatagacgagctagttacacatggtgtccaagtccatgttatgatttaccagctggatctccctcagatcctggaagacgagtatggtggatggttaagtccaatggttgtgtaagatccagtaactttagatgttagggatattttcccaaaatgaacatatcttgatcatccatgctaccacaaaacgcagggaggatttcacggcatatgcagatgtgtgcttcagggagttcggtgacagggtttcacactggaccactctggatgaagtcaatgtggctgcaattgggtcctatgataatggacaaattgcaccgggaagatgttctgatccatttggaacaaaaaaatgtacagtggggaactcaagtgtggagccatatatagcagctcataacatgctactggcacatgcatcagctaccagactgtacagagaaaaataccaagtgagtaatcttgtacctgaaaacatcacatgtatcttaacattagtgttgtattgtttctttttttcttgaatacacaggagagctgagcatcgttgcattagaagaagaaatgtacatagtgtgcaaacacacacacccacacacttgtaatatcagaatctttttttttaccaagaaatactgtaggggaagcccctacagtaatatcagaatcttataccgtgacatgtgaggttgatccttataatagatcttacatttgaacatgtttcactcatgatccaaggcatcagtttgtcttctaactacaccaaaaacattccctttggctttatatcatcagatatttacccaaacataaaatgattgacctgtaggctgtgcaaaaaggagttgttggtataaatatatatacaatgtggtcatacccactaacaaactccactgccgatttagaagcaactcaaagatttctggacttctattccggctggtatcttcttgactcttgttgcatcacaaatgtggaacatttatagagataatcgaaaacaatatgtatcgattgtaggatactagaaccattggtgtttggagattatccaagcgtaatgaagaagaatgttggttctcgccttccgtcattcagtaaagttcaatctgaagccattcgtggcactctagatttcattggaataaaccactattattctttctatgtgaacgaccgccctttagaaaaaggcatccgtgacttctcactggacattgctgctgactatagaggtaaaacagtttgtcactcgatacatgattatccttttattgcttgcaattctttagatacattccctgggacttctgattcatttatctagagtcacacacacaatggcctacagaagttcaaaacggtgtcacatggaccaaataatttgatgatacttctgaaacatattcgcaattttatgaaacctacaagctaaatgctgtatataacaaaacaattatctgaaacaggttcgagaactgatccgccaataggtcagcatgccccaacatctattcccgctgatcccagaggattgcaacttttggtagagtacctgagtgaagcctatgggaaccttcccatctatatccaagagacaggaaagtctatttctcagttgcaggcctcaaaattctagttcagatagtctaagaagtacctctaaatgactacgcagatatatctgtttccgaaaacaaaaaaatggctattcagacatcaatgtgatatatatatctctgtttctggaacataaactttgtctggtgaaaagtacttgatgttttcttacttttcatgatcttcaatggccactttgaccacttctcatgataatataacaaagttatatgactacgaaaggaccttttaagacagatctatgctatttattatgatttttatgctatcaatctattatatcaacagttgttgacagtcaacagttatgttttaaaattttttatcacatcaatatttatggacagagatacaattcgacttatactttcttccctctcctttctctcttcaggttatgcaaccacaaacggcagcctccatgatactgacagggttgattacatgaagacccacataagcagcacattggctgctctaaggaatggggctaatgtgaaaggctacttcgcgtggtgcttcctggacgtcttcgagtacctgtcagggttcatgtcgcaatacggcctgtaccgtgttgatttcgaggacgaggcgctaccaaggcaagcaaggctatctgctcgctggtattctaaattcctagagaacaaggggatccatgtagaggacgagcttgatgatgcgggatcacacgttgagcaataagttttctacagcgacacattgatctgtacatcctctagcgagactattgaatactactgtgcgttgcaataagaacacttatattaaaaaaacaaattccatcaaaacctctgtccaggactccaggtaaacaccaccacaatattagggacacggtcctgccagaacaagggaccgtttgtacaactcaagcccatatctgctagagtgtgaggagaaatttcattatttgggtcttaattcggcttcctgtgatctttagggcctgttcgtttttcacggattcaagccctggaatagttcctagccggattacttctctaatttatataaattttgatgagctggaatgaatccgggttcattcctg

SEQ ID NO: 204719 - DNA, 2330 bp, Zea Mays
gttgccaaggccactcccaggcgcggcggccggcgcaagtctgaacttccccgcccttgaattcgacctccgccacgaccgacggcccgaacggccgaacccgaccgacgccggcgggagaggcagaaacggagagaaagagatgggagtggggggcagcttctgggacctgctgaagccctacgcgcggcacgagggcgcggggtacctacgcgggcgccgcgtcgccgtcgacctctcattctgggtcgtctcccacagcaccgccatcctggcgcgcttgccgcgggcgcggcgcccgcacctccggaccaccttctttcgcaccctctccctcttcgccaagatgggcgtgttccctgtgttcgtggtggacggcgagccgtcaccgctcaagtcgcaggcgagggcggcgcgcttcttccgaggctccgggatggacctggccgcgttcccgagcacagaggcggagtccagtgtgaccgctgcaccggtcaaaaggaggaatgctgcattcacgcgatgcgttgaggagtgcgtggaactgcttgaatatcttggcatgcctgtactgagggcaaaaggtgaagcagaagccctttgcgcccagctgaataatgaaggtcatgtaggtgcttgcatcactgcagacagtgatgctttcctcttcggggctaagactgtcgtaaaggtcctcagatcaaattgcaaggaaccttttgagtgctaccacatagcagatattgagtctggtcttggactaaagaggaagcaattggtggccatggcgcttcttattggcagtgaccatgatttgcatggggtgcctggttttggcctggagactgcacttcgttttgtgcagctatttgatgaagatgaaattttagataagttgcatgaaattggtaaaggggtgtatccgttcctcaaaggatttgacaatccacatattgatgatctcccatcatcgtccaagaaaagcccaattaaatcgccgcactgctcacattgtggtcacccgggcagcaagaaaaatcatatcaaggatgggtgcaattattgcttggtggattcattagagaactgcgtggaaagaccagctggattcaaatgtgaatgtcctagttgtgacgagaaaagggtgttcccttgcttagttggagtaagcctgatgttgaagctttggttgacttattaagttataagcagaattgggaaccatcttatattcgccaaaggatgcttcctatgttatcaaccatatatttaagagaggtggcatcttcttcgtctacaccattgcctctttgtgatcagtatgagtttgattcaattgagcggactaaaataaggcacggtcacccttattacttggtgaaatggaagagagctacccgtggtatgaattctaatatgcctagcaagaagccagtaacggagggagaaacaagtagcgaggtagtggtgttggatgacgatgacaatgaggatacagtggtttgcgagtctccagagttattagatgaacctgatgttccacaagtgcttatggatgatggctgttgctttctattgactgatgaagacattcaacttgttggtgctgcttttcctaaggaaacagcaaggtttcaggaagaacagaggctgaaagaagcaagatcaagatcgcggaaatccaaaacgagcttagcagacagtgggtgcgagacacctaaaggtccgagacctagtggggtgcagcttagcatcacagagttctaccgctcgaagaaagggcaggacatggaatctgggaagaagaagcaggcgggagaggggcacgctgctgcgagggatggctcgagaaaatcctctgacagggacctcaacaacaagagcctgccgaagtccgttcgccgccgcctcctcttcgattgctgaggactagcctggccttctggtgagcactgtaatcttgctgtgccactgttgtaaatgacctagagaacgccttaacctattagccggtgtaggtatccgcggctcattttgtacagggaacagagcatcatctctgtcaagaggaaaaatggagcaggtcttagttcagaacgattatctgaacctcatctttgtattggttttaagtgcttttcgtggaactcactttcaattctagaggaatgggtcgcgtgccgctgctagagtaatcattctgaactaaaaaaaaagcttttttttggttttatgtctgcttttatgcctggacaatagctgacagacttgatgctgtcatgttacattatgcggtagtactactccagatattagagtgctgaatgtaa

SEQ ID NO: 204720 - DNA, 1686 bp, Zea Mays
ctgggtgcacgtgagattgtttctaatcagaaagtgcaagactccggtggctcatctcctcacaaccagtcaagttccaagcttggtactccaggtccagatttctggtcatggttacctccagtacaagatagcagtaaacaaaaggaaagcaatactggtttgaagccatccaaaaaattagataccttttccagtcagcctgatctgttgatggaaaaggaacgcttggcggattctttaccactccctttcgagacagctttcttcaagaaggaagatcgatctcttcctcccttccaatcatttgctgagcctgagaatgtggattcctcggccgatctggccgctgacaaagaggacacgttcgaagaacagttctcgaaaaatgcagccgaggtggctcgcgcgctcagtgagagcgtcgggaaaccatcacacggaatacatctagatggctcaatgtggtggaaggaagtaggtgtagaacgaagacctgatggtgttgtttgcaagtggaccgtgatcaggggagttagtgctgatggcgctgttgaatgggaagacaaatactgggaggcctcagaccggttcgatcataaagagttaggctcggagaagtctgggcgtgatgctgcgggcaacgtttggcgggaatactggaaggagtcaatgtggcaggattacacatgtggggttatgcatatggagaagaatgcagacaagtggggacagaacggtaaaggggagcagtggcaagagcaatggtttgagcactatgactcgaccggcaaaaccgaaaaatgggctgataaatggtgcagcttggatccaaacacaccgctggatgtcggccatgcccatgtctggcatgaaagatggggcgagaagtacgacggccttggtggcagcgaaaagtacaccgacaagtgggccgagcgttcggagggcgacgggtggtctaaatggggcgacaagtgggacgagcacttcgacctgaatgggcatggcgtcaagcagggggagacatggtgggcgggcaagcatggggaccggtggaaccgcacctggggtgagcggcacaacgggtctgggtgggtgcacaagtacgggcgcagcagcagtggcgagcactgggacacgcacgccccgcaggacacgtggtacgagcggttcccacactttgggttctaccactgctttgagaactcgccgcaactccggtccgtgaagaggcagccgccgccaccacgaaaatgaagcctgaagagatcatgctggcatcagcagcatgtgctgttgtgaactgaatgttcagactgatatgaatagaaaggcctgtagaagttttgccgtatattctgaaacaccttttttcttttagcctagaaagattatgctggtaagcttttgcccaaagtctaatgcacgcagttactgcgacttcttctgtgatgttttttttttggtgtcagttacctcctgatttcccaaacactcagactagcactgctgggattgggaatgtatctggccagtcatgagactgagatttcccaaagtttgtatgccacagtgctattctatggtctagcagcaggttggagttctgcttaaatgaagcagcatggaacatcaagacttcagggactgaatatgcttaaaattgctcggaatgcgattggt

SEQ ID NO: 204721 - DNA, 2497 bp, Zea Mays
cttcttcatataggatcaaagagctgttcccatttaggcctgtttcatagtgagcgcagcaattctttcacaaggagctacatctttccttttcactgagtacaagtatgttggattattcatgggcatctttgcaatccttatattcctcttccttgggtctgtcgagggattcagcacgaagagtcaaccttgccactatatcaaggaccagacttgcaagcctgcccttgctaatgccatcttcagtactatagcttttgtgcttggtgcagtcacctcactagtttccggctttcttggaatgaagatcgcaacttatgcgaatgcccggacaactttagaggccagaaagggtgtcggaaaggcatttattactgccttccgagctggtgcagtaatgggcttcctgcttgctgccagcggtcttttggttctttacattgctatcaatttgtttggaatttattacggtgatgactgggaaggtctttttgaagctattactggttatggccttggtggttcttctatggctcttttcggccgcgttggtggtggtatttataccaaggctgctgatgttggtgctgaccttgtggggaaggtagaaagaaacattcctgaggacgatccaagaaacccagctatctctttggctcatatgctgaatcatcatgtgctgctcttgttgtggcctctatctcgtcttttggaatcaaccatgaatttactccgatggtgtaccctcttctcgtcagttctgttggtattatagcatgtctcataacaacgctgtttgcaactgatttcttcgagataaaggctgtggatgaaatagagcctgctctcaagaaacagctcataatttccacaattgtgatgaccattggcattgcactaatcagttggcttggtcttccatacactttcactattttcaactttggagtccagaagacagtgcaaagctggcaattgttcttgtgtgtggcggttggtctctgggctggcctagtcattggttttgttactgagtactacacaagcaatgcctacagccctgtacaagatgttgctgattcctgcagaactggagcagctactaatgtcatttttgggcttgctttgggttacaaatcagtcattatcccaatttttgctattgcgtttagtatcttcctcagcttcagccttgctgccatgtatggtgttgctgtggctgctcttggaatgctgagcaccattgccacaggtcttgctattgatgcatatggccctatcagtgataatgctggaggaatagctgaaatggctgggatgagccataggattcgtgagagaactgatgctctagatgctgcaggaaataccacggctgcaattgggaagggttttgccattggctctgcagccttggtttcccttgcactatttggtgcgtttgtaagccgggctgctatctccactgttgatgttctgactcctaaagtattcatcgggcttattgtcggtgctatgctcccgtactggttctcggcaatgaccatgaagagtgtgggcagtgctgcgctcaagatggtggaggaagttcgtcggcagttcaacaacatccctgggctcatggaaggcaccacaaagcctgactacgcaacttgtgtcaagatctcaacggatgcatccatcaaggagatgatccccccaggtgctcttgttatgctcacaccactgatcgttgggattctatttggggttgagaccctctctggagtccttgctggtgcccttgtctctggtgttcagattgccatttctgcatccaacactggtggtgcctgggacaacgccaagaagtacattgaggctggagtttcagagcatgccaggacccttggcccaaaaggttctgaccctcacaaggcggctgtcattggtgacaccattggagatcctctcaaggacacgtctggcccttccctcaacatcctcatcaagcttatggcggttgaatcccttgtcttcgcccccttcttcgccgcccatggtggcattctcttcaaatggctctaagccagcgagagacgcaggataaaggccgtagttttgcaaggcgagtagagcagtatgtcagtaatacagcatctatggcatgtgcttttgctcgtccagttcatgagccccgttgtgtatttggtttccgttttcttggttggagtttttagttccaaggtccgatcatgttttgatcccataaattctcttccagccttcgagcaactgagtccatcttcctaagtcatcagccccagcgagacattgaagcatggggaaacttaaacagtatggtgatgattaatctcagcattttttttcttgcagcaatcaatatggactttgcttaaaatttcgttgtcttttcaaaacgatatgcaagcaaaatggaagtgatgttctttgaaactttgtttcaatgctatagcaaaggtttgcattttac

SEQ ID NO: 204722 - DNA, 2502 bp, Zea Mays
attaactgtagtcggtccagacttcatcttgtgggatccacatggtctacatcctgccgcgctttggagctacatctttccttttcactgagtacaagtatgttggattattcatgggcatctttgcaatccttatattcctcttccttgggtctgtcgagggattcagcacgaagagtcaaccttgccactatatcaaggaccagacttgcaagcctgcccttgctaatgccatcttcagtactatagcttttgtgcttggtgcagtcacctcactagtttccggctttcttggaatgaagatcgcaacttatgcgaatgcccggacaactttagaggccagaaagggtgtcggaaaggcatttattactgccttccgagctggtgcagtaatgggcttcctgcttgctgccagcggtcttttggttctttacattgctatcaatttgtttggaatttattacggtgatgactgggaaggtctttttgaagctattactggttatggccttggtggttcttctatggctcttttcggccgcgttggtggtggtatttataccaaggctgctgatgttggtgctgaccttgtggggaaggttattgctgacaatgttggtgataatgttggagatattgctggaatgggatcagatctctttggctcatatgctgaatcatcatgtgctgctcttgttgtggcctctatctcgtcttttggaatcaaccatgaatttactccgatggtgtaccctcttctcgtcagttctgttggtattatagcatgtctcataacaacgctgtttgcaactgatttcttcgagataaaggctgtggatgaaatagagcctgctctcaagaaacagctcataatttccacaattgtgatgaccattggcattgcactaatcagttggcttggtcttccatacactttcactattttcaactttggagtccagaagacagtgcaaagctggcaattgttcttgtgtgtggcggttggtctctgggctggcctagtcattggttttgttactgagtactacacaagcaatgcctacagccctgtacaagatgttgctgattcctgcagaactggagcagctactaatgtcatttttgggcttgctttgggttacaaatcagtcattatcccaatttttgctattgcgtttagtatcttcctcagcttcagccttgctgccatgtatggtgttgctgtggctgctcttggaatgctgagcaccattgccacaggtcttgctattgatgcatatggccctatcagtgataatgctggaggaatagctgaaatggctgggatgagccataggattcgtgagagaactgatgctctagatgctgcaggaaataccacggctgcaattgggaagggttttgccattggctctgcagccttggtttcccttgcactatttggtgcgtttgtaagccgggctgctatctccactgttgatgttctgactcctaaagtattcatcgggcttattgtcggtgctatgctcccgtactggttctcggcaatgaccatgaagagtgtgggcagtgctgcgctcaagatggtggaggaagttcgtcggcagttcaacaacatccctgggctcatggaaggcaccacaaagcctgactacgcaacttgtgtcaagatctcaacggatgcatccatcaaggagatgatccccccaggtgctcttgttatgctcacaccactgatcgttgggattctatttggggttgagaccctctctggagtccttgctggtgcccttgtctctggtgttcagattgccatttctgcatccaacactggtggtgcctgggacaacgccaagaagtacattgaggctggagtttcagagcatgccaggacccttggcccaaaaggttctgaccctcacaaggcggctgtcattggtgacaccattggagatcctctcaaggacacgtctggcccttccctcaacatcctcatcaagcttatggcggttgaatcccttgtcttcgcccccttcttcgccgcccatggtggcattctcttcaaatggctctaagccagcgagagacgcaggataaaggccgtagttttgcaaggcgagtagagcagtatgtcagtaatacagcatctatggcatgtgcttttgctcgtccagttcatgagccccgttgtgtatttggtttccgttttcttggttggagtttttagttccaaggtccgatcatgttttgatcccataaattctcttccagccttcgagcaactgagtccatcttcctaagtcatcagccccagcgagacattgaagcatggggaaacttaaacagtatggtgatgattaatctcagcattttttttcttgcagcaatcaatatggactttgcttaaaatttcgttgtcttttcaaaacgatatgcaagcaaaatggaagtgatgttctttgaaactttgtttcaatgctatagcaaaggtttgcattttac

SEQ ID NO: 204723 - DNA, 2663 bp, Zea Mays
aaaattggtcgtaatagtttggtcgtatggtcagaagctgcctgtggggtaacagatgaggggataagtcccagcggtctgagaagtacacaggagtggccagtggggttgcagataaagagataagttctcgcagcacgtggtcctcgctactcaatcttcactgcagctgatattaactgtagtcggtccagacttcatcttgtgggatccacatggtctacatcctgccgcgctttggagctacatctttccttttcactgagtacaagtatgttggattattcatgggcatctttgcaatccttatattcctcttccttgggtctgtcgagggattcagcacgaagagtcaaccttgccactatatcaaggaccagacttgcaagcctgcccttgctaatgccatcttcagtactatagcttttgtgcttggtgcagtcacctcactagtttccggctttcttggaatgaagatcgcaacttatgcgaatgcccggacaactttagaggccagaaagggtgtcggaaaggcatttattactgccttccgagctggtgcagtaatgggcttcctgcttgctgccagcggtcttttggttctttacattgctatcaatttgtttggaatttattacggtgatgactgggaaggtctttttgaagctattactggttatggccttggtggttcttctatggctcttttcggccgcgttggtggtggtatttataccaaggctgctgatgttggtgctgaccttgtggggaaggtagaaagaaacattcctgaggacgatccaagaaacccagctatctctttggctcatatgctgaatcatcatgtgctgctcttgttgtggcctctatctcgtcttttggaatcaaccatgaatttactccgatggtgtaccctcttctcgtcagttctgttggtattatagcatgtctcataacaacgctgtttgcaactgatttcttcgagataaaggctgtggatgaaatagagcctgctctcaagaaacagctcataatttccacaattgtgatgaccattggcattgcactaatcagttggcttggtcttccatacactttcactattttcaactttggagtccagaagacagtgcaaagctggcaattgttcttgtgtgtggcggttggtctctgggctggcctagtcattggttttgttactgagtactacacaagcaatgcctacagccctgtacaagatgttgctgattcctgcagaactggagcagctactaatgtcatttttgggcttgctttgggttacaaatcagtcattatcccaatttttgctattgcgtttagtatcttcctcagcttcagccttgctgccatgtatggtgttgctgtggctgctcttggaatgctgagcaccattgccacaggtcttgctattgatgcatatggccctatcagtgataatgctggaggaatagctgaaatggctgggatgagccataggattcgtgagagaactgatgctctagatgctgcaggaaataccacggctgcaattgggaagggttttgccattggctctgcagccttggtttcccttgcactatttggtgcgtttgtaagccgggctgctatctccactgttgatgttctgactcctaaagtattcatcgggcttattgtcggtgctatgctcccgtactggttctcggcaatgaccatgaagagtgtgggcagtgctgcgctcaagatggtggaggaagttcgtcggcagttcaacaacatccctgggctcatggaaggcaccacaaagcctgactacgcaacttgtgtcaagatctcaacggatgcatccatcaaggagatgatccccccaggtgctcttgttatgctcacaccactgatcgttgggattctatttggggttgagaccctctctggagtccttgctggtgcccttgtctctggtgttcagattgccatttctgcatccaacactggtggtgcctgggacaacgccaagaagtacattgaggctggagtttcagagcatgccaggacccttggcccaaaaggttctgaccctcacaaggcggctgtcattggtgacaccattggagatcctctcaaggacacgtctggcccttccctcaacatcctcatcaagcttatggcggttgaatcccttgtcttcgcccccttcttcgccgcccatggtggcattctcttcaaatggctctaagccagcgagagacgcaggataaaggccgtagttttgcaaggcgagtagagcagtatgtcagtaatacagcatctatggcatgtgcttttgctcgtccagttcatgagccccgttgtgtatttggtttccgttttcttggttggagtttttagttccaaggtccgatcatgttttgatcccataaattctcttccagccttcgagcaactgagtccatcttcctaagtcatcagccccagcgagacattgaagcatggggaaacttaaacagtatggtgatgattaatctcagcattttttttcttgcagcaatcaatatggactttgcttaaaatttcgttgtcttttcaaaacgatatgcaagcaaaatggaagtgatgttctttgaaactttgtttcaatgctatagcaaaggtttgcattttac

SEQ ID NO: 204724 - DNA, 1726 bp, Zea Mays
gacggatccgacacacttccgaattccgatccacccacttcatcaccaaggccgtcgtctctccccacgccggccgaacggatggcggcggcgccgactgcggatgccatggacgtcgacgcgccggctaggacgctgactacctctccggccaccaagttgcgctcccctcacgacctcctggcagagacacgcgcctccatcgagaaagtcgcagcccggatactcgccatcaagaaagacggcgcccccaagtcggagctccgcgagcttgtcactcagatgtctctgcacctcgtcacgctacgccaagtgaacagagagatactgatggaggaggacaaggtcaaggcggagacggaggccgcgaaggcgccggtggactccacgacgctgcagctgcataacctgttgtacgagaagaaccactacgtgaaggccataagagcgtgtcttgactttcagacgaagtatccggggatagagcttgtgcccgaggaggagttccagcgttccgcgcccgcagacatccttgagaagaccctcgctgccgacgcctcccacgacctcatgctcaagcgcctcaactttgagctcgtccagaggaaagagttatgcaagctacatgagaaattaggacaacagaggggcagcttgctggagacaattgctaatcagaaaaagtttctttcaagcctgccatcacatttgaaatcattgaagaaagcatcactgccagtgcagcaacagttggggatgcaacataccaagaaactaaagcagcaccatgctgctgagttacttcctactccgctttatatagcatacactcagctgctagggcagaaagaagcatttggagagaatattgaagtagagatcgcgggaagcacaaaggatgcccaaatatttgctcaacaacaagccaagaaggaaaacacaggcactctttcaagtggcgacaacagaatggatgatgatgtgattgatgatgaagaagatgctcagagaagaagatcaagatccaaaaagaatgtggtgaaggaagctaataatccagcagtggcctatcaacttcacccacttaaaattatacttcatgtatatgatactgaagattctggtagcaaacgccgtaaactcatcaccctgaggtttgaatacttggcaaagttgaatgttgtttgtgtcggaattgaagattcagagggtctggacagtaatatcttgtccaacctatttccagatgacactggtttagatctgcctcaccagatggctaagatttatgttggggaggttccaaacttcagcgacaaggattcaaggccatacaagtgggcacaacatttaggtggtatcgactttttgcctgaagtgcctccatctgttggggatgattctagcagagcattaaacactgctgatttgtcatctgggcttgctctgtaccgtcagcagaaccgtgcacagactattttgcagaggatccgcttgcggaaagttgcacagatggctcttatgtgagtcactggtctatgttttttgctgtttgggacatcgatgaaaaaaaccggatggcagattagcctgagagtgaccgtgtaatttgactgacgattttgagctaatgatgcttttgcttcattgcacatgtcattctgagttatggcaatactatgaatcatttaccaggcagaaattgtgaaacataccatttatatct

SEQ ID NO: 204725 - DNA, 1819 bp, Zea Mays
gacggatccgacacacttccgaattccgatccacccacttcatcaccaaggccgtcgtctctccccacgccggccgaacggatggcggcggcgccgactgcggatgccatggacgtcgacgcgccggctaggacgctgactacctctccggccaccaagttgcgctcccctcacgacctcctggcagagacacgcgcctccatcgagaaagtcgcagcccggatactcgccatcaagaaagacggcgcccccaagtcggagctccgcgagcttgtcactcagatgtctctgcacctcgtcacgctacgccaagtgaacagagagatactgatggaggaggacaaggtcaaggcggagacggaggccgcgaaggcgccggtggactccacgacgctgcagctgcataacctgttgtacgagaagaaccactacgtgaaggccataagagcgtgtcttgactttcagacgaagtatccggggatagagcttgtgcccgaggaggagttccagcgttccgcgcccgcagacatccttgagaagaccctcgctgccgacgcctcccacgacctcatgctcaagcgcctcaactttgagctcgtccagaggaaagagttatgcaagctacatgagaaattaggacaacagaggggcagcttgctggagacaattgctaatcagaaaaagtttctttcaagcctgccatcacatttgaaatcattgaagaaagcatcactgccagtgcagcaacagttggggatgcaacataccaagaaactaaagcagcaccatgctgctgagttacttcctactccgctttatatagcatacactcagctgctagggcagaaagaagcatttggagagaatattgaagtagagatcgcgggaagcacaaaggatgcccaaatatttgctcaacaacaagccaagaaggaaaacacaggcactctttcaagtggcgacaacagaatggatgatgatgtgattgatgatgaagaagatgctcagagaagaagatcaagatccaaaaagaatgtggtgaaggaagctaataatccagcagtggcctatcaacttcacccacttaaaattatacttcatgtatatgatactgaagattctggtagcaaacgccgtaaactcatcaccctgaggtttgaatacttggcaaagttgaatgttgtttgtgtcggaattgaagattcagagggtctggacagtaatatcttgtccaacctatttccagatgacactggtttagatctgcctcaccagcagggatatgttttgttactacatctgtatctagtatcttcttggggcctctcatttacgtcagctgaaatagtgacttgtcaattttctcagatggctaagatttatgttggggaggttccaaacttcagcgacaaggattcaaggccatacaagtgggcacaacatttaggtggtatcgactttttgcctgaagtgcctccatctgttggggatgattctagcagagcattaaacactgctgatttgtcatctgggcttgctctgtaccgtcagcagaaccgtgcacagactattttgcagaggatccgcttgcggaaagttgcacagatggctcttatgtgagtcactggtctatgttttttgctgtttgggacatcgatgaaaaaaaccggatggcagattagcctgagagtgaccgtgtaatttgactgacgattttgagctaatgatgcttttgcttcattgcacatgtcattctgagttatggcaatactatgaatcatttaccaggcagaaattgtgaaacataccatttatatct

SEQ ID NO: 204726 - DNA, 2903 bp, Zea Mays
cgccgcaccgtgccacccgcgcggcccgcctgctacaccccatccggccgtccccaagccgggagcggaggcgcaaaaccctccttccgctgctccggcgccatgggcggcgcctccaagctgctctcctccttcctcctcacctcttccccgctccgcctccgacccgctactgccgccgccgccgcgctgttcctatccccgcccgcggcggcctcgcgccgcctgttcctgctctccttaccctccccgcaccgtaccctctacatctcgtccgcttccgcctcccttccgcacggctccagctcggcctgcccgccgccaccgctccgagcgcctttccccgagtggtcccgcctcgtcgaccgacttgccgccaccggatacggctccggcctgcccttttccgctgacgatctcgccctcgtgtccggatgcgtcctgtcggacggggagcaggccgctgtctccacctgcctcgccttcgcgcgcgaccggcctgacctcctgagttcgcttcaaaggaaggacgtggaggtcctggtgggcaatgtggcgccgtctctgttcaaggacggggaggcatcaggacagcggcttcggcgctaccttgctggggaagaaaccgacgtcactgtttcagagagagctggaactgttgatattgttcgatatctgctaagttacatatacggttcttctgacatctgctcagaagacaaggaactcactgatttggccgtgagaaatatcatggttgagttagtgagttttagtgctctttcccagtcttccacttctgtggaattaactcccaaccaaatttgctcgagtcagcatgaacaattttccaggcctccagggcaaaatatcgaaatgaagcgaggtgattggatttgcacaagatgtagcttcatgaacttcgcaagaaacgttaggtgccttgagtgcaatgagcagaggccaaagaagatgttgactggtggagagtgggaatgccctcagtgtgatttctataactatgggaggaatatgtcatgcttaaaatgtgattgcaagaggccagcaacaatcccaccgcatcctacatctgttggtgctgatttaggtggtgtggtacagcagcttctcaaggtaacaacaagtgttggtaaatctgaaattgagagaaaacttgctgaaaatgatgaaaaggcagagagatggttgagcaaagtatctcaacttcatgattcagcagacttaagtagtctagcagaagatgaggactttcctgagattatgcctatgcgcaagggggtgaataagtttgtggttagcacacgcaaaacaccactggagagaaggcttgcaaatgcacagtacagcagtaacaatatcctcacattgtccgacccaaagataagtcaaactttggacaggatacttgggagttcagctcctactgcagccccaaacaatcaatctgttactagtgatgcaactatggaagctccgaagaaatcaatagatcacctcagtggcattgaccctgttccctttgagcccctgtctgcagatctctttgctaaaccagagagtaatgatcgacagagaaatgagaatgaaaaaaacaatgtagaagatggcagttctatggcaaataatacagtgcctttacctgagaggcgaagtatggaatcattagatactgctgagaaatggtccgagaaagtagcagaacttgacaatgtaaaggattctccaagtgcaatttccgatgaaaattttcctgagattatgccaataaggaaaggtgaaaatcgatttgttgttagtaagaaaaaagatcgctcattgacatcacagcagtacaaaaggcgcagtattctcgagcaggcagacagttctgattttgtcccatttgttccttttcctcctggctactttggcaagaaagatacgccaatagagagtactacacacacaggaattatgtcaggagacggtcagccaaaaggtaacctgaataatgagaactggaacaggaattactatcaatatcaatcacaatctcaagaatttaggcctagtggtaatgcatatactggctctgggaacacaggcaactccgaggggaacattaatgggagtaggggcgaatctacttaccatgaagctaactttgaaaagcgatcttattataactcaggttatagcaacaacggttattggagcagcgataacaataacagcaacaatgcctggagtgacaactctaattataacaacaataatgcttggagtggtaacaattcctataacgggtgtattaggaacgacaataccagctgcaacagcaatcgtgattataactacaatgatacatggagtgccagcagcaacagtgcatggagcagcagcaacaacaataaccagagtggtccatttgctgacaatagcaatgccactagaagcagtagttccgtgaatgctaatcactcggttcacagctcaggttatggaggaaactcgaacagaggttatactggaaagagcttggaaggatctgctgtgaaggatcctgatcctctagacatgtctgaggaagctaaggctgagagatggtttaggagggcagctcagataaaggacatctctgagctggcgaatattcccgacgaggacttccctgagataatgccgatgaggaagggggtgaatagattcgtcgtgagtaagaggaagacgccattggagaggagattaacatccccgcaatacagaaggaacctgccaatcgttagttctgaaacggacaaagatgccaactgaaaacagagcttagataaagagaagtcggcattcagcaggtggtgccgatgaaccagcttggtgcttgcctcctgcactggttggtcctg

SEQ ID NO: 204727 - DNA, 1403 bp, Zea Mays
ttcccttttagttaaaattccacgacaataatattcgctaagaatttcttggcagcgatggaaatatttatttgtaacatgccaatcaaaagctatggtattgttttcatcttattgggttatcttttgcttatttagatcaaggcgatcatggaagccaaatgttcaggagaagcgtcttttcagctatgttcatgatcagcacattagagtcaaggttaccacacacgcacttcgatgtattgacaaagctggtgggatagatgaatacctcctgaagacaccttacaataaaatggataccgagatggggatagtgtggaaagcaaatattgaaaagatgtattcagatttggctgaaatagaagtaggcttcttccctcccgaggttgaggctaagattaaaaagggcttagacgaggttcgcgctgcgaagatagacttttgtagggaaggaagacgagctttggcaaggcaaagccagctagaagcaagtagtgttggtgatgaccaaacgagtgaagtcatagatacaaatgaagaggtatctgatgctgctgctaaagtctgagcctaaacctatgtgcctgtcttgaatgatcagaggaggcagcaaatcattggatgcacctgggcaaataatggaaggcttgctacttgcgcactaactgtacccccttttcgggagcagcagtgtatgttaagccagcatatcttgtatatcaatgtcttgccgttgtaaagcagcttttatgtgttggaaactttgtacaattattgagatctcaaaagcctgaattgtgggggtagtttgtcttttagaatctatcattttatgcagcttaactgaattgtcgaaataataatgctaaagtagctagaggtctgacattctagctcatttctgttccactcctatgttgcttaactgaatttgtagggccgagtgatctgggtacagttgttattttgtttttgcggataactgtgacacgatttctatttgcttcaactcatctcatggccaatgttcatctcaggcgcggaacttccaatttgacgccttccgatatatattacgtggatcacttgttaaggctgctggaaaatgtttctgatgttccatccgcccgcaaaggctagcttggcgaggacgtcgccgagcgcatctttggttgctgcgaagtatttctcggcctccggggtgctcttgatctttgcggcagtagccacaacgacaccgtggaatgtcttcgcagatttgaaccgagaatctgcaactcaaatgcctagagttagagttagagctaagctgccgatggttcagagcatgttcatagaactgatgaaacattcgaatttcataaggagcactctgcttttccgcagaaaaaaaaaggaaa

SEQ ID NO: 204728 - DNA, 1558 bp, Zea Mays
caaattcccttctccctcacgtctctttctctccccaagccgcctcctccctgccgttccgtggagcaccaggccagtgccgttccgatggtcattccaagccagtgccgttctcctttggctgtccctgctccagccgtgagctcacccaggccacggcctcgtcgaaccgcacagcccctgcgctccttccccagccgcgcttagcccagccctccctgctcgatctccttcgagccgtaacggctccctggcgtgtccggctccctgcccctctccatggcgtcgcccagctctagctcgccccccctctgatctgtgcgcaggggtttcttccatggcgagctcccctgcaaacttcatctagccgccgaccgagtttccttggtggtcgcttacccccagcatcggccagagcttgctgtcattccccaacaaacatgtggttgtaggtgagagatttcagaagtctgttggatgaagaaaagagaagtgaaatttgtgcagcgcccgtcaggtgttaggtttaatagatattgtgtctaccgtgtgagggaatcgcgccagcttcctttgggtttgggactgggagctccatcgctctatggtcacttggtcgtggaagggcttcttattgcagtcatagtgttccagctctccaggaagagctacaaaccaccaaagaagccactcactgaaaaggagattgatgagctatgtgatgagtgggagccagagctgctatgccctccaatcaaggagggggccaaaatagatgctccaacattggaaagtgccgttggaccacatacgattgttgattgttgatggtaaagaagttgtgaactttgcatcagcatgaggtctggagtctagacacagcgttgcaaactgaggtttaatcatcttagcaactacggtatgtgaccctgagcgcgtgattgttgcgaaacaacgaccacctcggtctacaccttaaaggtttgcgtgacatggcttttcatagtgctcaattggatccatcccctgagcataggagaaaagtatcaatttgtacagtggatccaagtattctataaagcatgcatcctccaatttcccacaagcgagaatggcatgatatgatggatgaaatggctgttgcggtcaaatgtctttcaaggatcaattgtctttcaagaaccacacttatgtattggtttgtgtgcagttcaagctctgcaaggtaaggtctgttcagtttggccagaaagtcatcccctacctgaacacctacgacgaccgcaccatccgactccgaccctctcatcaaggccaacgacaccatcaagatcgatctggagaccaacaagatcatggacttcatcaagttgtatttgccatttcatagacttcatcaagttatatacttagttaggctcaatgttaacacaaacagttgatgagcaagtttaaatttagagtacacttatgtatgagttatttgacaatacttatttatgagatattgaatattatttatctatattatattaattatagtgttattaaatatatg

SEQ ID NO: 204729 - DNA, 2658 bp, Zea Mays
agcagagagcgtgtcgataaaaaggcgtaaaagccatcgccactctttccccatcccacgctgccctcggcgctgcgcctggccccggcacctacctcccccctccccacctcgccgccggcgggtggagtcgggctggagcagccgctctcctctgttaccccctaaccccctataaagaaaaagaaaaaaacagagagagagcgagcgaccggcggctcggcagccatggggcacggcgtcagctgcgcccgcaccggtgacgagcacgactacttccgcgcggcgcaggtcggggacctcgaggccctggaagcgctcctcgacgctgacccctcccttgcccgccgcgccacgctctacgaccgcctctccgcgctccacatcgccgccgcgaatggccgcctcgaggtgctgtcaatggtcttggatcacggggtgccgccggacgtggtgaatcggcacaagcagacgccgctgatgctcgcggcgatgcacggcaagaccgactgcgtgctgaagctcctgcaggccggcgccaatatcctcatgttcgactcccagcacgggcggacctgcctgcaccacgcgtcctacttcggccacgtcggctgcctgcaggccatcctcacggcggcgcggaccacgccggtggccaactcatggggtttcgctcggttcgtcaacgtgagagacgaccacggcgccacgccgctccacctcgccgccaggcagggccgccccggctgcgtgcaggcgctgctggagaacggtgccatcgtctccgctttgaccggctcatacgggtttcctggtagcacgtcgctgcacctcgccgctcgcagcgggagcctggattgcacccggaagctgctcgcctggggagcggatcgtctccggagggattcagcagggaggatcccttacgccgtggcgctgaagcgcaaccacgaggcgtgcgcggcgctgctgaacccgtcggcggcggagcccatggtgtggccgtccccgttcaagttcatcagcgagctggagccggaggccaaggcgctccttgaagcggcgctgacggaagccaacagggagagggaggagaagatcctcaggggcaccaagcactctccgcatcctcccacctgggaccacgcgagcgacgccgccgacgccgacgccatcgacgacgcgtcctcagatgccagcgccagcgacgcggagctgtgctgcatctgcttcgaccaggcgtgcacgatggaggtgcaggactgcgggcaccagatgtgcgcgccgtgcacgctcgcgctgtgctgccacagcaagcccgacccggtgacgctagcgctgccgtcgccagcctgcccgttctgccgcggcagcatctcgcggctgctgctggtggcccgggcaagcagcgacgacgcagacaccgagaagtcggcggcagcggctgcggcagcggctgcctcctccccgcagctcgtccggcggcggtcccggcggtcgcacaacctcagcgacggcggcagcagcagcttcaaggggctgtcgtccgccgtggccggttccttctccaagatcgggcgcgggtcgagccggacgatggccgacagcgacggctgcggcgtggacaagcccgagcacgacccgtgatcggcattggatcctgcgcatgtggagccgagcgcggggccatttgcggacatccaatcgaatccaagccaagcgtgactgcttgctgcgaaaataaccgcatccttttcttcttcttctccccatgtccctgtctgtcaatcctattcttgggcgtgccaggatttgttcacctggccattgccgtattccattgtcaccgaccggctatagtatatagtactagattccatttccattccttcgtgcccacgcagctgtggtatggttccaatggttgagccgagtttgagtcacagacatgtaaaacaccatcggtggtgtgtgtgtgtaaaagctgtcggcctggagagagctgtggtgaactgtggctccgttcatggcatcgcagtatcgcacagtcgtgaactgtatgtggctgccagtgacggcgacggagctggcttgctgtaacgatggcctgccacggccacgggatgtgacctcttgccacggcgtgtgatgtttgttgcaacgatgcactgcactggcactggcactgcagcgcaatggatgatggattcaagtcaggttcggcctggccgacctgtcgcctgctgccactgccatggcgtccgtccccaacccttgcgctccatacccataggcagggctcgggagatagcgggcacagtggtcctcctcgtccctggtccggtggtgaatctgtcgctcttgctctggggctctgcgccgctgccgcctgccgtgcccggaggaaggccctgcaacgtgcaccgcgggggcgctctagctgctgcggcctcaccgtctccggttcacaggcaggactccgtgacctccctgccggcctggaggggccacggccgtccggctgtgctgtggtgccacctgccgaggagcggcggtcgtcacactctgccagagaggcgctcagagcagtgattactctgtctgcagcagttcacacacgcagccgagtttcgcgaagacgacgactgcaagcaaggg

SEQ ID NO: 204730 - DNA, 2866 bp, Zea Mays
gcacaagcaaaggcgggggagagagctccgtgcagtcaccgtcgtgttcggaacgagcgagagagcgggagacgagtcgcggcgcctctgctgtgctgtcttcttctccccctctgctctgcttcggctcctcacgcggcctcgccgagacccgcagggggttcagacttcttggtgagagcgatatgagtgtcccaggtcaatgctcatcccagccacaatttatcaccagcgttgggaggagtaaccgctccaatggccccggcactcctcttatcgaaagcatagatgttgatcaaattgttattccagagaaaaacagttggaagaacttattctcatacatagggcctggatttctcgtctcaattgcatatattgatcctggaaactttgagacggatctacaggctggagcacagtacaaatatgagcttctttggatcatacttgttgcatcctgtgctgctcttattattcaatcacttgcagccaggctaggggttgtgacagggaaacatcttgcagagcattgcagggctgagtatcccaaggtcacaaattttgtcttatggattcttgcagaacttgctgttgttgcatgtgacattcctgaagaatcccagtatggtgtggtgttctaataactggactcagcactctaatgctcttattgctgcagcaatatggggtccgtaagctagaatttctgattgcatttctggtgttcttaatagcaacatgtttcttagttgaacttgggtattctaaaccaaatgctccagaagttgttaggggcctttttgttcctgaacttaaaggaaatggagctacaggccttgctatctcattacttggtgctatggtgatgccgcacaatctttttctgcactcagcattagtattgtcaagaaaagtgccacggtctgttcatgggattaaggaggcctgcagattctatacgattgaaagtgcatttgcccttacagttgcttttctcatcaacatatctatcatatctgtcagtggttctgtctgtggttcaggtaatttaaacccagaagatcaagcaaattgcagtgatctggacctaaataaggcttcatttttgttaaagaatgtccttggaaactggagctcaaagttgtttgcagttgctttgttggcatctggtcagagttctacaattacggggacatatgctggacaatatgtcatgcaggtttttggaacttataccttatttcagttctagttcgcaagttgaatggcaggttgttttatgatgcatattactcgaggcatttgatgttgatcagaagtaatcaagcatttgcttgcttgcaacattagtttgtttagctgttagatatgaaaagtacagaaaataaattagtacataactcttagatttgcaatgaacaagcttgggcttatgagtttcagtgccaacctccaaggttctcttggtcagctagattgcagagaaaaaggacagatacggggggtttttagatcttcggatgaaaccctggatacgcaatcttgtcacgaggtccttggctatcctgccaagtttgatcgtgtcaattattggtggttcttcagcagctggccagttgattatcattgcatcgatgatactgtcatttgaactcccttttgctttagttccactccttaaattcaccagcagcaaaacaaagatggggcagcatacaaattcaatattcactgctgtgctgacatggatgatcggctcgtttattgttgtcatcaacacctactttctgataacaagctttgtgaaattgctcgtccagagcgggctgaccaccatttctcaagtattttccggtattttcgggtttttgggcatgctgatttacatagttgcgatcctatacctcgtctttaggaggaacaggaagtccacccagccattgctggagagcgatgctgagcttgcagtatcgggtagcagtgctgatgccggagcagaatgctcgctgggccatttgccccgtgaggacatctccagcatgcaacttccgcagcagcgttcagcttctgatctagattagataacagctgccaggaaaataaatgttttttttgttttttatatagtatagtaattacagaatagggtacgtcaggtattggcttctgttcatcctactgatgatgcttaaggaatgtatacaagaggacggatatctatgctgccaaacaaaaaaatggggcacaaaagaatttagtgcctgtttttgggaagtgatgtgaactgaatcctggaaggggcaaaaaaaaaaaatgttggaatccaattgttgaaaattcttcattctaaacatgaggccgttggtaaaaaatgtctacatgctgtaaacatactatattttgacattattatcacagttaatatatactggacatgctgttttatgtgttgtgcattccagtggctgcaggccttgctcagagctagtttggtgattagagaaatggagaagttctatgtaccctttatttttctggccactaaattagcccttatagtgccgatattttctgaatagaatcaggtgaatccacccttctagttctgctgctgacaagcaggtgaccaagccctgtgaatggagctcatgccaaagacaactgctaaatgcgccttcgtttttcaaggtagcagaatagcagctgagaaacctttttcggcgacagtctaacagtctcatcctaccctaacttttaaaatatggaccataagcacgtctctactaatataaaaggagtttgtctatgtgtgtcgctcctcttccggcccctttctactttttacagaaaaaaataagataaa

SEQ ID NO: 204731 - DNA, 1574 bp, Zea Mays
gcccgccagtaccgggtcggcatgccacgagcgcgcggtcagcatccgcaggtacaacacgcacgcacgcacacacgagcactcccagcccatcccgcccaccaagaatctacccgacccaccggtttatgggctccgctgaaacagtagcccacacgtcagtcccttccacgacacccaaaccgggtcgcccaccgttttcggagtaagccccacctcgagatctatccccgtttccaacctcacatccccttccactcgagctccttcgtttaaacccaaaccctaattgcgacctccgttcccccaaaaccctacggccatggacggcggaggcggtggtgtagggggaggcggagttggggcaggtgtcatggtgggcggcggagtcgggccgggcggcggcgttggcggtggcggcgacgtggagctcgtcagcaagacgctgcagttcgagcacaagctgttctacttcgatctgaaggagaatccgcgggggaggtacctcaagatctccgagaagacctcggccacgcgctccaccatcatcgtccccgtcgacggcgtggcctggttcctcgacctcttcgactactacatccgcaccgacgagcgcgacgctttcagcaaggagctgcgactccagaccaaggtgttctatttcgatatcggggagaacaagaggggccgattcctcaaggtttctgaggcctctgtcaaccgaaaccggagtaccataattgttccagctggcagctctggtgaagagggctgggaagcattcaggagtgtactgctggagataaataacgaggctaccagattgtatgtcctaccaaatcatccaaatcagcaacacatggagccgccagagcgtcttcctggtctgtccgatgatgtgggtgccggatttatagcaggacatggtagccagtctgcttctgggccagaggtagatgtcgaacgcttggttgatctgcctcctcaagaagaaattagtggcatgggtatgtctaaggttatcagggcagatcagaaaaggttcttcttcgacctgggcagcaacaacaggggccattatttgaggatttctgaggtggctggagctgatcgttcgtctattatcttgccgctctcgggtttgaagcaattccatgaaatggttggtcactttgtagatataatgaaggacaggcttgaaggaatgacaggagctaacgtgcgcactgtcgagcccagccagagatgattacccttgactgtgggcctggcaagactgctgttatgcctcctgtaggtttgccatgtggtgtgtggtaatgtagatcacgccgtattaattcatctggtggggataataatgtctctttttctctttattttttgaattcagtggcgaggattgatttgtttgggactttttttctttctttcagtcggaggaataatatgcagtgtattgttcgtggggtggtataattgtggttgctgcagtgttagccctgattttatgcttcgccgttcttatttagattggtcacaccgtagcttaactagtacattgcgcttgcaat

SEQ ID NO: 204732 - DNA, 1171 bp, Zea Mays
caaacacacccttgatgttctattttataactgcctgatgaagtagaatccagaatacaaccaggaatttcagaagaagaaaagtgcagattattgcactgtgttgttgttggaggtggtccaacaggggtggaatttagtggtgaacttagtgattttattatacgagatgtcaaacaacgttattcacatgtgaaggattatattcatgtgaccctgattgaggcaaatgagatattgtcatcattcgatgttcggctcaggcaatatgctacaaagcaactaattaagtcaggtgttaggcttgtgcaaggaattgttaaggatgtgcagcccaacaaaataattcttgacaatggagaggaagttccttatggtttactggtatggtccaccggagttggtgcttcaccattcgttaagtcattgccatttcctaagtcacctggtggaaggatcggtgtcaatgagtggttacgtgtcccttctgttcatgatgtttatgccattggtgactgcagtggatttctcgagagcaccggcaaggaagttctccctgctttagctcaggttgctgaacgacaaggcaagtacctggcaagcctgctcaaccatgtcatgaaagctggaggagggcatgcaaactctgagactgaagcagatctgggtcgtccaccctttgtgtacaagcatctaggcagcatggcaactgttggaagatacaaagctctagtcgatctgaggcaaagcaaggagtcaagagggatatctcttgcaggatttgtgagctggttcatctggcgctcggcatatttaactcgtgttgttagctggaggaataggttctatgtggctatcaattggctgaccactctcttatttggccgggacataagcagaatctagagtgtctttgtatacgtacgaacaagcatataagtcgatgtagagttacacgccacggtcacttgcttgccacacacccctccgggggtccactcctaccactgtccctattagctgtgaatgtaattcacaggtgaattatgaataaatctgaggatactgcagttacttacatgtggtgtgaatgtataatactctgtcacttgtaccactgtccctaatagctgtgaatgtaattcacaggtaaatcatgaacaaatctgag

SEQ ID NO: 204733 - DNA, 2115 bp, Zea Mays
gcggattgaacgggaccaccgtcccgggccggccgccgacccacaccccacccgccatgggcggcgtccaacgaaatgcgcttgttaattcgcctcacttctcgctgtggtcaccacgcttcacatctcgcgcggtagcgtccgacaggcatggccgcctcctccctgctccggtcgttcacccgccgcagctgcgcgggcccgagcgctttcgcttaccgccaccaccaacgacagcaaccttggtctcccttctccaccagcgccgctgcggtcacgcaggacgaagcggcgaagaggttccctggactagggccgacggcgaagggggagaaggccagggtggtggtgttggggacagggtgggcggggtctcggctaatgaaggacctcgatacacaaggctacgacgtggtctgcgtcgccccgcgcaaccacatggtgttcacgccgctgctcgcctccacctgcgtcggcacgctcgagttccgatccgtcgctgagccggtcgcgcgcatccagcccgccgtgtccaagtcgccgggctcctacttcctcctcgcccgttgcaccggcgtcgaccccgacggccacacgttacagatggtgagaaagattccttggagccatggaaattcaaggttgcttatgacaagttggtttttgcctgtggagctgaggcatcaacttttgggatacatggtgttaccgaccatgcaatctttcttcgcgaagttcatcatgctcaagagattcggagacggctcctccttaatctgatgttgtctgatctccctggaatttcagaagaagaaaagtgcagattattgcactgtgttgttgttggaggtggtccaacaggggtggaatttagtggtgaacttagtgattttattatacgagatgtcaaacaacgttattcacatgtgaaggattatattcatgtgaccctgattgaggcaaatgagatattgtcatcattcgatgttcggctcaggcaatatgctacaaagcaactaattaaggttaacagattcttctctgcataatgccatatcacttttgcctacaaggcttccacagaccaatgttttgaaactgcagatttccaaatatagcacactgacaatcacatagatatgaatgttatatatctgctaattgtttggatgctgttatttctcatattatttggcatctgaaaaataagatgtttgtgtatgttcacccaccagtcaggtgttaggcttgtgcaaggaattgttaaggatgtgcagcccaacaaaataattcttgacaatggagaggaagttccttatggtttactggtatggtccaccggagttggtgcttcaccattcgttaagtcattgccatttcctaagtcacctggtggaaggatcggtgtcaatgagtggttacgtgtcccttctgttcatgatgtttatgccattggtgactgcagtggatttctcgagagcaccggcaaggaagttctccctgctttagctcaggttgctgaacgacaaggcaagtacctggcaagcctgctcaaccatgtcatgaaagctggaggagggcatgcaaactctgagactgaagcagatctgggtcgtccaccctttgtgtacaagcatctaggcagcatggcaactgttggaagatacaaagctctagtcgatctgaggcaaagcaaggagtcaagagggatatctcttgcaggatttgtgagctggttcatctggcgctcggcatatttaactcgtgttgttagctggaggaataggttctatgtggctatcaattggctgaccactctcttatttggccgggacataagcagaatctagagtgtctttgtatacgtacgaacaagcatataagtcgatgtagagttacacgccacggtcacttgcttgccacacacccctccgggggtccactcctaccactgtccctattagctgtgaatgtaattcacaggtgaattatgaataaatctgaggatactgcagttacttacatgtggtgtgaatgtataatactctgtcacttgtaccactgtccctaatagctgtgaatgtaattcacaggtaaatcatgaacaaatctgag

SEQ ID NO: 204734 - DNA, 2284 bp, Zea Mays
cgggcgctttaccggctcaccgcaaacgcggcggcgaaagcgccttggtcgatctcgaacgaccgcccctgcagctgacggatcaggacaggcaagagatgatccgacggccagcgccatccacgctactccgatctctcaggtctgcagcctgcggattgaacgggaccaccgtcccgggccggccgccgacccacaccccacccgccatgggcggcgtccaacgaaatgcgcttgttaattcgcctcacttctcgctgtggtcaccacgcttcacatctcgcgcggtagcgtccgacaggcatggccgcctcctccctgctccggtcgttcacccgccgcagctgcgcgggcccgagcgctttcgcttaccgccaccaccaacgacagcaaccttggtctcccttctccaccagcgccgctgcggtcacgcaggacgaagcggcgaagaggttccctggactagggccgacggcgaagggggagaaggccagggtggtggtgttggggacagggtgggcggggtctcggctaatgaaggacctcgatacacaaggctacgacgtggtctgcgtcgccccgcgcaaccacatggtgttcacgccgctgctcgcctccacctgcgtcggcacgctcgagttccgatccgtcgctgagccggtcgcgcgcatccagcccgccgtgtccaagtcgccgggctcctacttcctcctcgcccgttgcaccggcgtcgaccccgacggccacacgattgattgcgaaacagttacagatggtgagaaagattccttggagccatggaaattcaaggttgcttatgacaagttggtttttgcctgtggagctgaggcatcaacttttgggatacatggtgttaccgaccatgcaatctttcttcgcgaagttcatcatgctcaagagattcggagacggctcctccttaatctgatgttgtctgatctccctggaatttcagaagaagaaaagtgcagattattgcactgtgttgttgttggaggtggtccaacaggggtggaatttagtggtgaacttagtgattttattatacgagatgtcaaacaacgttattcacatgtgaaggattatattcatgtgaccctgattgaggcaaatgagatattgtcatcattcgatgttcggctcaggcaatatgctacaaagcaactaattaaggttaacagattcttctctgcataatgccatatcacttttgcctacaaggcttccacagaccaatgttttgaaactgcagatttccaaatatagcacactgacaatcacatagatatgaatgttatatatctgctaattgtttggatgctgttatttctcatattatttggcatctgaaaaataagatgtttgtgtatgttcacccaccagtcaggtgttaggcttgtgcaaggaattgttaaggatgtgcagcccaacaaaataattcttgacaatggagaggaagttccttatggtttactggtatggtccaccggagttggtgcttcaccattcgttaagtcattgccatttcctaagtcacctggtggaaggatcggtgtcaatgagtggttacgtgtcccttctgttcatgatgtttatgccattggtgactgcagtggatttctcgagagcaccggcaaggaagttctccctgctttagctcaggttgctgaacgacaaggcaagtacctggcaagcctgctcaaccatgtcatgaaagctggaggagggcatgcaaactctgagactgaagcagatctgggtcgtccaccctttgtgtacaagcatctaggcagcatggcaactgttggaagatacaaagctctagtcgatctgaggcaaagcaaggagtcaagagggatatctcttgcaggatttgtgagctggttcatctggcgctcggcatatttaactcgtgttgttagctggaggaataggttctatgtggctatcaattggctgaccactctcttatttggccgggacataagcagaatctagagtgtctttgtatacgtacgaacaagcatataagtcgatgtagagttacacgccacggtcacttgcttgccacacacccctccgggggtccactcctaccactgtccctattagctgtgaatgtaattcacaggtgaattatgaataaatctgaggatactgcagttacttacatgtggtgtgaatgtataatactctgtcacttgtaccactgtccctaatagctgtgaatgtaattcacaggtaaatcatgaacaaatctgag

SEQ ID NO: 204735 - DNA, 1360 bp, Zea Mays
agagagacgacttcaaacccgtgacctggtgactcaattgattgcgaaacagttacagatggtgagaaagattccttggagccatggaaattcaaggttgcttatgacaagttggtttttgcctgtggagctgaggcatcaacttttgggatacatggtgttaccgaccatgcaatctttcttcgcgaagttcatcatgctcaagagattcggagacggctcctccttaatctgatgttgtctgatctccctggaatttcagaagaagaaaagtgcagattattgcactgtgttgttgttggaggtggtccaacaggggtggaatttagtggtgaacttagtgattttattatacgagatgtcaaacaacgttattcacatgtgaaggattatattcatgtgaccctgattgaggcaaatgagatattgtcatcattcgatgttcggctcaggcaatatgctacaaagcaactaattaagtcaggtgttaggcttgtgcaaggaattgttaaggatgtgcagcccaacaaaataattcttgacaatggagaggaagttccttatggtttactggtatggtccaccggagttggtgcttcaccattcgttaagtcattgccatttcctaagtcacctggtggaaggatcggtgtcaatgagtggttacgtgtcccttctgttcatgatgtttatgccattggtgactgcagtggatttctcgagagcaccggcaaggaagttctccctgctttagctcaggttgctgaacgacaaggcaagtacctggcaagcctgctcaaccatgtcatgaaagctggaggagggcatgcaaactctgagactgaagcagatctgggtcgtccaccctttgtgtacaagcatctaggcagcatggcaactgttggaagatacaaagctctagtcgatctgaggcaaagcaaggagtcaagagggatatctcttgcaggatttgtgagctggttcatctggcgctcggcatatttaactcgtgttgttagctggaggaataggttctatgtggctatcaattggctgaccactctcttatttggccgggacataagcagaatctagagtgtctttgtatacgtacgaacaagcatataagtcgatgtagagttacacgccacggtcacttgcttgccacacacccctccgggggtccactcctaccactgtccctattagctgtgaatgtaattcacaggtgaattatgaataaatctgaggatactgcagttacttacatgtggtgtgaatgtataatactctgtcacttgtaccactgtccctaatagctgtgaatgtaattcacaggtaaatcatgaacaaatctgag

SEQ ID NO: 204736 - DNA, 1163 bp, Zea Mays
tgaaatttccgaacttaatcatgctgtaatcaatttatatacttcagttagctagattcttctctactttttttctctcaatatgcaggagagctgcgtatcattgcattaagaagaaaagccgaatacaaatggcctgcgaggctgcaaccccgggcaaaggagtccgaagaggaaacccaaagaaaatataaagaaactactaaaaaagagaaggccaggaattaggtttagtaatctgtactgtgatcctcaaattatccctggaggccacaagatcacagcaaggcaacgatggcaaccaacaccaatgcagctgcagatcttggagaacatctttgaccaaggcaatggaacaccaagcaagcagaggataaaggagataacggcagagctctcgcaccatggccaaatctcggagacaaatgtgtacaactggttccagaacagacgggcacggtcaaagcggaagcaggccgcttctttaccgaacaatgctgaatctgaagctgaggtggacgaggagtctctcaccgataagaagccgaagtcagatcggtcgctccaggacaacaaggctatgggcgctcacaacgctgacaggatatctgggatgcatcacttggacactgatcatgaccaaatcggtggcatgatgtatggatgcaatgacaacggcttgagatcgtctggcagttctggccagatgtccttctacgggaacatcatgccgaatccaagaatcgatcatttcccggggaaggtggagagctcccggagcttctcccatctccaacacggggaaggctttgacatgtttggatgacatgatgcggcgctgagttaccgtgtaaaatgtgatggttgacacatcgtgcgttcaatttgctgacatgaaagttgatgttggatgtccgtgttgcttatcacgttctggttaaccacctccgcggatggtagctagcttgaatgaacctactctttgggatagctgtaagaggttgatattatagtttgcccgtagtctatatacgctgaactatcagcatgtaattctccacgtttgcaaatttagcacgggtatgcagcagcctgtggttaaaccttcgtgtgtgtgaaaccatttcttgcttgcttttactctatgtctctattgcatacgg

SEQ ID NO: 204737 - DNA, 2951 bp, Zea Mays
atgggcgtcgttgctcgtgctcggtcctcccagtgcgcgagggcgtggcggcgaccttgcttgagcaggcgcagagtccgctcgtcggctctgccccgacccgcagtgcgcgagggcgcgggggtgaccgcctctcgctcttctgccatttcgctgtgtccggcgagaggcccagcggtgaagctgctgggcaggtgggaccttgagacgtgggcgccgacggtgtcggtgcacatgtatgacttcttgtccggcatggcgggcgccttcgggcgtcgtgagcgaggcaggggtgcttgcggttgccgtggagcgcagtggccgagactaaacattagatgcaacccccaagatgttcttgtttgcattcagataatgaatgaaaggcaacgccaagctgtagtgaggaaagggttcttcaacatacttgacatgaccatcgatgcacttggaagccgaacacacctttgttggctgatggagaagctagacccgaaagacatgactcttcgcattggtccaggcaaagagctgaaaatcaccaaggagaccgtccatctcatcctgggtttacccaatactggtggtgggaagcctctaaacattgatgaagtaaatgcagctgttaaccttaggtcatcacttggcatcagcaaagatgagtttggagttgcaaagctgcaagaacgattaagattaggaggcgatgatgacctctcaattcgatgttttttcttgatccttttcaaccggctgctattcccaactgctagctggtctatatccaacaatgaggtgctcttgacagaacaattggatcgtttccctcatattgattggtgtcatctcatattcaacgacttatgtgaagctgcccataaatggcataacagaagcactacaaatgtgtcggcgacgatatatgggtgttccattgtcgttcttgtgtactacctggaccacctccaccacgctgtagcccccaacaacaaaagcgacacaccgcgtatcaaatattttgacaagaaaaccataaaagcattgtcaatggctgataagaggaagccacgtcagggcggtgaaccatttggccactgtgattttcggagcagctcagagacctgttacgcccctacacctgaatttcatggtcaattcgagtttcagttcagttcagatgcatttgatgtagcccaaaatgcaccctgtggacatcacaccatctctattcaagttccacttatcaaagacatgatttcaagcaagattcagcaactccctgcatatcaccatcccaaatttgaagcaaagctgcgtgcttacgactcagaggttggcaagtcatttgccactatcaaccaacgtcttagcaagattgtcaaaaagcagtacgacctagcagacacatttggagagttgattgacgaggttcttcgtgctgagataaatagtccagacaacaaagatgacatgatagaaccttccaatccctcagcatcagatccactaatgacagccacgcagctggagtcgcagatgatagtcactcaggtggaggccatatataaaagacaacaggaaatgtgccgagccttcgagagttctcgtgatgaatcagtcacacctcaaaacatcgtttgtttctacctttaactttatgatttcttattctttaatttctgtacgaccgttttcatacttaaccaaccgaagcaacattatgagggccacaatgtttgcaattggctagcggggtgacacgacggaagatgatgctcttcaacttgactctggcctagttttggaccagattctaagtggcaatgagacatatatgatgcacaaaacacgacacgactctgtgccactcacacaaatggactgtgttcgcgcccttcgacaattcctgtgtgctaaggtcatggatttgaacagaaatgtcattgattttggtgaatatgtcggtacttgtcgtgatatacaacgatcgtttgccgatggggagtgccttgacaatgttttcatgcaatgcttcattgattgtgttcgtgatgacgccacaaatcatatccctccactaactgctcatcaacttatcctagacgccattgttggggctatattgaacttcgaggagcaggaacaacacagtaacactcatcggccgtatgacccagccatcctagagaattacttgtcaaagacactgccttcgttcaagcagttggacgaatacaaatcgatcatggtccctatgctccgcgcgggacattggacgttgtatgttatcaattttcagaatcgatgcatacacattctagactccaatccatacggaccagaacttggtgagactacatgggaaagttaccattatgttcaaatggacatcgggaaaaggaagttaccatgggccagactaataatggttagactaaacatggctctccaacatgttcgaccaagatcaaacctacctagatttgacaactttccaatcgacatggctccaaactgtcccacaatgaaagcagggtctaacgactgtggcttctttgctatgaggataattcaggtgacctccgcgctcttgccttgtattacctgatcttccatcgactaaacaagaatcgctcattgtctccagaattagaaagattcaagttcccccattattagattagtctagagcaatatcatcagattgatcgttgcactcaaaggtgtgctagcatgtatttagtgtatatgtttgtccatatgtatagtgatctagtgcctaaaactgttttacaacctttacacgttataaacttctgtcacttcttatggatccatgctgatcaagtgcttaccaccagtttttactacattttgttatgttgctatgtttcaatgatgtggtgtgcaattgttatgttgttatgctcaaatattgttcattttttgtt

SEQ ID NO: 204738 - DNA, 3005 bp, Zea Mays
atgggcgtcgttgctcgtgctcggtcctcccagtgcgcgagggcgtggcggcgaccttgcttgagcaggcgcagagtccgctcgtcggctctgccccgacccgcagtgcgcgagggcgcgggggtgaccgcctctcgctcttctgccatttcgctgtgtccggcgagaggcccagcggtgaagctgctgggcaggtgggaccttgagacgtgggcgccgacggtgtcggtgcacatgtatgacttcttgtccggcatggcgggcgccttcgggcgtcgtgagcgaggcaggggtgcttgcggttgccgtggagcgcagtggccgagactaaacattagatgcaacccccaagatgttcttgtttgcattcagataatgaatgaaaggcaacgccaagctgtagtgaggaaagggttcttcaacatacttgacatgaccatcgatgcacttggaagccgaacacacctttgttggctgatggagaagctagacccgaaagacatgactcttcgcattggtccaggcaaagagctgaaaatcaccaaggagaccgtccatctcatcctgggtttacccaatactggtggtgggaagcctctaaacattgatgaagtaaatgcagctgttaaccttaggtcatcacttggcatcagcaaagatgagtttggagttgcaaagctgcaagaacgattaagattaggaggcgatgatgacctctcaattcgatgttttttcttgatccttttcaaccggctgctattcccaactgctagctggtctatatccaacaatgaggtgctcttgacagaacaattggatcgtttccctcatattgattggtgtcatctcatattcaacgacttatgtgaagctgcccataaatggcataacagaagcactacaaatgtgtcggcgacgatatatgggtgttccattgtcgttcttgtgtactacctggaccacctccaccacgctgtagcccccaacaacaaaagcgacacaccgcgtatcaaatattttgacaagaaaaccataaaagcattgtcaatggctgataagaggaagccacgtcagggcggtgaaccatttggccactgtgattttcggagcagctcagagacctgttacgcccctacacctgaatttcatggtcaattcgagtttcagttcagttcagatgcatttgatgtagcccaaaatgcaccctgtggacatcacaccatctctattcaagttccacttatcaaagacatgatttcaagcaagattcagcaactccctgcatatcaccatcccaaatttgaagcaaagctgcgtgcttacgactcagaggttggcaagtcatttgccactatcaaccaacgtcttagcaagattgtcaaaaagcagtacgacctagcagacacatttggagagttgattgacgaggttcttcgtgctgagataaatagtccagacaacaaagatgacatgatagaaccttccaatccctcagcatcaggtcagtcatccagttactatatatgtatcctgtatccaagcataaattacaccaatacatcttcagctggattaacatgctccagtttgaagattgtttcaatccatacactcgatccactaatgacagccacgcagctggagtcgcagatgatagtcactcaggtggaggccatatataaaagacaacaggaaatgtgccgagccttcgagagttctcgtgatgaatcagtcacacctcaaaacatccggggtgacacgacggaagatgatgctcttcaacttgactctggcctagttttggaccagattctaagtggcaatgagacatatatgatgcacaaaacacgacacgactctgtgccactcacacaaatggactgtgttcgcgcccttcgacaattcctgtgtgctaaggtcatggatttgaacagaaatgtcattgattttggtgaatatgtcggtacttgtcgtgatatacaacgatcgtttgccgatggggagtgccttgacaatgttttcatgcaatgcttcattgattgtgttcgtgatgacgccacaaatcatatccctccactaactgctcatcaacttatcctagacgccattgttggggctatattgaacttcgaggagcaggaacaacacagtaacactcatcggccgtatgacccagccatcctagagaattacttgtcaaagacactgccttcgttcaagcagttggacgaatacaaatcgatcatggtccctatgctccgcgcgggacattggacgttgtatgttatcaattttcagaatcgatgcatacacattctagactccaatccatacggaccagaacttggtgagactacatgggaaagttaccattatgttcaaatggacatcgggaaaaggaagttaccatgggccagactaataatggttagactaaacatggctctccaacatgttcgaccaagatcaaacctacctagatttgacaactttccaatcgacatggctccaaactgtcccacaatgaaagcagggtctaacgactgtggcttctttgctatgaggtacatacaatattatgactatatggatggtgctatcaatgtagttatagactcggataattcaggtgacctccgcgctcttgccttgtattacctgatcttccatcgactaaacaagaatcgctcattgtctccagaattagaaagattcaagttcccccattattagattagtctagagcaatatcatcagattgatcgttgcactcaaaggtgtgctagcatgtatttagtgtatatgtttgtccatatgtatagtgatctagtgcctaaaactgttttacaacctttacacgttataaacttctgtcacttcttatggatccatgctgatcaagtgcttaccaccagtttttactacattttgttatgttgctatgtttcaatgatgtggtgtgcaattgttatgttgttatgctcaaatattgttcattttttgtt

SEQ ID NO: 204739 - DNA, 3064 bp, Zea Mays
atgggcgtcgttgctcgtgctcggtcctcccagtgcgcgagggcgtggcggcgaccttgcttgagcaggcgcagagtccgctcgtcggctctgccccgacccgcagtgcgcgagggcgcgggggtgaccgcctctcgctcttctgccatttcgctgtgtccggcgagaggcccagcggtgaagctgctgggcaggtgggaccttgagacgtgggcgccgacggtgtcggtgcacatgtatgacttcttgtccggcatggcgggcgccttcgggcgtcgtgagcgaggcaggggtgcttgcggttgccgtggagcgcagtggccgagactaaacattagatgcaacccccaagatgttcttgtttgcattcagataatgaatgaaaggcaacgccaagctgtagtgaggaaagggttcttcaacatacttgacatgaccatcgatgcacttggaagccgaacacacctttgttggctgatggagaagctagacccgaaagacatgactcttcgcattggtccaggcaaagagctgaaaatcaccaaggagaccgtccatctcatcctgggtttacccaatactggtggtgggaagcctctaaacattgatgaagtaaatgcagctgttaaccttaggtcatcacttggcatcagcaaagatgagtttggagttgcaaagctgcaagaacgattaagattaggaggcgatgatgacctctcaattcgatgttttttcttgatccttttcaaccggctgctattcccaactgctagctggtctatatccaacaatgaggtgctcttgacagaacaattggatcgtttccctcatattgattggtgtcatctcatattcaacgacttatgtgaagctgcccataaatggcataacagaagcactacaaatgtgtcggcgacgatatatgggtgttccattgtcgttcttgtgtactacctggaccacctccaccacgctgtagcccccaacaacaaaagcgacacaccgcgtatcaaatattttgacaagaaaaccataaaagcattgtcaatggctgataagaggaagccacgtcagggcggtgaaccatttggccactgtgattttcggagcagctcagagacctgttacgcccctacacctgaatttcatggtcaattcgagtttcagttcagttcagatgcatttgatgtagcccaaaatgcaccctgtggacatcacaccatctctattcaagttccacttatcaaagacatgatttcaagcaagattcagcaactccctgcatatcaccatcccaaatttgaagcaaagctgcgtgcttacgactcagaggttggcaagtcatttgccactatcaaccaacgtcttagcaagattgtcaaaaagcagtacgacctagcagacacatttggagagttgattgacgaggttcttcgtgctgagataaatagtccagacaacaaagatgacatgatagaaccttccaatccctcagcatcagttttttacagagcattgcacacagtctactgaccaattcatctcagatccactaatgacagccacgcagctggagtcgcagatgatagtcactcaggtggaggccatatataaaagacaacaggaaatgtgccgagccttcgagagttctcgtgatgaatcagtcacacctcaaaacatcgtttgtttctacctttaactttatgatttcttattctttaatttctgtacgaccgttttcatacttaaccaaccgaagcaacattatgagggccacaatgtttgcaattggctaggtttgttactttgtttatcaattgtgcattttattctgtttttaaattgtcatattgttttgtgaagcggggtgacacgacggaagatgatgctcttcaacttgactctggcctagttttggaccagattctaagtggcaatgagacatatatgatgcacaaaacacgacacgactctgtgccactcacacaaatggactgtgttcgcgcccttcgacaattcctgtgtgctaaggtcatggatttgaacagaaatgtcattgattttggtgaatatgtcggtacttgtcgtgatatacaacgatcgtttgccgatggggagtgccttgacaatgttttcatgcaatgcttcattgattgtgttcgtgatgacgccacaaatcatatccctccactaactgctcatcaacttatcctagacgccattgttggggctatattgaacttcgaggagcaggaacaacacagtaacactcatcggccgtatgacccagccatcctagagaattacttgtcaaagacactgccttcgttcaagcagttggacgaatacaaatcgatcatggtccctatgctccgcgcgggacattggacgttgtatgttatcaattttcagaatcgatgcatacacattctagactccaatccatacggaccagaacttggtgagactacatgggaaagttaccattatgttcaaatggacatcgggaaaaggaagttaccatgggccagactaataatggttagactaaacatggctctccaacatgttcgaccaagatcaaacctacctagatttgacaactttccaatcgacatggctccaaactgtcccacaatgaaagcagggtctaacgactgtggcttctttgctatgaggataattcaggtgacctccgcgctcttgccttgtattacctgatcttccatcgactaaacaagaatcgctcattgtctccagaattagaaagattcaagttcccccattattagattagtctagagcaatatcatcagattgatcgttgcactcaaaggtgtgctagcatgtatttagtgtatatgtttgtccatatgtatagtgatctagtgcctaaaactgttttacaacctttacacgttataaacttctgtcacttcttatggatccatgctgatcaagtgcttaccaccagtttttactacattttgttatgttgctatgtttcaatgatgtggtgtgcaattgttatgttgttatgctcaaatattgttcattttttgtt

SEQ ID NO: 204740 - DNA, 2979 bp, Zea Mays
gtgggagacacagtcgtctccacgctcctcgtgctcgtgcgggtgcggactctgctcgctggctctgccccgacccgtaggtatatcgccttcggcgccggctactcctttcgccttgtgttgcatgacccggccgccgcctcatgggcgtcgttgctcgtgctcggtcctcccagtgcgcgagggcgtggcggcgaccttgcttgagcaggcgcagagtccgctcgtcggctctgccccgacccgcagtgcgcgagggcgcgggggtgaccgcctctcgctcttctgccatttcgctgtgtccggcgagaggcccagcggtgaagctgctgggcaggtgggaccttgagacgtgggcgccgacggtgtcggtgcacatgtatgacttcttgtccggcatggcgggcgccttcgggcgtcgtgagcgaggcaggggtgcttgcggttgccgtggagcgcagtggccgagactaaacattagatgcaacccccaagatgttcttgtttgcattcagataatgaatgaaaggcaacgccaagctgtagtgaggaaagggttcttcaacatacttgacatgaccatcgatgcacttggaagccgaacacacctttgttggctgatggagaagctagacccgaaagacatgactcttcgcattggtccaggcaaagagctgaaaatcaccaaggagaccgtccatctcatcctgggtttacccaatactggtggtgggaagcctctaaacattgatgaagtaaatgcagctgttaaccttaggtcatcacttggcatcagcaaagatgagtttggagttgcaaagctgcaagaacgattaagattaggaggcgatgatgacctctcaattcgatgttttttcttgatccttttcaaccggctgctattcccaactgctagctggtctatatccaacaatgaggtgctcttgacagaacaattggatcgtttccctcatattgattggtgtcatctcatattcaacgacttatgtgaagctgcccataaatggcataacagaagcactacaaatgtgtcggcgacgatatatgggtgttccattgtcgttcttgtgtactacctggaccacctccaccacgctgtagcccccaacaacaaaagcgacacaccgcgtatcaaatattttgacaagaaaaccataaaagcattgtcaatggctgataagaggaagccacgtcagggcggtgaaccatttggccactgtgattttcggagcagctcagagacctgttacgcccctacacctgaatttcatggtcaattcgagtttcagttcagttcagatgcatttgatgtagcccaaaatgcaccctgtggacatcacaccatctctattcaagttccacttatcaaagacatgatttcaagcaagattcagcaactccctgcatatcaccatcccaaatttgaagcaaagctgcgtgcttacgactcagaggttggcaagtcatttgccactatcaaccaacgtcttagcaagattgtcaaaaagcagtacgacctagcagacacatttggagagttgattgacgaggttcttcgtgctgagataaatagtccagacaacaaagatgacatgatagaaccttccaatccctcagcatcagatccactaatgacagccacgcagctggagtcgcagatgatagtcactcaggtggaggccatatataaaagacaacaggaaatgtgccgagccttcgagagttctcgtgatgaatcagtcacacctcaaaacatccggggtgacacgacggaagatgatgctcttcaacttgactctggcctagttttggaccagattctaagtggcaatgagacatatatgatgcacaaaacacgacacgactctgtgccactcacacaaatggactgtgttcgcgcccttcgacaattcctgtgtgctaaggtcatggatttgaacagaaatgtcattgattttggtgaatatgtcggtacttgtcgtgatatacaacgatcgtttgccgatggggagtgccttgacaatgttttcatgcaatgcttcattgattgtgttcgtgatgacgccacaaatcatatccctccactaactgctcatcaacttatcctagacgccattgttggggctatattgaacttcgaggagcaggaacaacacagtaacactcatcggccgtatgacccagccatcctagagaattacttgtcaaagacactgccttcgttcaagcagttggacgaatacaaatcgatcatggtccctatgctccgcgcgggacattggacgttgtatgttatcaattttcagaatcgatgcatacacattctagactccaatccatacggaccagaacttggtgagactacatgggaaagttaccattatgttcaaatggacatcgggaaaaggaagttaccatgggccagactaataatggttagactaaacatggctctccaacatgttcgaccaagatcaaacctacctagatttgacaactttccaatcgacatggctccaaactgtcccacaatgaaagcagggtctaacgactgtggcttctttgctatgaggataattcaggtgacctccgcgctcttgccttgtattacctgatcttccatcgactaaacaagaatcgctcattgtctccagaattagaaagattcaagttcccccattattagattagtctagagcaatatcatcagattgatcgttgcactcaaaggtgtgctagcatgtatttagtgtatatgtttgtccatatgtatagtgatctagtgcctaaaactgttttacaacctttacacgttataaacttctgtcacttcttatggatccatgctgatcaagtgcttaccaccagtttttactacattttgttatgttgctatgtttcaatgatgtggtgtgcaattgttatgttgttatgctcaaatattgttcattttttgtt

SEQ ID NO: 204741 - DNA, 3160 bp, Zea Mays
ggccaaccccggacaggagacgcagcacgactcgtccgaggccaacctcgaggcgggaacgcagtcatgactcgcccggggccaacctcgggcgggagatccagttacgactcgcccgaggccaacccccgggtgggagacacagtcgtctccacgctcctcgtgctcgtgcgggtgcggactctgctcgctggctctgccccgacccgtaggtatatcgccttcggcgccggctactcctttcgccttgtgttgcatgacccggccgccgcctcatgggcgtcgttgctcgtgctcggtcctcccagtgcgcgagggcgtggcggcgaccttgcttgagcaggcgcagagtccgctcgtcggctctgccccgacccgcagtgcgcgagggcgcgggggtgaccgcctctcgctcttctgccatttcgctgtgtccggcgagaggcccagcggtgaagctgctgggcaggtgggaccttgagacgtgggcgccgacggtgtcggtgcacatgtatgacttcttgtccggcatggcgggcgccttcgggcgtcgtgagcgaggcaggggtgcttgcggttgccgtggagcgcagtggccgagactaaacattagatgcaacccccaagatgttcttgtttgcattcagataatgaatgaaaggcaacgccaagctgtagtgaggaaagggttcttcaacatacttgacatgaccatcgatgcacttggaagccgaacacacctttgttggctgatggagaagctagacccgaaagacatgactcttcgcattggtccaggcaaagagctgaaaatcaccaaggagaccgtccatctcatcctgggtttacccaatactggtggtgggaagcctctaaacattgatgaagtaaatgcagctgttaaccttaggtcatcacttggcatcagcaaagatgagtttggagttgcaaagctgcaagaacgattaagattaggaggcgatgatgacctctcaattcgatgttttttcttgatccttttcaaccggctgctattcccaactgctagctggtctatatccaacaatgaggtgctcttgacagaacaattggatcgtttccctcatattgattggtgtcatctcatattcaacgacttatgtgaagctgcccataaatggcataacagaagcactacaaatgtgtcggcgacgatatatgggtgttccattgtcgttcttgtgtactacctggaccacctccaccacgctgtagcccccaacaacaaaagcgacacaccgcgtatcaaatattttgacaagaaaaccataaaagcattgtcaatggctgataagaggaagccacgtcagggcggtgaaccatttggccactgtgattttcggagcagctcagagacctgttacgcccctacacctgaatttcatggtcaattcgagttcagttcagatgcatttgatgtagcccaaaatgcaccctgtggacatcacaccatctctattcaagttccacttatcaaagacatgatttcaagcaagattcagcaactccctgcatatcaccatcccaaatttgaagcaaagctgcgtgcttacgactcagaggttggcaagtcatttgccactatcaaccaacgtcttagcaagattgtcaaaaagcagtacgacctagcagacacatttggagagttgattgacgaggttcttcgtgctgagataaatagtccagacaacaaagatgacatgatagaaccttccaatccctcagcatcagatccactaatgacagccacgcagctggagtcgcagatgatagtcactcaggtggaggccatatataaaagacaacaggaaatgtgccgagccttcgagagttctcgtgatgaatcagtcacacctcaaaacatccggggtgacacgacggaagatgatgctcttcaacttgactctggcctagttttggaccagattctaagtggcaatgagacatatatgatgcacaaaacacgacacgactctgtgccactcacacaaatggactgtgttcgcgcccttcgacaattcctgtgtgctaaggtcatggatttgaacagaaatgtcattgattttggtgaatatgtcggtacttgtcgtgatatacaacgatcgtttgccgatggggagtgccttgacaatgttttcatgcaatgcttcattgattgtgttcgtgatgacgccacaaatcatatccctccactaactgctcatcaacttatcctagacgccattgttggggctatattgaacttcgaggagcaggaacaacacagtaacactcatcggccgtatgacccagccatcctagagaattacttgtcaaagacactgccttcgttcaagcagttggacgaatacaaatcgatcatggtccctatgctccgcgcgggacattggacgttgtatgttatcaattttcagaatcgatgcatacacattctagactccaatccatacggaccagaacttggtgagactacatgggaaagttaccattatgttcaaatggacatcgggaaaaggaagttaccatgggccagactaataatggttagactaaacatggctctccaacatgttcgaccaagatcaaacctacctagatttgacaactttccaatcgacatggctccaaactgtcccacaatgaaagcagggtctaacgactgtggcttctttgctatgaggtacatacaatattatgactatatggatggtgctatcaatgtagttatagactcggataattcaggtgacctccgcgctcttgccttgtattacctgatcttccatcgactaaacaagaatcgctcattgtctccagaattagaaagattcaagttcccccattattagattagtctagagcaatatcatcagattgatcgttgcactcaaaggtgtgctagcatgtatttagtgtatatgtttgtccatatgtatagtgatctagtgcctaaaactgttttacaacctttacacgttataaacttctgtcacttcttatggatccatgctgatcaagtgcttaccaccagtttttactacattttgttatgttgctatgtttcaatgatgtggtgtgcaattgttatgttgttatgctcaaatattgttcattttttgtt

SEQ ID NO: 204742 - DNA, 3706 bp, Zea Mays
acgcagtcacggctcgcccgtggccaatcccggacgggagacgcagtcacggctcgcccgaggccaaccccgggcgggagacggtttcacggctcgcccgaggccaacctcggttgggagacgcagtcaccgctcacacgaggccaactccgggcgcgagacgtagtcatggctcgcccgaggccaaccccgagcaggagacggtttcacggctcgctcgaggccaaccttgggcgggcgacgcagccacggcttgttcgaggccaacctcgtgtgggagacggtttcacagctcgcctgaggccaacctcgagcggtagacgcagtcacggcttgcccgaggctaactccaggcgggagacgcagtcacggcttgcccgaggccaaccccgggcgggagacggtttcacggctcgcccggggccaacctcggtcgggagacgcagtcatgggtcgcccgaggccaaccctgggcgggagacgcagtcacgctcgcccgaggccaacctcgggagggaggcgcagtcatggctcgtctgaggccaaccccggacaggagacgcagcacgactcgtccgaggccaacctcgaggcgggaacgcagtcatgactcgcccggggccaacctcgggcgggagatccagttacgactcgcccgaggccaacccccgggtgggagacacagtcgtctccacgctcctcgtgctcgtgcgggtgcggactctgctcgctggctctgccccgacccgtaggtatatcgccttcggcgccggctactcctttcgccttgtgttgcatgacccggccgccgcctcatgggcgtcgttgctcgtgctcggtcctcccagtgcgcgagggcgtggcggcgaccttgcttgagcaggcgcagagtccgctcgtcggctctgccccgacccgcagtgcgcgagggcgcgggggtgaccgcctctcgctcttctgccatttcgctgtgtccggcgagaggcccagcggtgaagctgctgggcaggtgggaccttgagacgtgggcgccgacggtgtcggtgcacatgtatgacttcttgtccggcatggcgggcgccttcgggcgtcgtgagcgaggcaggggtgcttgcggttgccgtggagcgcagtggccgagactaaacattagatgcaacccccaagatgttcttgtttgcattcagataatgaatgaaaggcaacgccaagctgtagtgaggaaagggttcttcaacatacttgacatgaccatcgatgcacttggaagccgaacacacctttgttggctgatggagaagctagacccgaaagacatgactcttcgcattggtccaggcaaagagctgaaaatcaccaaggagaccgtccatctcatcctgggtttacccaatactggtggtgggaagcctctaaacattgatgaagtaaatgcagctgttaaccttaggtcatcacttggcatcagcaaagatgagtttggagttgcaaagctgcaagaacgattaagattaggaggcgatgatgacctctcaattcgatgttttttcttgatccttttcaaccggctgctattcccaactgctagctggtctatatccaacaatgaggtgctcttgacagaacaattggatcgtttccctcatattgattggtgtcatctcatattcaacgacttatgtgaagctgcccataaatggcataacagaagcactacaaatgtgtcggcgacgatatatgggtgttccattgtcgttcttgtgtactacctggaccacctccaccacgctgtagcccccaacaacaaaagcgacacaccgcgtatcaaatattttgacaagaaaaccataaaagcattgtcaatggctgataagaggaagccacgtcagggcggtgaaccatttggccactgtgattttcggagcagctcagagacctgttacgcccctacacctgaatttcatggtcaattcgagtttcagttcagttcagatgcatttgatgtagcccaaaatgcaccctgtggacatcacaccatctctattcaagttccacttatcaaagacatgatttcaagcaagattcagcaactccctgcatatcaccatcccaaatttgaagcaaagctgcgtgcttacgactcagaggttggcaagtcatttgccactatcaaccaacgtcttagcaagattgtcaaaaagcagtacgacctagcagacacatttggagagttgattgacgaggttcttcgtgctgagataaatagtccagacaacaaagatgacatgatagaaccttccaatccctcagcatcagatccactaatgacagccacgcagctggagtcgcagatgatagtcactcaggtggaggccatatataaaagacaacaggaaatgtgccgagccttcgagagttctcgtgatgaatcagtcacacctcaaaacatccggggtgacacgacggaagatgatgctcttcaacttgactctggcctagttttggaccagattctaagtggcaatgagacatatatgatgcacaaaacacgacacgactctgtgccactcacacaaatggactgtgttcgcgcccttcgacaattcctgtgtgctaaggtcatggatttgaacagaaatgtcattgattttggtgaatatgtcggtacttgtcgtgatatacaacgatcgtttgccgatggggagtgccttgacaatgttttcatgcaatgcttcattgattgtgttcgtgatgacgccacaaatcatatccctccactaactgctcatcaacttatcctagacgccattgttggggctatattgaacttcgaggagcaggaacaacacagtaacactcatcggccgtatgacccagccatcctagagaattacttgtcaaagacactgccttcgttcaagcagttggacgaatacaaatcgatcatggtccctatgctccgcgcgggacattggacgttgtatgttatcaattttcagaatcgatgcatacacattctagactccaatccatacggaccagaacttggtgagactacatgggaaagttaccattatgttcaaatggacatcgggaaaaggaagttaccatgggccagactaataatggttagactaaacatggctctccaacatgttcgaccaagatcaaacctacctagatttgacaactttccaatcgacatggctccaaactgtcccacaatgaaagcagggtctaacgactgtggcttctttgctatgaggtacatacaatattatgactatatggatggtgctatcaatgtagttatagactcggataattcaggtgacctccgcgctcttgccttgtattacctgatcttccatcgactaaacaagaatcgctcattgtctccagaattagaaagattcaagttcccccattattagattagtctagagcaatatcatcagattgatcgttgcactcaaaggtgtgctagcatgtatttagtgtatatgtttgtccatatgtatagtgatctagtgcctaaaactgttttacaacctttacacgttataaacttctgtcacttcttatggatccatgctgatcaagtgcttaccaccagtttttactacattttgttatgttgctatgtttcaatgatgtggtgtgcaattgttatgttgttatgctcaaatattgttcattttttgtt

SEQ ID NO: 204743 - DNA, 2963 bp, Zea Mays
ttcgtttttgagactaaacattagatgcaacccccaagatgttcttgtttgcattcagataatgaatgaaaggcaacgccaagctgtagtgaggaaagggttcttcaacatacttgacatgaccatcgatgcacttggaagccgaacacacctttgttggctgatggagaagctagacccgaaagacatgactcttcgcattggtccaggcaaagagctgaaaatcaccaaggagaccgtccatctcatcctgggtttacccaatactggtggtgggaagcctctaaacattgatgaagtaaatgcagctgttaaccttaggtcatcacttggcatcagcaaagatgagtttggagttgcaaagctgcaagaacgattaagattaggaggcgatgatgacctctcaattcgatgttttttcttgatccttttcaaccggctgctattcccaactgctagctggtctatatccaacaatgaggtgctcttgacagaacaattggatcgtttccctcatattgattggtgtcatctcatattcaacgacttatgtgaagctgcccataaatggcataacagaagcactacaaatgtgtcggcgacgatatatgggtgttccattgtcgttcttgtgtactacctggaccacctccaccacgctgtagcccccaacaacaaaagcgacacaccgcgtatcaaatattttgacaagaaaaccataaaagcattgtcaatggctgataagaggaagccacgtcagggcggtgaaccatttggccactgtgattttcggagcagctcagagacctgttacgcccctacacctgaatttcatggtcaattcgaggttagtctctacctctccaaggttattcttgcgacaaccacttatctgagtttactccattaatatctatttgtttcttcagtttcagttcagttcagatgcatttgatgtagcccaaaatgcaccctgtggacatcacaccatctctattcaagttccacttatcaaagacatgatttcaagcaagattcagcaactccctgcatatcaccatcccaaatttgaagcaaagctgcgtgcttacgactcagaggttggcaagtcatttgccactatcaaccaacgtcttagcaagattgtcaaaaagcagtacgacctagcagacacatttggagagttgattgacgaggttcttcgtgctgagataaatagtccagacaacaaagatgacatgatagaaccttccaatccctcagcatcagctggattaacatgctccagtttgaagattgtttcaatccatacactcggtaacttttatacttcaatggttactagttttttacagagcattgcacacagtctactgaccaattcatctcagatccactaatgacagccacgcagctggagtcgcagatgatagtcactcaggtggaggccatatataaaagacaacaggaaatgtgccgagccttcgagagttctcgtgatgaatcagtcacacctcaaaacatcgtttgtttctacctttaactttatgatttcttattctttaatttctgtacgaccgttttcatacttaaccaaccgaagcaacattatgagggccacaatgtttgcaattggctaggtttgttactttgtttatcaattgtgcattttattctgtttttaaattgtcatattgttttgtgaagcggggtgacacgacggaagatgatgctcttcaacttgactctggcctagttttggaccagattctaagtggcaatgagacatatatgatgcacaaaacacgacacgactctgtgccactcacacaaatggactgtgttcgcgcccttcgacaattcctgtgtgctaaggtcatggatttgaacagaaatgtcattgattttggtgaatatgtcggtacttgtcgtgatatacaacgatcgtttgccgatggggagtgccttgacaatgttttcatgcaatgcttcattgattgtgttcgtgatgacgccacaaatcatatccctccactaactgctcatcaacttatcctagacgccattgttggggctatattgaacttcgaggagcaggaacaacacagtaacactcatcggccgtatgacccagccatcctagagaattacttgtcaaagacactgccttcgttcaagcagttggacgaatacaaatcgatcatggtccctatgctccgcgcgggacattggacgttgtatgttatcaattttcagaatcgatgcatacacattctagactccaatccatacggaccagaacttggtgagactacatgggaaagttaccattatgttcaaatggacatcgggaaaaggaagttaccatgggccagactaataatggttagactaaacatggctctccaacatgttcgaccaagatcaaacctacctagatttgacaactttccaatcgacatggctccaaactgtcccacaatgaaagcagggtctaacgactgtggcttctttgctatgaggtacatacaatattatgactatatggatggtgctatcaatgtagttatagactcggataattcaggtgacctccgcgctcttgccttgtattacctgatcttccatcgactaaacaagaatcgctcattgtctccagaattagaaagattcaagttcccccattattagattagtctagagcaatatcatcagattgatcgttgcactcaaaggtgtgctagcatgtatttagtgtatatgtttgtccatatgtatagtgatctagtgcctaaaactgttttacaacctttacacgttataaacttctgtcacttcttatggatccatgctgatcaagtgcttaccaccagtttttactacattttgttatgttgctatgtttcaatgatgtggtgtgcaattgttatgttgttatgctcaaatattgttcattttttgtt

SEQ ID NO: 204744 - DNA, 2658 bp, Zea Mays
atccttgggggagagagtaaaagctcaaaagcaaaaggaccgaacttcgtttttgagactaaacattagatgcaacccccaagatgttcttgtttgcattcagataatgaatgaaaggcaacgccaagctgtagtgaggaaagggttcttcaacatacttgacatgaccatcgatgcacttggaagccgaacacacctttgttggctgatggagaagctagacccgaaagacatgactcttcgcattggtccaggcaaagagctgaaaatcaccaaggagaccgtccatctcatcctgggtttacccaatactggtggtgggaagcctctaaacattgatgaagtaaatgcagctgttaaccttaggtcatcacttggcatcagcaaagatgagtttggagttgcaaagctgcaagaacgattaagattaggaggcgatgatgacctctcaattcgatgttttttcttgatccttttcaaccggctgctattcccaactgctagctggtctatatccaacaatgaggtgctcttgacagaacaattggatcgtttccctcatattgattggtgtcatctcatattcaacgacttatgtgaagctgcccataaatggcataacagaagcactacaaatgtgtcggcgacgatatatgggtgttccattgtcgttcttgtgtactacctggaccacctccaccacgctgtagcccccaacaacaaaagcgacacaccgcgtatcaaatattttgacaagaaaaccataaaagcattgtcaatggctgataagaggaagccacgtcagggcggtgaaccatttggccactgtgattttcggagcagctcagagacctgttacgcccctacacctgaatttcatggtcaattcgagtttcagttcagttcagatgcatttgatgtagcccaaaatgcaccctgtggacatcacaccatctctattcaagttccacttatcaaagacatgatttcaagcaagattcagcaactccctgcatatcaccatcccaaatttgaagcaaagctgcgtgcttacgactcagaggttggcaagtcatttgccactatcaaccaacgtcttagcaagattgtcaaaaagcagtacgacctagcagacacatttggagagttgattgacgaggttcttcgtgctgagataaatagtccagacaacaaagatgacatgatagaaccttccaatccctcagcatcagagcattgcacacagtctactgaccaattcatctcagatccactaatgacagccacgcagctggagtcgcagatgatagtcactcaggtggaggccatatataaaagacaacaggaaatgtgccgagccttcgagagttctcgtgatgaatcagtcacacctcaaaacatccggggtgacacgacggaagatgatgctcttcaacttgactctggcctagttttggaccagattctaagtggcaatgagacatatatgatgcacaaaacacgacacgactctgtgccactcacacaaatggactgtgttcgcgcccttcgacaattcctgtgtgctaaggtcatggatttgaacagaaatgtcattgattttggtgaatatgtcggtacttgtcgtgatatacaacgatcgtttgccgatggggagtgccttgacaatgttttcatgcaatgcttcattgattgtgttcgtgatgacgccacaaatcatatccctccactaactgctcatcaacttatcctagacgccattgttggggctatattgaacttcgaggagcaggaacaacacagtaacactcatcggccgtatgacccagccatcctagagaattacttgtcaaagacactgccttcgttcaagcagttggacgaatacaaatcgatcatggtccctatgctccgcgcgggacattggacgttgtatgttatcaattttcagaatcgatgcatacacattctagactccaatccatacggaccagaacttggtgagactacatgggaaagttaccattatgttcaaatggacatcgggaaaaggaagttaccatgggccagactaataatggttagactaaacatggctctccaacatgttcgaccaagatcaaacctacctagatttgacaactttccaatcgacatggctccaaactgtcccacaatgaaagcagggtctaacgactgtggcttctttgctatgaggtacatacaatattatgactatatggatggtgctatcaatgtagttatagactcggataattcaggtgacctccgcgctcttgccttgtattacctgatcttccatcgactaaacaagaatcgctcattgtctccagaattagaaagattcaagttcccccattattagattagtctagagcaatatcatcagattgatcgttgcactcaaaggtgtgctagcatgtatttagtgtatatgtttgtccatatgtatagtgatctagtgcctaaaactgttttacaacctttacacgttataaacttctgtcacttcttatggatccatgctgatcaagtgcttaccaccagtttttactacattttgttatgttgctatgtttcaatgatgtggtgtgcaattgttatgttgttatgctcaaatattgttcattttttgtt

SEQ ID NO: 204745 - DNA, 933 bp, Zea Mays
ccaaaacctcgacgggtaacgcatacggcaactcctctctccgctgttgctctcttcccgtcgcgctttctcctcgtgcggctactgggtaaccgccgccgctgccgccctacgccaggttctcaggtcattgtcagtccccttacttcgccggctcattcggcggcgacgagcaccaggctgccttggaggtgccaaggttacttgggctccttgccatgattcttcataatgaaatctttacatctggtggagatcagaatttgattaataggattctgagcaaaaacaaaaatgcaactgatttcgagaacaaggatgatggagagtctgatgatgataatgatgaggagggagacgatgaggatgctgaaaaccaagaagatgatggtggtgatgagggatcagatgacaatgggaatgaggaggaagatgacgacgacgatgataacgatcctgcagccaacggtgaaggaggaagtgacgacgatgatgatggtggagaggatgaagaggaggatgatgacgacgatgatgatggggatggtgacaatgaggaagatgaggaggaagaagaggaagaggatgatgacgatgatgtcccccaaccacctactaagaagaggaaatgatagatggctgtgatttggttggctggttgcttacatgcaggaatgctccctgttcgcccctgcctagcagtctcctgtttagtgggtagggggttttagcttgatcgtggacaattcatagcctagcttggaaacaaaaagaaacatttaattgtgcatgtactattaaaccattcctttaatcatgtatctcagattgctaccaacccctgtgatgctccgaatggtttctacattgtgtttgcttcagttttgttgcaacttgcaatttgacaatgttctgatatactttgcttgtcta

SEQ ID NO: 204746 - DNA, 1019 bp, Zea Mays
ccaaaacctcgacgggtaacgcatacggcaactcctctctccgctgttgctctcttcccgtcgcgctttctcctcgtgcggctactgggtaaccgccgccgctgccgccctacgccaggttctcaggtcattgtcagtccccttacttcgccggctcattcggcggcgacgagcaccagctgctttgagtatggaggcgctgtttgggtgcaacaaacatggcggggacaaggccgctgatttggcctcgtttataatcgtgcaggctgccttggaggtgccaaggttacttgggctccttgccatgattcttcataatgaaatctttacatctggtggagatcagaatttgattaataggattctgagcaaaaacaaaaatgcaactgatttcgagaacaaggatgatggagagtctgatgatgataatgatgaggagggagacgatgaggatgctgaaaaccaagaagatgatggtggtgatgagggatcagatgacaatgggaatgaggaggaagatgacgacgacgatgataacgatcctgcagccaacggtgaaggaggaagtgacgacgatgatgatggtggagaggatgaagaggaggatgatgacgacgatgatgatggggatggtgacaatgaggaagatgaggaggaagaagaggaagaggatgatgacgatgatgtcccccaaccacctactaagaagaggaaatgatagatggctgtgatttggttggctggttgcttacatgcaggaatgctccctgttcgcccctgcctagcagtctcctgtttagtgggtagggggttttagcttgatcgtggacaattcatagcctagcttggaaacaaaaagaaacatttaattgtgcatgtactattaaaccattcctttaatcatgtatctcagattgctaccaacccctgtgatgctccgaatggtttctacattgtgtttgcttcagttttgttgcaacttgcaatttgacaatgttctgatatactttgcttgtcta

SEQ ID NO: 204747 - DNA, 1017 bp, Zea Mays
cgaaaccgaacacccgaaccctaacttaagctacttgtattcggatctgatctactaagtttatacggccccagtgtatacgtgcatactaacttctatttttatgccattttttgggtgtatatgagtacactcatgtccttacttggtccgcccctgatcctgaccaaatcctagctgctttgagtatggaggcgctgtttgggtgcaacaaacatggcggggacaaggccgctgatttggcctcgtttataatcgtgcaggctgccttggaggtgccaaggttacttgggctccttgccatgattcttcataatgaaatctttacatctggtggagatcagaatttgattaataggattctgagcaaaaacaaaaatgcaactgatttcgagaacaaggatgatggagagtctgatgatgataatgatgaggagggagacgatgaggatgctgaaaaccaagaagatgatggtggtgatgagggatcagatgacaatgggaatgaggaggaagatgacgacgacgatgataacgatcctgcagccaacggtgaaggaggaagtgacgacgatgatgatggtggagaggatgaagaggaggatgatgacgacgatgatgatggggatggtgacaatgaggaagatgaggaggaagaagaggaagaggatgatgacgatgatgtcccccaaccacctactaagaagaggaaatgatagatggctgtgatttggttggctggttgcttacatgcaggaatgctccctgttcgcccctgcctagcagtctcctgtttagtgggtagggggttttagcttgatcgtggacaattcatagcctagcttggaaacaaaaagaaacatttaattgtgcatgtactattaaaccattcctttaatcatgtatctcagattgctaccaacccctgtgatgctccgaatggtttctacattgtgtttgcttcagttttgttgcaacttgcaatttgacaatgttctgatatactttgcttgtcta

SEQ ID NO: 204748 - DNA, 1704 bp, Zea Mays
tagaatgtccagtgaacagattggctgttcattagcagatgctgcttcaagttgtgaatatactcattttttgagggaagcttcgagatgttatccgtctttgcatgttatttacattaatacttcgctggaaacaaaagctcatgctcatgaacttgttcctacaataacttgcacctcttctaatgttgttccaactatattacaggcatttgcccaaataccaaatcttaatgtctggtatggtcctgattcatatatgggtgcaaacatagcagatttattccagagaatggctacaatgtcagatgaagaaattgcaaaaattcatccagaccacaacagaaaatctttgagttcattactgccacgcctacactattaccagggtggtaactgtatggtacatgacatgtttggccatgaggttgtggggaaaataaaggaacaatattgtgatgcatttctaacagcacactttgaggtccctggagaaatgttctctttggcaatggaagcaaaacggagagcaatgggagttgttggatccactcagaatatcttggatttcattaaggatcatgtgatgggagctctggacagaaatgtagatgaacaccttcagtttgtgctaggaacagaatcagggatgatcacttcaattgttgctgctgttcaggaattacttcatttgtattcttctcaagagagagcaaacatcgaagtagaaattgtgtttccagtatcttcggatgcaatttctaagacatcgaatggttctcatcatgttggttcttcaatggctactgatttgaatagtcttactattgttcctggtgtgagttctggcgaaggctgctccattcatggtggttgtgcctcgtgtccctacatgaagatgaataccctggggtcgctacttaaagtttgccatcagcttcctgataaaaacaacaaattatctgtataccaagctaacagaattaatgttaggactcctctcggaaaatcagttgcagaggttgggtgtgagcctattctgcatatgcggcatttccagaaaacaaggaggttacccgacaagcttgttcaccaggttgtaaatggtttggagagcaacattgaggggcatctgactggtgatttgggcggaaatggggagtttatgtggccttcgagtttagggatggaggatctcatttatcttggcaaggatgttcttaaggtttaggtgcggcaatggcggtggtgatccactccctttgcaatcatcgagagaccgggaccgacaagttcatggctgttgggggccttcctcttccgaaggtcctcaaaggtcctcgatacgaagacattgtttgaaaacgataacaacgaatgccgaagctacaactgaaggataacagcttcaacttaggatagcaacgaaggtcaagcataatgccgagccgaagaagaaaagactagttgatccctggtgatttatgttacgattatgtgtatatgttaaggtcataaatgtattgttatccgggctgcgtcccgtgcctataaattggtgaatagtaccacgtaccgtttacgttggattgtaatcattctcgcatcagcaccttcaaacaagtcgaaggtatcaatgtaatataaatcctattaatattcatatgtttatcatgaaataaatataggcttctgacttcgtca

SEQ ID NO: 204749 - DNA, 2154 bp, Zea Mays
atggcatttgaaatcgataacaacttgatagatgttcatagttctggctctggtacaagtttagatgatttgtcacgcttccgtgcacaggtacctcctattgcagtgcccaggaggaacccttttgaccttccatatgattctgaagaagcagcaattcctggctcagctccttcaatactgcatgcacggaagaacccgtttgaccttccccttgaacagtcaaatgacagtgttgttgtccatgcacatgatattttaaactctggagaacctgcgacttctcgtcgtgacatgatctttagaaggcatgaaagcttcaactttggaaggatggatgtgatccaggagaagcgtttttctagactcaagccatattttgttcctgaaactgtggaatggaatgcaagcaatttcgaaagacagttcaatgataagtctgagtctaagatgagctctgttactaaatctgatattgcttcttcagttgctgatcaggaggatcataaggaccaagatgaaaaggaccttgcagatgttggaagtgaatgctcagatggtatcaactccatagatgttgaactagaccacagtgacatcgatgaccgtgagattgctctacagcaatttgtctttgaaagagcacaagaaagggaagcacattggctccctaaaggaaaaggacgtgaagaagattatgcaccagaatcagctgggagttcaacgatgccatttcatgcagtccctgacctgcttagctgggaagatggagatggtgacaacagccttggtgctaaaccttctttccagcttaacacagaagttaaatgctcagaatgggtttcttcttccaggccacccgtggagggagaatctgattctggggatcttccagagtaccttgatactgaagttgcatcaagctcaaacacagccatacttggtgcaaacaatgcagctgagaaagggacctacaccctatcccagaggagagagttgttgagaacttcaacgtgcaagaaaatcatgaagcagcaatttttactgattcagttgttgccttgactgggttgcatgtaattgaagagcactttgatgatggaactgacagaactctaagctctgaagttgtttcctcatatcctcgagctaatggtgtcacccaatctccatcaaatgcaaaatctctggaggatattgagactgcctttaggctggttagtgatggtgtggtctctgaggccaccatgggtactgaaactttgcagatctcaggtgctgatgctgcagagcccaaaggggctgctggagagctgcatgtcattgatgcgaaatctgtggacgacatacatgctgctttccagaagcactttgatgctattgtcaatagttccttggaagaaaatgaagacaaggataggcatgtagagatggcagaatccatgaagcctgatcaacttactgaagcaatacatgccgaaagtcagcacaacttgggagatgctagggaggctttaccagcggaggagggtacaagcgatatgagtactagcgaagcagagagtcacaacaacattggtgcagcatccgataaggtctccgatagcagtgccaagaatactgcgcaggcagtggtgttggaggtttctagtgaaagagaagaggaaagtgaacagcagtgaagaccagtggattgactgctgaaaggaatcaatagaattccaccatatatgaatttgagacaaaaatgctccctggtttgaagtttgaaggagctatagcaagcattgatggagcgctattgctgagtttcacgggcttgccactgtgcatatacttcacacattcaaaacacaaagttctgaagtagaccttttgtgaatgcgtttgctttttatttttgctattgttttgaggttttggtgggtttgttttagattgatcccccctcgtttggctgtaatttgaagaggtaagttttgcccagacagttcggtgtggctgcagggacatggaacgatctgttctgccatgtgaattgagattttgttgtattgtttgaactttgaactagcgaagctggcaatagaagaacaagataggtgtatttcacctttgaatgtgtcggtgacatttattagtgtccttaccgtg

SEQ ID NO: 204750 - DNA, 816 bp, Zea Mays
ccagaaggtgaagacatcaaggtgccggtgcctggcccatatgtttgcaggatttgcaacccatttctctcctcgactcccacaacacggtccgtacgggaaagagagagaaggtgggagtggaatcgacaggggaaaaccaagcctgtgtttcagagacaactcaggcgacgcgatggcgatggcggcgctgcgacgcgaggggaggcgcctcctcctcgcccccaccgtccccaacccgtcttcggcggccgcttccgctgcggtgacgcgatcctccgccatgtcgcaaccggagatggctccaattggtgcacgttctatttcaactcaagttgtgaggaaccggatgaagagtatcaaaaacatccagaagatcacaaaggctatgaagatggttgcagcatcaaagcttcgggctgttcagacgaggactgaaaattcacgcggcttgtggcagccgttcaccgcccttcttggggacactcctagtgttgacgtcaagaagaatgtgattgtggccattacctctgataagggactctgtggtggtatcaattcaacctcggtgaaagttagcagggcccttcacaaactgacatctggtccagaaaaagaaagcaagtatgttatattaggagaaaaaggcaaagttcagctgttgcgtgactcgaagaacagcattgaaatgaccgcaagtgaactacagaagaaccctatcaactatacacagaatcatgctgtggtgtttgttctctgggctatagaactcctcgaataatttgcaagactaatctggatgcacagaaaaggatg

SEQ ID NO: 204751 - DNA, 726 bp, Zea Mays
atgtttgcaggatttgcaacccatttctctcctcgactcccacaacacggtccgtacgggaaagagagagaaggtgggagtggaatcgacaggggaaaaccaagcctgtgtttcagagacaactcaggcgacgcgatggcgatggcggcgctgcgacgcgaggggaggcgcctcctcctcgcccccaccgtccccaacccgtcttcggcggccgcttccgctgcggtgacgcgatcctccgccatgtcgcaaccggagatggctccaattggtgcacgttctatttcaactcaagttgtgaggaaccggatgaagagtatcaaaaacatccagaagatcacaaaggctatgaagatggttgcagcatcaaagcttcgggctgttcagacgaggactgaaaattcacgcggcttgtggcagccgttcaccgcccttcttggggacactcctagtgttgacgtcaagaagaatgtgattgtggccattacctctgataagggactctgtggtggtatcaattcaacctcggtgaaagttagcagggcccttcacaaactgacatctggtccagaaaaagaaagcaagtatgttatattaggagaaaaaggcaaagttcagctgttgcgtgactcgaagaacagcattgaaatgaccgcaagtgaactacagaagaaccctatcaactatacacaggcccaaatgaaattgtctgccgttacaatcatg

SEQ ID NO: 204752 - DNA, 3020 bp, Zea Mays
cttggaactccactccagtttactaccctcctccgtcgaaagcgacgcctcaccgcaacacaaggccgcccgcggacactgggtcggcggggcccgcacctccttggctcctttccacgcagcttttccacagcacagttgccatctgtcctcgccggcgcaggagcagcctgccctgcctcgcgtgcgaccctcctctgctttttagagagagacagcgagcacgcgcagaggagaggagagagaagcaccacgcctcccaggctcccagcgcgcacgcaccagggtccaggagaggaggacaccgtcgcctcctggttggttcatctcgtcagtcgtcaccgcctcctgcagccaaccggcggggattcctgtcctggatgcgacaaggccagcaggagagaccctccccctctccttcttctccctgagcaggaagcggaaagccttccgcgcttttcaaagatcgtaggccgcacgcctgcagcagccgccgactcagggcgagcgttgagaggaggacgaagaagagactgaagaagagcagaccgaagtgaggccggaggaagggatcgggccttgcgggattcggcagtccatcacgaggtaaatgcggcgctaggagctgcagcgatggcgtcgctggtacccggggtcctcctcaagctcctgcagcacatgaacagcgacgtcaaggtcgcgggcgagcaccggtcgtcgctgctccaggtcgtcagcatcgtgcccgcgctcgccgggagcgacctgttcaccaaccaggggttctacctcaaggtgtccgactcgtcgcacgccacctacgtgtcgctgccggacgagcagcacgacctcatcctcagcgacgtcatccagctggggcagttcgtccatgtcgaccgtctcgaggcagccaccccggtgccgatcctcaggggggtcaggccggtcccgggccgccatgcctgcgtcggcagcccggaggatcttgtggtgaccagctcctccacttttcttcttggcagcggcaaggccgcccaagcctcctccaccaatggtagttccaaggatgccggtgccctgtcgctagagaaagagcagggcaggttagagaagatcaatgctcctcccaagagcaacggcacagagagcaagaagccccagctcaccaagtcgaactccaacctctcgaaacaggcgctcaatggcctcctctcggacaagaaggacgtggttagctcgaaggcaaaatcaaccagcgctaggtcgacgccgtcttccccgaccagcgcccattctctgcctgcgtcgttcgataaattctcgagtgacatgaaacagagagtgagaaccaaaggagcagagaaatcgccgccgtcaaggctgtccttgctagaaaaggctgcgtctgtgttgaaggccactacggcagggaggaagtcctccctgggtaactccattagtaacaccttgttgagcttcgaatctgggcccaaggccttgagaagaagctgggaagggaaagcagatgcaaaggacaaaggcaattcggattcaaagcctgccaaagctgaaaagaagtctgaaaatcgaagctcttcgactcccagacgaaaatcattagcagaagagaaaccatcgaataaggatgacagtaagattctgactccacccaggaagagctcagcgagtgctcctgcagacgattccgacaaagaaactgacagatgctagcgcttcgtggacaacgcttcctccatcactcgttaaactagggaaggagcttctgaagtacagggatgcagcacaaatggctgctgttgaagccatgcaagaagcttctgcggcagagagcatcgttcgatgtttaagctcgtacgcggaggtgagctcgtcggcggaggagcagaacccacagcaggctgtcgagcagttcctcgctctgcatggagcaatctctcgagccaccatcgtcaccgagtctctaaccaaggccacgaccacggtctccaccgcgacttcaccagatcaatcagcagccggcgatgcgtcaacagccgacgaggaaaccatggctgtcgcggcggagcgccgccgccgggcagcctcctgggtcggcgccggcctcgccaccgatctctccgccttctccctctacaacctgaaacccgccccagccagtgtcatctccccgctggccgtcgtgctcgtggacgagtcagccaagccggcggcggcgaaggcagtgccgcccgcgaagtcgcggctgtccccggcgaaggggaggttgaaagctggttccgcggccgccgccgccgccgccgccgctgcggcggcggcagcagtgcctccgcctgaatgggagcggggaggcggcgcggaggagcggggcgagcttgcgcggcggctcggggacgaggcacgggcgtggttcctggcgttcgtggagcggttcctggacgcggacgttgcggcggccgcgccgtgggaccgcgaccgcgccgcgaggatgctcccgcagcttaagcgcgtcaacgactggctgagcgagatcgggaagtcggcagagatggcgccgcatccgccaccggaagcggacggcgaagcggcggcacccactgccaacggcggcgcggccagcggcgtgccggaggagacgatagagaggctcaggaagaagatctacgagtacctcctcaccaacgtggactctgctgccgccgtgctcggcggctgcgagatggcgccggcaccggtggcgaacgggaagaaggggtgacgatagtgggccgcgaaggaaggcccaattgggccgttaacttggctgagccaaaacatgggccggtctggatttaaatgtaaaaatgggctggattgagattgcagtggttgttttggtacttttttctggtgttacagaaagtaaaaaaaatatatttttgtccctctctccttcaattctgaaaccgaaaatatctcctcccttatctctcaaaaccagtcagttgactctatgactgttt

SEQ ID NO: 204753 - DNA, 4225 bp, Zea Mays
ataaaacgaaactagaataaaatctctacaacagcctaggtaactgtaacttgaaactcttttgcaactgaatttataataaaataataataaagaaggttttggggcttcctcgactgacctgcccatacttggaactccactccagtttactaccctcctccgtcgaaagcgacgcctcaccgcaacacaaggccgcccgcggacactgggtcggcggggcccgcacctccttggctcctttccacgcagcttttccacagcacagttgccatctgtcctcgccggcgcaggagcagcctgccctgcctcgcgtgcgaccctcctctgctttttagagagagacagcgagcacgcgcagaggagaggagagagaagcaccacgcctcccaggctcccagcgcgcacgcaccagggtccaggagaggaggacaccgtcgcctcctggttggttcatctcgtcagtcgtcaccgcctcctgcagccaaccggcggggattcctgtcctggatgcgacaaggccagcaggagagaccctccccctctccttcttctccctgagcaggaagcggaaagccttccgcgcttttcaaagatcgtaggccgcacgcctgcagcagccgccgactcagggcgagcgttgagaggaggacgaagaagagactgaagaagagcagaccgaagtgaggccggaggaagggatcgggccttgcgggattcggcagtccatcacgaggtgtgtttgcttctcctcctccttacccatcgtcttctcgtctcgactcccatcaccttctcgtctctagagtcgagactggcggccatgcgctagtacccgtatccctttccggacccaattgaatgcccttgcgacgaacaacgccgtccttactcattgtagccaccgtttctagtacacctctttactagttcacctcctcctccttacggcactgtgctctgcctttgctgttggcttcacaagattgtttgctttcttgttaattagcatgggaaaaaaaagggtgaaatctgttttgatctacctgaacttgttgctcatttcgctcgccaaggctaccgacatgctcatctggatttgctgctctggttgtaaagccgcgcgcgcgcagcctttatttgcattaggtagcttggagtgatccgcttttgccatggctaccgacaacatcattgttctctcagaaggctccactgcttagcctacatattggagtggggttactgaaccagggctcaacactgcgcaggtaaatgcggcgctaggagctgcagcgatggcgtcgctggtacccggggtcctcctcaagctcctgcagcacatgaacagcgacgtcaaggtcgcgggcgagcaccggtcgtcgctgctccaggtcgtcagcatcgtgcccgcgctcgccgggagcgacctgttcaccaaccaggggttctacctcaaggtgtccgactcgtcgcacgccacctacgtgtcgctgccggacgagcagcacgacctcatcctcagcgacgtcatccagctggggcagttcgtccatgtcgaccgtctcgaggcagccaccccggtgccgatcctcaggggggtcaggccggtcccgggccgccatgcctgcgtcggcagcccggaggatcttgtggtgaccagctcctccacttttcttcttggcagcggcaaggccgcccaagcctcctccaccaatggtagttccaaggatgccggtgccctgtcgctagagaaagagcagggcaggttagagaagatcaatgctcctcccaagagcaacggcacagagagcaagaagccccagctcaccaagtcgaactccaacctctcgaaacaggcgctcaatggcctcctctcggacaagaaggacgtggttagctcgaaggcaaaatcaaccagcgctaggtcgacgccgtcttccccgaccagcgcccattctctgcctgcgtcgttcgataaattctcgagtgacatgaaacagagagtgagaaccaaaggagcagagaaatcgccgccgtcaaggctgtccttgctagaaaaggctgcgtctgtgttgaaggccactacggcagggaggaagtcctccctgggtaactccattagtaacaccttgttgagcttcgaatctgggcccaaggccttgagaagaagctgggaagggaaagcagatgcaaaggacaaaggcaattcggattcaaagcctgccaaagctgaaaagaagtctgaaaatcgaagctcttcggtaagtgtcaacaatgccatgtcatatacagcatgggtatataatacttgtgaagttttcatcaatgtaggatcaacaacatcaattctgaacgttttcatcaatatatgatcaagaacctgaccatatgtgtctcttgttaggaacatgtagactgtagtattgcttcaactcatcagtgcccctattaatgtcttatgtccatgcagcatgtttagtaaataacctttgttgattctcccatgttcagactcccagacgaaaatcattagcagaagagaaaccatcgaataaggatgacagtaagattctgactccacccaggaagagctcagcgagtgctcctgcagacgattccgacaaagttgtgaacaacaagctttcttctcctataaggaggacatcaggggttttaaataacccgaatgtcactaatctagtgaaggttgctgcaagtaacaggaaactgacagatgctagcgcttcgtggacaacgcttcctccatcactcgttaaactagggaaggtatttgccagctgagcccctgtgttgctgttgacgttctacgcatatacattaccaaagaaaataatggctgtgataattattttagaaaaaaaagaaggggacgatagtatatcatttcaccacatggtaggggaatgcttccggttattcatttggtgtttaagcttaatgagatgtctgttgtcataggagcttctgaagtacagggatgcagcacaaatggctgctgttgaagccatgcaagaagcttctgcggcagagagcatcgttcgatgtttaagctcgtacgcggaggtgagctcgtcggcggaggagcagaacccacagcaggctgtcgagcagttcctcgctctgcatggagcaatctctcgagccaccatcgtcaccgagtctctaaccaaggccacgaccacggtctccaccgcgacttcaccagatcaatcagcagccggcgatgcgtcaacagccgacgaggaaaccatggctgtcgcggcggagcgccgccgccgggcagcctcctgggtcggcgccggcctcgccaccgatctctccgccttctccctctacaacctgaaacccgccccagccagtgtcatctccccgctggccgtcgtgctcgtggacgagtcagccaagccggcggcggcgaaggcagtgccgcccgcgaagtcgcggctgtccccggcgaaggggaggttgaaagctggttccgcggccgccgccgccgccgccgccgctgcggcggcggcagcagtgcctccgcctgaatgggagcggggaggcggcgcggaggagcggggcgagcttgcgcggcggctcggggacgaggcacgggcgtggttcctggcgttcgtggagcggttcctggacgcggacgttgcggcggccgcgccgtgggaccgcgaccgcgccgcgaggatgctcccgcagcttaagcgcgtcaacgactggctgagcgagatcgggaagtcggcagagatggcgccgcatccgccaccggaagcggacggcgaagcggcggcacccactgccaacggcggcgcggccagcggcgtgccggaggagacgatagagaggctcaggaagaagatctacgagtacctcctcaccaacgtggactctgctgccgccgtgctcggcggctgcgagatggcgccggcaccggtggcgaacgggaagaaggggtgacgatagtgggccgcgaaggaaggcccaattgggccgttaacttggctgagccaaaacatgggccggtctggatttaaatgtaaaaatgggctggattgagattgcagtggttgttttggtacttttttctggtgttacagaaagtaaaaaaaatatatttttgtccctctctccttcaattctgaaaccgaaaatatctcctcccttatctctcaaaaccagtcagttgactctatgactgttt

SEQ ID NO: 204754 - DNA, 1498 bp, Zea Mays
cagccacaaggttcaacaggcatcttttgttgagcttcttaaattcaacgacgcgcaaggcaattcttccccccccccccaaaaaaaacacacggtgcggcggaaggaagcagccatggcgctcacgcctgtcttgctcctcctgctggcctactgcctctcgggcgtgagctcatctgcaggcccgccgccacgcagcttcacctccctgttcgccctcggggactcgtacatcgacgccggcaacttcgtgaccatggccacgccggtcgctccggtgtgggtcgacaagcctccctacggcatgaccttcttcgaacgcccgacggggcgcttcagcgacggaagggtcatcgtagacttcgtagccgcggcgcttggcgtcccgttcctcccggcttcgctagccaacagctcggacgacgacgtcgcgcgccgcggcggcgtgaacttcgccgtcggcggcgcgacggcggtcgacgtcgccttcttcgagaggagacggctggtgccgttcaagctgctgaacaactcgctggacgtgcagctgggctggttcgaggaactcgagccgtccctttgcaacgccacggcggaaactgcaggttcttatggtggcggacggtgtttcagcagatcgcttttcttggtgggcgagtttggggtcaacgactacaccttcctatggacggcgaacaagacggagtccgaggtgatggcgttcgtgccaagagttgtgagaaccatcgcctcggccgtcgagaggctcatcgtccgcgacggcgcggcgcacgtcgtggtgacggggaacccgccgatcgggtgctcgcccacgctcctcaccctgctccgccggacgagccgccccaccagcgcggcggacgacgacgactacgaccacatcggctgcctgcgcggcgtcaacgacgtggccaggcaccacaacgcgctgctcggcgcggccgtggtcggcctcagggccaggcatccccgggccaccatcgtcttcgccgacttctacaccccgatccgtagaatcctggaaaaccccaaccagggtggtggtcagtgacgtcctgaaggcgtgctgcggcaccggcggcgcctacaactggaacggcagcgccgtgtgcgggatgccgggggtgcccgcgtgcgccaacccgtcggcgtacgtgagctgggacggcgtacacttcacggaggccgtcaaccgctacgttgccgaggggtggctctacgggccctacgctcatccgccgatactcaaagccatgcgacggccctagccgccctacaagcagcagctcagctgctgacaacaaattaaaaagagatcaatataactggctgattaagggtctgtttgtctgtataagctatgtaacagctgttgcgctgagaaaactcaaagctatttggttgaaacaactttcaacaatcaattttgtaacaatatgatgcctgcttggtttctcaaataaaccgattcgacaac

SEQ ID NO: 204755 - DNA, 1368 bp, Zea Mays
aaagtctacttcttaattcttatgcactgagcagcatgttcacacaatcatggaactgtcctaacagacaagatggtcccaatcacagcaactggagaccacacagcctctaattggatacctgctacaatcagcaatggcaacggcactggtggcatgttcactgtcgcaagcagaaagtcgaggaatgggttccaattttgtgctgtcactggagacccaggctctcgcaatgtgtctgatgtaaacttcccaagtgattacacagaacttctgacgcagtgatttcaggctaaagaagctgctgaatcagctttcaaggatggaaaacagctactggaaatcgagttccctacagctggactacaaaccgtaccaggtgatggcgaagggggaaatgagatgactggaagcatgcttctcattagagaattttgtgatcgcttcgtacctgcagagaaagcaactcgaaccagagtattcttccctgaggcgaatgaggtttcttttgcaagacagtcagcctttgaaggatgttcgctgaagctagattatcttacgaaaccatccttgttcgaagattttggtttcacaacgaaagtgaaaatggcagatcgtgtgaaaccacaagacgagacattcctcgtggcttatccttacttcaatgtcaatgaaatgctcgtggtcgaagaactttacaaggaagcagtagttggcaccagccggaaattgataatattcaatggagaactagaccgaatcagaagtggatattatccggcgttcttctacccaaaacttgcagagctttccaaaacattcctcccgaagctggatacggtttactatatccacaatttcaagggagctaaagggggaacgcttttcaggtgttaccctgagccttggaaggtcctgaggaaggcgtcgtctgggaactacgtctgcctgcatcaacaagaggagatgccttcgttgaaggaagtggccctcgacatccttccttctgtatagctaggatcttcacttctttggttcatagctgtgctgactggtgctaagttccattacaaggcaatctatcatttcgttgcaatttctcgccctgaaatattcttttgggtagactagaccgtctgagtctcagaagtcagaccaccccgtggggaaagcctcggcaaagtctgacacgtgctcatgctccggctgtccctgccacaaaggcgttcttgtaccagtggaagaccttgtctgaatgtgcaagtggataaacgttgatctgacaggggtggacggtaatggaatagaaacactgcatttacattgcccatagataagttttgtattcaagctagaacaacaacgacg

SEQ ID NO: 204756 - DNA, 1177 bp, Zea Mays
gatttaatcggtcaaaactgatagtattaacttagataaatctaatatgactaaattacgtgaacgtaagacggaaggagtaggaaaaaaaaacgttggtggctttttgtgccgcatcgtacaaacacagaagtaggacaagcagttggggagccgtcgtccgggactccgggctcgcctaaaaagccaccaattgatgagagttgaccaccgttcgtttccactccgcccgccttctcagaatccgatggcccaccttccctcctctccggcggccgctgtacccaccggccaccgcgtctcgccctcgcctcattcttgccgttccctcccgcagctgaagaccgtactgttgtcgataggagccgccgcgggtccccctaggcggtcatggaggggaatggaatcggtggccgcggctcccacgggctcggataacgccgtcatgaaaagcgtgaattacttgcccaatgcactcaccaaggtggaaggagaagagaatggtgcatttactggcatttggctagacgatgagggcttcgttgcagagggttcgaacatgaatgttggcttcgtgacaaagaacaaggagcttctcatgcctcgttttgacaagatcctgagtgggtgcacagcaagacgggttctgaccctcgctgagcatctagtagctcatggaaagctcagcagggtaatatcaaggaatgtgagtgttgaggaagggaagatggccgatgagatgatgctcatcggtagtggcattcttgtcaaacctgttgttcagtgggatgataagataattggttctggacaagaaggcccgatagctcaagcgctttatgaccttattctcgaggacatgagatctggtccgccgtctgttcgtatccccatcccttactaaaactgtttggagttgtgcaaatgattacaagggtgaacactgatttgttggttgtcagagtttggtcaaaacgagaggttggacgaactcatagaagagaacaagtcggcaacagccgaaattgtcaaagagattgatatcttaatttgatgtacaataggacttaagggcctacaaacatttgtgaaaatatttgtaatatataactcgggaatatgttgcaatgatgtttaccgtttgttggttttgcatgcactgactatatgcccctcc

SEQ ID NO: 204757 - DNA, 1457 bp, Zea Mays
ctcgtttcgcccctgtctcctggtgaatcgcaatgcgaccttggaggacctcaagaagtcgtaccggcggctcgcgaggacgtggcaccctgacaagaatctgactggaggggcggaggctgaggccaagttcaagcagataaccgaggcctacgaggtactaagtgatccagagaagcgtgcaatttatgatcagtatggtgaggagggcttaaaggggatgcctccacctggttcccagagccggtcctccacaactgctggcccaagtggtccgagtaatttccattacaatcctagtgacccagatgatttctttgctgagttcatggcaagcaacaagacttactcctttgaccatgaccggaggcgattccagccaaggtcacattggacttcagccaggaacagtagaagtgaagctccttctggttcacagaaagagaatggtgccagtacaagcaatatagaaaagccaccacctgtggagaaaacattactttgtactcttgaagagttgtataatggaacaaaaaggaaaatgaagatcactaggaatgttgcaaagccagatggaagaatagaagttgaaacagaggtcttggcagttgaagtgttacctggctggaaaaagggaaccaagattacattccccaacaaaggcgataagctacatggccagttagcacaagacctgacctttgtcctcgattcgaagccccatgatgtgtacaatcttgaagggaacaaccttcttgtaaagcaggtgatccctctggtagatgccctcgctggggcagagataaacctcacaacccttgatggtcggaatctgcctgtgagggtggaggaagtggtgcgccctggatacgaagttgtgctggagaacgaagggtggccgatcaggaaggaacctgggaagaagggaaagctggtaatcaagtttgatgtgaccttcccgatgaggttatcgccgtcacagcgggcagccatcaggcgaatcatgggcagctaactgggggaagagaaagagaaggggcattgcattcttttacatggagaaggaacagtctctacattggcactagaattcagatggatagttggaacttggaagtaacttgagtcaatcagataggcatttccatggttaaatatcccgttactaatcctacctatttgctttggttaattgaatgtgacctagttttttttttcgttttctttgttatatcgtgtgaatccgtagaaaaggtgggtgatttcgaggataatgtaagctgatttttccatccgaattttttctggggcatgtgatggttttttcattggaaaactgtagcatacccgggaaatggaaggaaaggaaaaaaagatagaaaagacaagaaaggagcctttaagcaaatattcatgtgcctctttcttgtatcatgtatcagttgggcagggttcat

SEQ ID NO: 204758 - DNA, 2080 bp, Zea Mays
ttcccgaagtggacagatactcagataccccaacggaggggaaaggaaaaaaatcaaacgagaaggaagccaccgctccccaatcgcctgcttgccttcccatcctcctcgtagatctccggcaccgggcaccatgagctcctactccggcgaccgctcctcctcctcctccttgcgccccaccaacacctccttcgactcctacaagttcgacttcggcatcaactcctcccgctcctccggctctcgccccctccgcgaccagcggccgggcgcggctaccaaccctccaacgaggcccgccaccggcgccacgtggatgcaccagcccgccagcgccaagccgtcgtggacccaccagccttcccccgccgcggcgtcggcgcccaccatggcggggcctggatccgggccaacctccatggtcggcgacatctttggccggagctgatccgccgccgcgccacaggcatccaggccagccggtgagaagcccaatgtcaacgctagcagctctcccttctcgatgggcggcatggcgggcgcgctcccgaaaactacgggagcaccgatgggctccggtggatacggcgttggtggccggccgatgaaacccgtgggcatggccgcgacggctgctgcgcagccgatggggcagcagagggatccatttggctcaatagacccctttgccgcaaagcctgggtccatgaacgcggtgaagcaggccaattcggtcaagccggatcagggatttggagctttccagggtgtgaattccagtgtcgctgctggatttgggagcttccagagtactgatgctggatctggtggtttccaaagcgctggcacgaccacaccttctaactttacaccaccgccagcaccagcttcaatgcctactcctgtgtctgcagcagttaactcaagcatggatcctctggataatctttttgcttcaaccacaagtgcaccgactgcagctgccgctagtaatggtgacagtggcggtgacatgtttggtgagatggatggttgggtcgatgtggaggcagagtttgctggtggtgatagtggtggcacaaccacagagctggatggcctgccaccgccaccatccggattgacaatatcagctgccaaggccaaagggatggatagctacaagggagggcagtatgctgatgctatcaagtggttgtcatgggctgttgttctaattgagaaatcagggaaagatgctgacattgttgaggtgttgtcttcaagagcttcttcatataaggaggttggtgagtacaagaaggccatcactgactgctcgaaggtgctggatcaagataaggataatgtctcagtgctagtgcagcgtgctctcctttatgaaagcacagagaaatataggcttggtgccgaggacctgcgtttggttctgaagattgatcctacaaataggcttgccaggagtacaattcaccgcctgaacaagttggctgactagtgatgtctttctagcgccctgatgtaatattgtactaccactgtactgcatccttctcacatgagatattgagatctgtgagttatttgaactctttagtctttattactatacttgtggctttgggggaatagtttgcaattgtgttgttataaagtatgaaatacgaatttacatacaatatattttttatttgtataatctacatcatgtatcaaattatcttgaaagctattactctgcggcatgtattctgtaccattttgctagaattcccatggttttgatgggaatcatcaggcatgcaatgtttaaacaacataaggtattgatacaaccttaagattgaaagtattatgatattggcttttgcattgcaacatggtgaaactttggacttgtctagtagaatgatcattagtagttactagtgtcatttgaacatttcctgtctgcttgtcacacttgtttatgctgagtggagtttatattctggtggtttgcaccttgaatcttcagctatctcattccaagatgcaattgcacatctacccatgaatcatcttagtaattttacct

SEQ ID NO: 204759 - DNA, 2474 bp, Zea Mays
atgaaatagtgttttggtatcgatacggtaaacacggcgcccccgctcgcacgctccttcccactcagcagcagcacgcgctctgctccccacgccagcacgcccgagccccgaatcgagtcccctaccccatcgatccccgccgcccgcctttccccgccgcccgcctttcccctacccagctctcggggaccttctctcccagcccgagatccctccccaccgagatcccgcgccgccatggtgtcgtgacggcggcggaggcggcgtcatggagcgggagcccaagtcccccgacgaccgccctgagcccgctgcggcggcggcgcagccgcagccgcagccgctggagtggcggtttgcgcaggtcttcggcgagcgcgccgcgggagaagatgtgcaagatgtggacataatatctgcaattgagtttgacaaatctgggaatcatcttgctactggagatagaggtggacgtgtggttttgttcgaaagaacagacattgctgataatgcttgtcgaggagaacttgagaggcaagaatatcttgtttctaggcatcctgagttccgttacaagaccgaatttcagagtcatgaacctgagtttgactacctaaaaagtttggaaatagaagagaagattaacaagatcaagtggtgccaaacaaccaacaatgcactctttctcttgtctacaaatgacaaaacaatcaagtattggaaggttcaagagaaaaaggtgaaacgcgtttcagtgatgaatttggacacctcccaaagttcagacaatggttcaacttcaagtccgggtaccagtagttgcagagctcttcttccaaatggtggatgcacaggaaaaatgttacaggccaagaatttactcatgttgcgagaagcagacgtgtatatgcccatgcccatgactaccatattaattccatttcaaataatagcgatggagaaacgttcatatcagcagatgatctgcgaataaacctttggaatttagaaattagcaatcagagctttaacattgttgatgtgaaacctgcaaacatggaggatctaactgaggtgatcacttgtgcggagttccatccaactcactgtaatacactagcatatagtagctcaaagggtactattcggcttattgatctgcgacagtcagcactgtgtgacaaccatgctaaactatttgaggagcatgaagcacctggatcaagatccttttttacagagataatagcatcagtttcagatataaaatttgcaagggatggaagacacattcttagtcgtgattatatgacactcaagttgtgggatctaaacatggattcaggcccagttgcaacttttcaggttcatgaatacttacgtcctaagctttgtgatttatacgagaacgattcaatttttgacaaatttgagtgctgcctcagcggcgatggactccatgttgcaactggttcttatagtaatttgtttcgtgtttttggttgttctcctgaaagcgtggaggcatcaacgttggaagccagcagaaatcccatgaggcgacaggttgctgatccagcaaggcctgcacggactctgaccggtgctgtgaggagaggtggagagaacacaagcgttgacgccagcggaaactcttgcgacctctcaacaaagctgctccatcttgcgtggcacccaactgagaactccatcgcgtgcgctgccgcaaacagcttgtacatgtactacgcataggggaacgtgctagagagaactggtacagtagtgctttttttttgcttgtttgcttgcttgaagtgaaaggcgtggtctttcacacgttcaaggatccaggcgcaggaaactgttgtcggttcgatggctggggagcccccgaaaagcggcagtcggtgattccacaagatcagtcctggcacaagctgacttcctcctcgggattttccttggtggatgtgaagctgaagcatgtgttactggtttattattaccgaagctttttggcacccaaggtatgacgacggctgtagctgcctgccttgtagcgaaattggctgcggaaggataaaaggaagcggtaagaagacagacagacaggtcacaggaatacctgctcacgtatcacaaaggctgtaagatttttccccccttctcttttacgacgtgtaatgcaacctagtcagagctaaccatcagttgtcgtgaactctgatagtttctgtcatagatactgtagattttatctatgcagctgctgttgtattcattagattgttcggataagtgtaccagtgggctgtgatttgctggttgtggccgtgatgtggctacgcggaggaattcgaccgaagttaaatctctttctatttaaaattaaatataaaaggatgtaacccaacaagaaggcctcgcaggttccactcttctaataatgacaacatgaaagcttttgc

SEQ ID NO: 204760 - DNA, 2130 bp, Zea Mays
ggcacacttaagtgttttcccaggccaagcctgccgggcaaggaagtgcgggggtgcatggtttccttttctgtggacataatatctgcaattgagtttgacaaatctgggaatcatcttgctactggagatagaggtggacgtgtggttttgttcgaaagaacagacattgctgataatgcttgtcgaggagaacttgagaggcaagaatatcttgtttctaggcatcctgagttccgttacaagaccgaatttcagagtcatgaacctgagtttgactacctaaaaagtttggaaatagaagagaagattaacaagatcaagtggtgccaaacaaccaacaatgcactctttctcttgtctacaaatgacaaaacaatcaagtattggaaggttcaagagaaaaaggtgaaacgcgtttcagtgatgaatttggacacctcccaaagttcagacaatggttcaacttcaagtccgggtaccagtagttgcagagctcttcttccaaatggtggatgcacaggaaaaatgtacagtccaaacaacaatatgtcatttcctccaggaggatgcacatcgctgcgtttgcctgtggtggttacaggccaagaatttactcatgttgcgagaagcagacgtgtatatgcccatgcccatgactaccatattaattccatttcaaataatagcgatggagaaacgttcatatcagcagatgatctgcgaataaacctttggaatttagaaattagcaatcagagctttaacattgttgatgtgaaacctgcaaacatggaggatctaactgaggtgatcacttgtgcggagttccatccaactcactgtaatacactagcatatagtagctcaaagggtactattcggcttattgatctgcgacagtcagcactgtgtgacaaccatgctaaactatttgaggagcatgaagcacctggatcaagatccttttttacagagataatagcatcagtttcagatataaaatttgcaagggatggaagacacattcttagtcgtgattatatgacactcaagttgtgggatctaaacatggattcaggcccagttgcaacttttcaggttcatgaatacttacgtcctaagctttgtgatttatacgagaacgattcaatttttgacaaatttgagtgctgcctcagcggcgatggactccatgttgcaactggttcttatagtaatttgtttcgtgtttttggttgttctcctgaaagcgtggaggcatcaacgttggaagccagcagaaatcccatgaggcgacaggttgctgatccagcaaggcctgcacggactctgaccggtgctgtgaggagaggtggagagaacacaagcgttgacgccagcggaaactcttgcgacctctcaacaaagctgctccatcttgcgtggcacccaactgagaactccatcgcgtgcgctgccgcaaacagcttgtacatgtactacgcataggggaacgtgctagagagaactggcgcaggaaactgttgtcggttcgatggctggggagcccccgaaaagcggcagtcggtgattccacaagatcagtcctggcacaagctgacttcctcctcgggattttccttggtggatgtgaagctgaagcatgtgttactggtttattattaccgaagctttttggcacccaaggtatgacgacggctgtagctgcctgccttgtagcgaaattggctgcggaaggataaaaggaagcggtaagaagacagacagacaggtcacaggaatacctgctcacgtatcacaaaggctgtaagatttttccccccttctcttttacgacgtgtaatgcaacctagtcagagctaaccatcagttgtcgtgaactctgatagtttctgtcatagatactgtagattttatctatgcagctgctgttgtattcattagattgttcggataagtgtaccagtgggctgtgatttgctggttgtggccgtgatgtggctacgcggaggaattcgaccgaagttaaatctctttctatttaaaattaaatataaaaggatgtaacccaacaagaaggcctcgcaggttccactcttctaataatgacaacatgaaagcttttgc

SEQ ID NO: 204761 - DNA, 2982 bp, Zea Mays
aggtcggtctcctcccctctccccaccgagatccggtggtgctcgttcttctggtcttgattcgagtgggaggggaaggggtcgcttcggtgttgggtgactcggagacatgcctgcgctctacgcttacggagatgacgggtgcctcgtctcggcgccggctgagctggccggactcttctgccgcggcgccgtgcagcagcggaagcgcacgctagtggccgcgtccgctgtggccgccgcggccgcggagtgcgtgagggcggccaagaagcagaggcagcttccgtcgctcgacgcgctcccggacgagtgcctcttcgagatcctgcgccgcgtgcccggccgtcgcggcgccgctgcctgcgtctcccgccgctggctcgcgctcctcggcagcatccgggtctccgagttcggccaggccgccgcggcggcggacaccccgtcgctgccggacctgaacgaggagttcgtcatggaggaggataaggaggaggtccccgcggatcggtgcgttgacagggtcctcgagggcaaggaggccaccgacgtccgcctggccgccatggccgtcgtcgccggatcctgtggcgggctggagaagctctccgtccgtggaagccacccggcccgtggcgtcacagaccaaggactctcggcggttgcacgcggcagccccaacctcagctcgctcgcgctctgggacgtgcctcttatcaccgacgctggacttgtggagatcgccgccgggtgccccttgctggagcgtctggatatttctcgatgccccctcatcacagacaagggcctcgccgcttttgcgcaggggtgccccgacttggtgtctctgaccatcgaggcatgctctagtgttggcgatgagggcttgagggcaattggccgcagctgcatgaaactgcaagctgtgaacatcaagaactgtcctcttgttggtgaccaaggcatctccagcctggtgtgctctgccactgcttcgcttgctaagatccggctccagggactgaacataactgatgcttcacttgctgtgattggatactacgggaaggccatcactgacctttcacttactcgtcttgctactgttggtgagaggggtttctgggtgatggctaatgctgctggcctgcagaatctcaggtgcatgagtgttacctcttgccctggagtcactgatcttgcgctcgcttctattgccaagttctgcccaagcttgaagaagctttacctgaggaagtgcggacatgtgtcggatgctggccttaaggccttcacagaatcagcaaaggtgtttgagaacttacagcttgaggaatgcaaccgtgttactcttgttggtattcttgctttcctcaactgcagccagaagttcagggctctctctttggtgaaatgcatggggatcaaggatatctgctctgtgccacaacttcctttttgccgttcacttcgtttccttacaatcaaggactgcccaggtttcaccaatgcaagcttggccgtgtcttctgaatctggtctgatcaaggttgacttgagtggttgcaagaacatcacagatgtggctgtctcctctctggtgaagcgacatggaaaatctctgaagaaagtcagccttgagggttgcagcaagataacagatgctagcctcttcaccatgtctgagagctgcaccgagcttgccgagcttgatctttcaaactgcatggttagtgactatggtgttgccatgctggcatctgcaaggcacctcaagcttcgtgttctctcactgtctggttgctctaaggttactcagaagagtgtgccgttcttgggcaaccttggccagtctctagagggcctcaatcttcagttctgcaacatgattggcaaccacaacatcgcatccctggagaaaaagctctggtggtgcgacatccttgcataggcagcagacaagatgagccattgctggaaggggctcatgtctactgggagccacttccagatgcagatatacgaccttagcagtagcacaaccagacggtcttcaggtttttggctcgcatgccggtcattatggtgggcttccacattgttcaaggaccagttgttttagggggcgctttctagcggagtgctcgtttttcacagatcacctctcagggggtttatctgttttttgagcctcggctgccatcactggcatcctgcccctagatccagacactggtccttgcccttacagtcataagttctttttaggttgccatagtgtccaggtcctctttcgttttactgttgcaggcgttggtgatccattgacagctctggactatcacagttctaactcaactgccagatgctgctggtgctggagcgtctgtggacttgtgcggtgtgtttggttgtcatgtttagagtcttgatgtgttgtgtgtgtgtgctgttctccatggtgtgtactggtcatgtagggttgcatcttttttacggtctctttgggatgcctggtgttcatggtgatcgtggccattgcgaggcgcttactagaagccttgccttgacagccttgtatggttgtttttttttgccagatccctgtttttacaggcagattgttgagtgctgtaagcttggcgaccctctatgaataaatgaaatatgtgtttatgtttgaaactttgtgcttgcctttgatttataacattgttgtgcatgcaagtagatcctcaaaatacacattgtctcgctgatgcattattatggacttatggtttagtttcagtgtaaaagccaaggcttatcttcaagtattgggcggcagctggctcatgcgccgtttgactcctttctaaaagagaattttgattgggcatttcctagttggtcgagttttgtactggctatacatatcatgtagtattatacagttttgtttgtcatgactatgatgcttgagttatggctttcatt

SEQ ID NO: 204762 - DNA, 1613 bp, Zea Mays
atgagattgaaggctagaacagcaagccatctcccctacaatcggaatggtctcaagttttttacaagtgatggtgggctaaataaagctgatatcaaagatatcctggagcgtgcttccaaaatatatgaggaatctgcacataataacctgaaagaacagggggaagcttcgaagggagttgtcactaatgtggactacatgtcaatttatgcttctgatcttgtacaagcagttcgtaaatctgctggagacaaagaaaaaccattggaggaactgcatatagtcgttgatgcagggaatggtgctggtggtttttttgtggataaggtactcaaaccattaggagctgttaccactggaagtcaattccttgagcctgatggtttgtttcccaatcacattcccaaccctgaggacaaaaccgcaatgaagtttattacacaagcagttcttgataacaaggcagacttaggcatcatatttgatactgatgttgacaggtctgcggctgttgattccaggggtcgtgagttgaatcgtaaccgattgattgctttgatggctgccatagttcttgaggaacatccaggaactacagttgtgacagatagtgtgacttcagatggattgactgtatttattgaaaataaacttggagggaagcatcaccgtttcaaacgagggtacaagaatgtaatagacgaggctattcgtctgaactctattggtgaggagtcacatttggccatggaaacaagtgggcatggagcgctgaaagagaaccactggcttgatgatggagcataccttatggtcaaacttttgaataaacttgctgctgctagaacactgggttcaagtattggtagtaaagttttgactgatttggttgagggccttgaggaagctgatgtgacagttgagataaggttaaagattgatcagaatcatgcagatttgaaaggagggtccttccgtgactatggagaatccgtcttgagacatttagagaatgcaatcagcaaagacccaaatctccgtaaagccccggtgaaccatgagggcgtaagggtttcaggatatggtgggtggttcttgctgaggctctctctgcatgatcctgttcttcccctaaacattgaggcacagagtaacgatgatgcgattaagctggggcttgcggttcttgctgctgtgaatgaatttccagcactggatgtgacggcactgaacaaattcgtgcatcagtgaatataagggacggacattggcatcataatgtgatcagcttcgcatggtgtcgtgttcgccccggtcgaacatgttctacatgtggcacgagtatcatacagaaatataccagtttattacttgcacaggctttttagtttggaaagacaagggagatttcagtgttgagatgattcttgtgtgtgtttataccagctatcagagtaagaatatgcgtgcgtactgttgaggctgatctttacttgagaataaggtttgagttacctgagtatttttttaaaaggatcaggaggcttgctgtgatgtgaggccacgaatttgccaataagtacctcgatttttctttagcgatttcacat

SEQ ID NO: 204763 - DNA, 1269 bp, Zea Mays
tctctcctctctttccgcctccatccgaccacccccgcgagcttcgacagttcgacacacgcggccgccccttcccggctccagccacaccccccggaggcggcgatgcagatggcagcggcagttgcccccaccgacgccccggcctcggcgtctgcggcggcggcgccctcccgcccccacgcgcacgccgcggcagcggtggcggccgcgtcgcctcacccgcacgcactgcatccgcatcaccatatgccgcaaccgcggtgggtggtcatcccataccctcctccacaccatcccatggtggccgcgccgccgccaccttctctgcagtttgtgaagcattttacgccgccgtcctcggtaacaccgccgccgccgactggatccggcgggaacgggggcgaggataaccggaccatctgggtgggcgacctgcagtactggatggacgaaaactatcttcacagctgcttcggctctagcggcgaggtggtgaatattaaagtcattcgcaatagacactcgggagtttctgagggttatggttttatagagttttatactcacgtttcagcagagaaggcactgcagaatttttctggtcacgtaatgcctaatactgaccgggcttttaagttaaactgggcatcatatagtatgggagaaaaacgctcggaaatttcgtctgatcactcgatatttgttggcgatttggctgttgatgttactgatgcgatgttgctggaacttttttctaacaaataccgatcggtgaaaggagctaaagttattattgatgcaaacacaggccgttctagaggctacggctttgttaggtttggagatgataatgacaaaattcatgcaatgactgaaatgaatggtgtttactgttccacaagaccaattcgtgtaggaccagcgactcctagaagatctcaaggtgattctggcacttctccaccaaggcaatctcatgttgactctactaacaggacggtatatgttggtgggcttgaccccaatgttagcgaagatgaactgaggaaagcatttgcaaaatatggtgatcttgcctctgtcaaaattccttttgggaaacaatgtgggtttgttcaatttgtaaacagagttgatgctgaagaagcactgcatgggttgaatggatcaactattgggaagcaggcagttcgactttcctggggccgcagccctgcaagtaaacagagactgataacaccattatgttcaagaaagggaatgaga

SEQ ID NO: 204764 - DNA, 5118 bp, Zea Mays
aggaaagccaagcagcagccgcaccggcgcacgcacccacggccacgacccacctgcgggcggcgctcaacccgagtggatgtggacggagccgcccgcaggccgcacgacagacagagatagagagagagcacaggcggccacgcccgctcctaccaccgcaccgcatcgccacttacccctcgtgccgccgcgctgccttttcctccccgcgtccctttcgtccctcaccttgtcggagaccgacgcaccccccctctccgctctccgctcctcctccccacaccccaccccacccgctctccagtccacctcacgctcacactcccgcagcccgcccgccagccgccatcctgctgccacctctttcttccttgcgggggcggcaaccaggcgcacggcacctgctccctcccactcccactcccacaccgcgccagccaccagaataaagcagccgttgcggcgtcgcgtcggcgagcacagcgcagcgcagcgcgcagcggcccgggtgcatgaggagggggcggcggctgccgaggccgaggctgtgacgaaggagcgcggagggcgatgccgctggtcaggttcgaggtgcggaatgaggtggggctgggggaccccggcctctacggcggcggagctgccgctgccgccgccgccaccgccgccgcgggggaggaggagcccaaggcgctgctcgagggcgtcgccgtcgcgggcctcgtcgggatcctgcgccagctcggagatctcgcggaattcgcggctgatgttttccatgacctacacgagcaagttatagctacatctgctaggggtcgcaaggtgctgactcgagtacagaacatcgaagcagcacttccatctctcgaaaaggctgtgaagaatcagaagagtcacatacattttgcctatgttccgggctctgattggcacactcagcttcaaaatgagcaaaatcacctgctagcgactgatctgcctcgttttatgatggattcgtatgaagaatgccgagatccgccacggctttaccttcttgataaatttgacaatgctggtgcgggggcttgtgtaaagagatattctgatccatcttatttcaagaaagcatgggatacgatgagagcagataagaatgctaatgtacaaagagaaaagagatcacagaaaattaagagaaaaggatcacgactaagggaaccatatcatggacaagccatgcctaggcataggggcactgaatttcagcgatcacttactgctggccaacttgttaacaggcagtttgcatctcccagcaacgatggtcagggtatctcagagcataagtctacacctgatgcaagatctaatcctgacaatatgagcagatcttcttctcttagttcgaagacacaactgagttcagtagaacaagctatcgatacaaaaccttctgcagtttctcatgagaatggccatgggaagtcattggatactaagttgcacaagcctggtggtctgccttcgcccgtactgcttaacagcaccactgtggatgatcatagtgaccatttgaagcaaggttccccgccagatggtatggttgctagatcaccttatgttaaatgggatgaaaagactgcaattatcatgtctacaagttctatctactgtgacgatgttgttatggatgaggttgaagatgcagaacctacttgtattagctctgtgcagaaagaaactgaccataaggtaatggatacattgcaccagcaagatgccttacttaaaaagacaaaatcactgttagtgccatcagtcttgaaccaccatgatgacattccaggagaagccgacaactacatggatgcacttaatacacttgaatctgagacagaaacagaatctgaatttcaaactaaaaatcgggtgccagcaccttccttcaaagctgaagcccctcaagtgggggcaattgacaatattgttccacagtgtcttgattcctctgctgctgactttattgacacatgtcaagaatctgatattatttgtacttctgaaagagcaattgattttcccagtttgtcaaatgcagattctcttgaggtttcacaactagaactttcagattatacgtctgtaagcccctataaagagtcatctgtcatcactaatatccacgagagtggtgcagagggtgctcgtggagatccttgtgagattatagagcctctgcaggtccattcagccatacttgccaatgatggttcccctgtttgcaatgaaataccaaagagtaagccagatgatgatcttgggtattttcaagagattcctcaaccaggtttctccacctgtatggttattccatcaaacaaagagtctgctgttgccaacaaaaaccttgaaggtgacgcaaaaagtgatgatgatcttattgatggtaccgctgataatgttgtatcgggacctaagattgccaacatggtagttgatgaggtgggtttcaagatggcacctgctaatagaagttcacctggtgacccctctgatgactcatgtgtcattcctgaaagtaggcctcaggattatgctgtaaagagctatgagggagttggtgattgtggtgtgactgaagtgtctaagttatgtagtgagcctcttaacaaaccatcagataatatatgtgcaactcaagatgttcctacaaatacctctactatgtctgctggtgccagtgaagtgtctagttcgtggagtgagcctgttaccgaactaatcgatgacagatgtgcaactcaaggtgttccagcaaatgcctctaccacgtctactgttgtaccatctgttaaactctggacaaatgctgggctctttggacttgaaccatccaaacctccagtatttggtaatggtccaagggaggatactccacctggttttaaagaagctcaaccagtccattcaactgaattcacagaagtgcactgttcaaagccaactgaatcagcagctgtagatgtcccaaatggaaacacatccattaccagcagctttgtggaaaagcttgttggtattcgtcctggttctgcaaacctcaatagctcaggggcaaatcaatcagcagccagaatacctgatccaattcatagtcatacagatgggcactcagatttttcgtcatcctttgagcacaataacatgactggcaaacatacttcaataagcgaacttctagaatttgaggggagtgctgatactggcaccaaaatatactcaactgacatgagaaataacgctgtgtctgcatcaagcttttcaagcattgcacaaaggtttcttgctaatacacttcagagaagaacttccaaatatactgatcttcctatgtcttctgagagggcaaatgctgatacaagtgcaaaatctgaatctactctaaatcctgttgtagaaccaagtgaagcggtatttgcagaggaaactaagtttgagaacaaaacagaaaatggaatggatggattgtccaaaacatcaatattttctagccgccattactctgagaaatcgtctccgccacttgagtacatgaaaatatcttttcaccctatgagcgcatttgagatgtcaaagctgaacctagatttctgtgatggaaatattcatgaaatttctgatgatatgatgttaccgacatttcagttactttcagagtcttccattccacagccaggcagtggttctgagtctgaagatgacacctttggtaggtcatatagttattcttcatatgatgatctgagtccccggctatattcaaactctgaggcatgggatcaagatgatggaactggactggaggaacatgagttatatgatgattcaaatcagataggatcctcaacagcacctttatctagctacatgggattcgagcagatgaacttatctgacatgaagtcagatatttcacttgcaaacattggggatcagaatgtaataggcactttacaatcctgtactgttgaagaacttccaaactttgatacattgatgtccagaagtgatgatcaaaatggtgaaacccccattccacataatctggggaatatgacaccagatgaagatcagttgccaccaccacctcctctccccccaatgcagtggaggatgacaagacaaacaacttcactagaagaggaaacttgcattacaactaaagatatgcttagaaaaacttctagcctaccacatatacacacctctgcccaggaagaacactgtcctccaactgcaccattggatctacaagggcatgctggggaagtgggtgtccagaaaactggtggggtacgagaaattactaatcctcctagtatcatcgatataaaatcaagtttgcttcagcagatcagggataagtcagagcagctgaagcttaatggacatgaaaggtcaaaaaaagcagtaggcggtgacattaaaagcttagacgaaagggaggagttgcttcagcaaatcaggagcaagaccttcaatttaagacgcacaaacgcatctaaggcagatggctcatcacaatctacagccagttccaacgttgcagcaattttggagaaagccaacgctatccggcaggctgtggccagtgatgagggtggcgatgatgatacatggagtgatatatgaccacctaattgcagacgttcatggtagtcttttcctgtatattaagctattacaagatgaagtgattaaatgtgaataccatccttttcttcattgtaattagattttgcaggtcttgttttgtaccttccttagttcatattagtgaatcctaccgtaggtcgctgtggtcgtggaaatgtcagagcatttccacattatgtaaatgcatctttattatttatttatgatagtgagaacagctgaatagctgataaaaataagcatactaatctatctttttatcattgtattgattttttttgcaatgataataagatggagcatgatgttgcaaaaggttgtccttttagctgctatcaagtaaaatatttctaaagcgataggtctgcattaccttgccaagtcacgttttcctgcggggacttctttattcca

SEQ ID NO: 204765 - DNA, 5359 bp, Zea Mays
accttgtcggagaccgacgcaccccccctctccgctctccgctcctcctccccacaccccaccccacccgctctccagtccacctcacgctcacactcccgcagcccgcccgccagccgccatcctgctgccacctctttcttccttgcgggggcggcaaccaggcgcacggcacctgctccctcccactcccactcccacaccgcgccagccaccagaataaagcagccgttgcggcgtcgcgtcggcgagcacagcgcagcgcagcgcgcagcggcccgggtgcatgaggagggggcggcggctgccgaggccgaggctgtgacgaaggagcgcggagggcgatgccgctggtcaggttcgaggtgcggaatgaggtggggctgggggaccccggcctctacggcggcggagctgccgctgccgccgccgccaccgccgccgcgggggaggaggagcccaaggcgctgctcgagggcgtcgccgtcgcgggcctcgtcgggatcctgcgccagctcggagatctcgcggactttggtcataccagattcgcggctgatgttttccatgacctacacgagcaagttatagctacatctgctaggggtcgcaaggtgctgactcgagtacagaacatcgaagcagcacttccatctctcgaaaaggctgtgaagaatcagaagagtcacatacattttgcctatgttccgggctctgattggcacactcagcttcaaaatgagcaaaatcacctgctagcgactgatctgcctcgttttatgatggattcgtatgaagaatgccgagatccgccacggctttaccttcttgataaatttgacaatgctggtgcgggggcttgtgtaaagagatattctgatccatcttatttcaagaaagcatgggatacgatgagagcagataagaatgctaatgtacaaagagaaaagagatcacagaaaattaagagaaaaggatcacgactaagggaaccatatcatggacaagccatgcctaggcataggggcactgaatttcagcgatcacttactgctggccaacttgttaacagcaggcagtttgcatctcccagcaacgatggtcagggtatctcagagcataagtctacacctgatgcaagatctaatcctgacaatatgagcagatcttcttctcttagttcgaagacacaactgagttcagtagaacaagctatcgatacaaaaccttctgcagtttctcatgagaatggccatgggaagtcattggatactaagttgcacaagcctggtggtctgccttcgcccgtactgcttaacagcaccactgtggatgatcatagtgaccatttgaagcaaggttccccgccagatggtatggttgctagatcaccttatgttaaatgggatgaaaagactgcaattatcatgtctacaagttctatctactgtgacgatgttgttatggatgaggttgaagatgcagaacctacttgtattagctctgtgcagaaagaaactgaccataaggtaatggatacattgcaccagcaagatgccttacttaaaaagacaaaatcactgttagtgccatcagtcttgaaccaccatgatgacattccaggagaagccgacaactacatggatgcacttaatacacttgaatctgagacagaaacagaatctgaatttcaaactaaaaatcgggtgccagcaccttccttcaaagctgaagcccctcaagtgggggcaattgacaatattgttccacagtgtcttgattcctctgctgctgactttattgacacatgtcaagaatctgatattatttgtacttctgaaagagcaattgattttcccagtttgtcaaatgcagattctcttgaggtttcacaactagaactttcagattatacgtctgtaagcccctataaagagtcatctgtcatcactaatatccacgagagtggtgcagagggtgctcgtggagatccttgtgagattatagagcctctgcaggtccattcagccatacttgccaatgatggttcccctgtttgcaatgaaataccaaagagtaagccagatgatgatcttgggtattttcaagagattcctcaaccaggtttctccacctgtatggttattccatcaaacaaagagtctgctgttgccaacaaaaaccttgaaggtgacgcaaaaagtgatgatgatcttattgatggtaccgctgataatgttgtatcgggacctaagattgccaacatggtagttgatgaggtgggtttcaagatggcacctgctaatagaagttcacctggtgacccctctgatgactcatgtgtcattcctgaaagtaggcctcaggattatgctgtaaagagctatgagggagttggtgattgtggtgtgactgaagtgtctaagttatgtagtgagcctcttaacaaaccatcagataatatatgtgcaactcaagatgttcctacaaatacctctactatgtctgctggtgccagtgaagtgtctagttcgtggagtgagcctgttaccgaactaatcgatgacagatgtgcaactcaaggtgttccagcaaatgcctctaccacgtctactgttgtaccatctgttaaactctggacaaatgctgggctctttggacttgaaccatccaaacctccagtatttggtaatggtccaagggaggatactccacctggttttaaagaagctcaaccagtccattcaactgaattcacagaagtgcactgttcaaagccaactgaatcagcagctgtagatgtcccaaatggaaacacatccattaccagcagctttgtggaaaagcttgttggtattcgtcctggttctgcaaacctcaatagctcaggggcaaatcaatcagcagccagaatacctgatccaattcatagtcatacagatgggcactcagatttttcgtcatcctttgagcacaataacatgactggcaaacatacttcaataagcgaacttctagaatttgaggggagtgctgatactggcaccaaaatatactcaactgacatgagaaataacgctgtgtctgcatcaagcttttcaagcattgcacaaaggtttcttgctaatacacttcagagaagaacttccaaatatactgatcttcctatgtcttctgagagggcaaatgctgatacaagtgcaaaatctgaatctactctaaatcctgttgtagaaccaagtgaagcggtatttgcagaggaaactaagtttgagaacaaaacagaaaatggaatggatggattgtccaaaacatcaatattttctagccgccattactctgagaaatcgtctccgccacttgagtacatgaaaatatcttttcaccctatgagcgcatttgagatgtcaaagctgaacctagatttctgtgatggaaatattcatgaaatttctgatgatatgatgttaccgacatttcagttactttcagagtcttccattccacagccaggcagtggttctgagtctgaagatgacacctttggtaggtcatatagttattcttcatatgatgatctgagtccccggctatattcaaactctgaggcatgggatcaagatgatggaactggactggaggaacatgagttatatgatgattcaaatcagataggatcctcaacagcacctttatctagctacatgggattcgagcagatgaacttatctgacatgaagtcagatatttcacttgcaaacattggggatcagaatgtaataggcactttacaatcctgtactgttgaagaacttccaaactttgatacattgatgtccagaagtgatgatcaaaatggtgaaacccccattccacataatctggggaatatgacaccagatgaagatcagttgccaccaccacctcctctccccccaatgcagtggaggatgacaagacaaacaacttcactagaagaggaaacttgcattacaactaaagatatgcttagaaaaacttctagcctaccacatatacacacctctgcccaggaagaacactgtcctccaactgcaccattggatctacaagggcatgctggggaagtgggtgtccagaaaactggtggggtacgagaaattactaatcctcctagtatcatcgatataaaatcaagtttgcttcagcagatcagggataaggtttgttctgccttttgaattggaaaaaaagaccaatatgttcttctttatgattttatagtgctgttttacttttactataaaaaagtagcctacaagaaacaaatgtagaccatctttggatgtgagagatctcacttttttataaagtatattcatatagctgttgacttgacccataaggataacaagatggaatgcttaccgtgaattttatgaactgtgattcaaaaaagctatctgacccaagacactctgtcacatgctaaccatgtccagtacagaattcttgtggccatttattttatcaactaaaacaaatacaagtcccagtaatggccattgaccagttgattcttgaagtcaggaagctcattaccagttttatagtttctgatcgttgcataaaatttatgattattttatccatttcgcctaatgaattatcacagtcagagcagctgaagcttaatggacatgaaaggtcaaaaaaagcagtaggcggtgacattaaaagcttagacgaaagggaggagttgcttcagcaaatcaggagcaagaccttcaatttaagacgcacaaacgcatctaaggcagatggctcatcacaatctacagccagttccaacgttgcagcaattttggagaaagccaacgctatccggcaggctgtggccagtgatgagggtggcgatgatgatacatggagtgatatatgaccacctaattgcagacgttcatggtagtcttttcctgtatattaagctattacaagatgaagtgattaaatgtgaataccatccttttcttcattgtaattagattttgcaggtcttgttttgtaccttccttagttcatattagtgaatcctaccgtaggtcgctgtggtcgtggaaatgtcagagcatttccacattatgtaaatgcatctttattatttatttatgatagtgagaacagctgaatagctgataaaaataagcatactaatctatctttttatcattgtattgattttttttgcaatgataataagatggagcatgatgttgcaaaaggttgtccttttagctgctatcaagtaaaatatttctaaagcgataggtctgcattaccttgccaagtcacgttttcctgcggggacttctttattcca

SEQ ID NO: 204766 - DNA, 4895 bp, Zea Mays
accttgtcggagaccgacgcaccccccctctccgctctccgctcctcctccccacaccccaccccacccgctctccagtccacctcacgctcacactcccgcagcccgcccgccagccgccatcctgctgccacctctttcttccttgcgggggcggcaaccaggcgcacggcacctgctccctcccactcccactcccacaccgcgccagccaccagaataaagcagccgttgcggcgtcgcgtcggcgagcacagcgcagcgcagcgcgcagcggcccgggtgcatgaggagggggcggcggctgccgaggccgaggctgtgacgaaggagcgcggagggcgatgccgctggtcaggttcgaggtgcggaatgaggtggggctgggggaccccggcctctacggcggcggagctgccgctgccgccgccgccaccgccgccgcgggggaggaggagcccaaggcgctgctcgagggcgtcgccgtcgcgggcctcgtcgggatcctgcgccagctcggagatctcgcggactttggtcataccagattcgcggctgatgttttccatgacctacacgagcaagttatagctacatctgctaggggtcgcaaggtgctgactcgagtacagaacatcgaagcagcacttccatctctcgaaaaggctgtgaagaatcagaagagtcacatacattttgcctatgttccgggctctgattggcacactcagcttcaaaatgagcaaaatcacctgctagcgactgatctgcctcgttttatgatggattcgtatgaagaatgccgagatccgccacggctttaccttcttgataaatttgacaatgctggtgcgggggcttgtgtaaagagatattctgatccatcttatttcaagaaagcatgggatacgatgagagcagataagaatgctaatgtacaaagagaaaagagatcacagaaaattaagagaaaaggatcacgactaagggaaccatatcatggacaagccatgcctaggcataggggcactgaatttcagcgatcacttactgctggccaacttgttaacaggcagtttgcatctcccagcaacgatggtcagggtatctcagagcataagtctacacctgatgcaagatctaatcctgacaatatgagcagatcttcttctcttagttcgaagacacaactgagttcagtagaacaagctatcgatacaaaaccttctgcagtttctcatgagaatggccatgggaagtcattggatactaagttgcacaagcctggtggtctgccttcgcccgtactgcttaacagcaccactgtggatgatcatagtgaccatttgaagcaaggttccccgccagatggtatggttgctagatcaccttatgttaaatgggatgaaaagactgcaattatcatgtctacaagttctatctactgtgacgatgttgttatggatgaggttgaagatgcagaacctacttgtattagctctgtgcagaaagaaactgaccataaggtaatggatacattgcaccagcaagatgccttacttaaaaagacaaaatcactgttagtgccatcagtcttgaaccaccatgatgacattccaggagaagccgacaactacatggatgcacttaatacacttgaatctgagacagaaacagaatctgaatttcaaactaaaaatcgggtgccagcaccttccttcaaagctgaagcccctcaagtgggggcaattgacaatattgttccacagtgtcttgattcctctgctgctgactttattgacacatgtcaagaatctgatattatttgtacttctgaaagagcaattgattttcccagtttgtcaaatgcagattctcttgaggtttcacaactagaactttcagattatacgtctgtaagcccctataaagagtcatctgtcatcactaatatccacgagagtggtgcagagggtgctcgtggagatccttgtgagattatagagcctctgcaggtccattcagccatacttgccaatgatggttcccctgtttgcaatgaaataccaaagagtaagccagatgatgatcttgggtattttcaagagattcctcaaccaggtttctccacctgtatggttattccatcaaacaaagagtctgctgttgccaacaaaaaccttgaaggtgacgcaaaaagtgatgatgatcttattgatggtaccgctgataatgttgtatcgggacctaagattgccaacatggtagttgatgaggtgggtttcaagatggcacctgctaatagaagttcacctggtgacccctctgatgactcatgtgtcattcctgaaagtaggcctcaggattatgctgtaaagagctatgagggagttggtgattgtggtgtgactgaagtgtctaagttatgtagtgagcctcttaacaaaccatcagataatatatgtgcaactcaagatgttcctacaaatacctctactatgtctgctggtgccagtgaagtgtctagttcgtggagtgagcctgttaccgaactaatcgatgacagatgtgcaactcaaggtgttccagcaaatgcctctaccacgtctactgttgtaccatctgttaaactctggacaaatgctgggctctttggacttgaaccatccaaacctccagtatttggtaatggtccaagggaggatactccacctggttttaaagaagctcaaccagtccattcaactgaattcacagaagtgcactgttcaaagccaactgaatcagcagctgtagatgtcccaaatggaaacacatccattaccagcagctttgtggaaaagcttgttggtattcgtcctggttctgcaaacctcaatagctcaggggcaaatcaatcagcagccagaatacctgatccaattcatagtcatacagatgggcactcagatttttcgtcatcctttgagcacaataacatgactggcaaacatacttcaataagcgaacttctagaatttgaggggagtgctgatactggcaccaaaatatactcaactgacatgagaaataacgctgtgtctgcatcaagcttttcaagcattgcacaaaggtttcttgctaatacacttcagagaagaacttccaaatatactgatcttcctatgtcttctgagagggcaaatgctgatacaagtgcaaaatctgaatctactctaaatcctgttgtagaaccaagtgaagcggtatttgcagaggaaactaagtttgagaacaaaacagaaaatggaatggatggattgtccaaaacatcaatattttctagccgccattactctgagaaatcgtctccgccacttgagtacatgaaaatatcttttcaccctatgagcgcatttgagatgtcaaagctgaacctagatttctgtgatggaaatattcatgaaatttctgatgatatgatgttaccgacatttcagttactttcagagtcttccattccacagccaggcagtggttctgagtctgaagatgacacctttggtaggtcatatagttattcttcatatgatgatctgagtccccggctatattcaaactctgaggcatgggatcaagatgatggaactggactggaggaacatgagttatatgatgattcaaatcagataggatcctcaacagcacctttatctagctacatgggattcgagcagatgaacttatctgacatgaagtcagatatttcacttgcaaacattggggatcagaatgtaataggcactttacaatcctgtactgttgaagaacttccaaactttgatacattgatgtccagaagtgatgatcaaaatggtgaaacccccattccacataatctggggaatatgacaccagatgaagatcagttgccaccaccacctcctctccccccaatgcagtggaggatgacaagacaaacaacttcactagaagaggaaacttgcattacaactaaagatatgcttagaaaaacttctagcctaccacatatacacacctctgcccaggaagaacactgtcctccaactgcaccattggatctacaagggcatgctggggaagtgaaaactggtggggtacgagaaattactaatcctcctagtatcatcgatataaaatcaagtttgcttcagcagatcagggataagtcagagcagctgaagcttaatggacatgaaaggtcaaaaaaagcagtaggcggtgacattaaaagcttagacgaaagggaggagttgcttcagcaaatcaggagcaagaccttcaatttaagacgcacaaacgcatctaaggcagatggctcatcacaatctacagccagttccaacgttgcagcaattttggagaaagccaacgctatccggcaggctgtggccagtgatgagggtggcgatgatgatacatggagtgatatatgaccacctaattgcagacgttcatggtagtcttttcctgtatattaagctattacaagatgaagtgattaaatgtgaataccatccttttcttcattgtaattagattttgcaggtcttgttttgtaccttccttagttcatattagtgaatcctaccgtaggtcgctgtggtcgtggaaatgtcagagcatttccacattatgtaaatgcatctttattatttatttatgatagtgagaacagctgaatagctgataaaaataagcatactaatctatctttttatcattgtattgattttttttgcaatgataataagatggagcatgatgttgcaaaaggttgtccttttagctgctatcaagtaaaatatttctaaagcgataggtctgcattaccttgccaagtcacgttttcctgcggggacttctttattcca

SEQ ID NO: 204767 - DNA, 4393 bp, Zea Mays
ctttgtttctcgggtgcgacatggaggtcttaaattcgcggctgatgttttccatgacctacacgagcaagttatagctacatctgctaggggtcgcaaggtgctgactcgagtacagaacatcgaagcagcacttccatctctcgaaaaggctgtgaagaatcagaagagtcacatacattttgcctatgttccgggctctgattggcacactcagcttcaaaatgagcaaaatcacctgctagcgactgatctgcctcgttttatgatggattcgtatgaagaatgccgagatccgccacggctttaccttcttgataaatttgacaatgctggtgcgggggcttgtgtaaagagatattctgatccatcttatttcaagaaagcatgggatacgatgagagcagataagaatgctaatgtacaaagagaaaagagatcacagaaaattaagagaaaaggatcacgactaagggaaccatatcatggacaagccatgcctaggcataggggcactgaatttcagcgatcacttactgctggccaacttgttaacagcaggcagtttgcatctcccagcaacgatggtcagggtatctcagagcataagtctacacctgatgcaagatctaatcctgacaatatgagcagatcttcttctcttagttcgaagacacaactgagttcagtagaacaagctatcgatacaaaaccttctgcagtttctcatgagaatggccatgggaagtcattggatactaagttgcacaagcctggtggtctgccttcgcccgtactgcttaacagcaccactgtggatgatcatagtgaccatttgaagcaaggttccccgccagatggtatggttgctagatcaccttatgttaaatgggatgaaaagactgcaattatcatgtctacaagttctatctactgtgacgatgttgttatggatgaggttgaagatgcagaacctacttgtattagctctgtgcagaaagaaactgaccataaggtaatggatacattgcaccagcaagatgccttacttaaaaagacaaaatcactgttagtgccatcagtcttgaaccaccatgatgacattccaggagaagccgacaactacatggatgcacttaatacacttgaatctgagacagaaacagaatctgaatttcaaactaaaaatcgggtgccagcaccttccttcaaagctgaagcccctcaagtgggggcaattgacaatattgttccacagtgtcttgattcctctgctgctgactttattgacacatgtcaagaatctgatattatttgtacttctgaaagagcaattgattttcccagtttgtcaaatgcagattctcttgaggtttcacaactagaactttcagattatacgtctgtaagcccctataaagagtcatctgtcatcactaatatccacgagagtggtgcagagggtgctcgtggagatccttgtgagattatagagcctctgcaggtccattcagccatacttgccaatgatggttcccctgtttgcaatgaaataccaaagagtaagccagatgatgatcttgggtattttcaagagattcctcaaccaggtttctccacctgtatggttattccatcaaacaaagagtctgctgttgccaacaaaaaccttgaaggtgacgcaaaaagtgatgatgatcttattgatggtaccgctgataatgttgtatcgggacctaagattgccaacatggtagttgatgaggtgggtttcaagatggcacctgctaatagaagttcacctggtgacccctctgatgactcatgtgtcattcctgaaagtaggcctcaggattatgctgtaaagagctatgagggagttggtgattgtggtgtgactgaagtgtctaagttatgtagtgagcctcttaacaaaccatcagataatatatgtgcaactcaagatgttcctacaaatacctctactatgtctgctggtgccagtgaagtgtctagttcgtggagtgagcctgttaccgaactaatcgatgacagatgtgcaactcaaggtgttccagcaaatgcctctaccacgtctactgttgtaccatctgttaaactctggacaaatgctgggctctttggacttgaaccatccaaacctccagtatttggtaatggtccaagggaggatactccacctggttttaaagaagctcaaccagtccattcaactgaattcacagaagtgcactgttcaaagccaactgaatcagcagctgtagatgtcccaaatggaaacacatccattaccagcagctttgtggaaaagcttgttggtattcgtcctggttctgcaaacctcaatagctcaggggcaaatcaatcagcagccagaatacctgatccaattcatagtcatacagatgggcactcagatttttcgtcatcctttgagcacaataacatgactggcaaacatacttcaataagcgaacttctagaatttgaggggagtgctgatactggcaccaaaatatactcaactgacatgagaaataacgctgtgtctgcatcaagcttttcaagcattgcacaaaggtttcttgctaatacacttcagagaagaacttccaaatatactgatcttcctatgtcttctgagagggcaaatgctgatacaagtgcaaaatctgaatctactctaaatcctgttgtagaaccaagtgaagcggtatttgcagaggaaactaagtttgagaacaaaacagaaaatggaatggatggattgtccaaaacatcaatattttctagccgccattactctgagaaatcgtctccgccacttgagtacatgaaaatatcttttcaccctatgagcgcatttgagatgtcaaagctgaacctagatttctgtgatggaaatattcatgaaatttctgatgatatgatgttaccgacatttcagttactttcagagtcttccattccacagccaggcagtggttctgagtctgaagatgacacctttggtaggtcatatagttattcttcatatgatgatctgagtccccggctatattcaaactctgaggcatgggatcaagatgatggaactggactggaggaacatgagttatatgatgattcaaatcagataggatcctcaacagcacctttatctagctacatgggattcgagcagatgaacttatctgacatgaagtcagatatttcacttgcaaacattggggatcagaatgtaataggcactttacaatcctgtactgttgaagaacttccaaactttgatacattgatgtccagaagtgatgatcaaaatggtgaaacccccattccacataatctggggaatatgacaccagatgaagatcagttgccaccaccacctcctctccccccaatgcagtggaggatgacaagacaaacaacttcactagaagaggaaacttgcattacaactaaagatatgcttagaaaaacttctagcctaccacatatacacacctctgcccaggaagaacactgtcctccaactgcaccattggatctacaagggcatgctggggaagtgggtgtccagaaaactggtggggtacgagaaattactaatcctcctagtatcatcgatataaaatcaagtttgcttcagcagatcagggataagtcagagcagctgaagcttaatggacatgaaaggtcaaaaaaagcagtaggcggtgacattaaaagcttagacgaaagggaggagttgcttcagcaaatcaggagcaagaccttcaatttaagacgcacaaacgcatctaaggcagatggctcatcacaatctacagccagttccaacgttgcagcaattttggagaaagccaacgctatccggcaggctgtggccagtgatgagggtggcgatgatgatacatggagtgatatatgaccacctaattgcagacgttcatggtagtcttttcctgtatattaagctattacaagatgaagtgattaaatgtgaataccatccttttcttcattgtaattagattttgcaggtcttgttttgtaccttccttagttcatattagtgaatcctaccgtaggtcgctgtggtcgtggaaatgtcagagcatttccacattatgtaaatgcatctttattatttatttatgatagtgagaacagctgaatagctgataaaaataagcatactaatctatctttttatcattgtattgattttttttgcaatgataataagatggagcatgatgttgcaaaaggttgtccttttagctgctatcaagtaaaatatttctaaagcgataggtctgcattaccttgccaagtcacgttttcctgcggggacttctttattcca

SEQ ID NO: 204768 - DNA, 750 bp, Zea Mays
gcgcaacatctgcaatgaactgtttcagggaactggagatttgacaactgctctcctactaggatggagtaataaatatcctgatagcctcgagaaagcagcagaactggcagtttccagtttgcaggcacttctgaaaagaactgtggaagactataaaatggccggcttcgacccatcgaccagcagcttagagatccggttgatccaaagccaggacgagatccgaaacccaactgttacatgcaaggctgtgaagtatggaagctgaatccatagtacccccactgacaaaggtgccaacaataatgagcagtgcctgcaccgccgataagcgggtgcacctacttccatgactcttggtcctcagttttgggatgctgattctgttacaccttagctccaaaatgagaaacaatcatatttctgaaaaaagggttatagacttatagggttatattcaggctgtgcgattgctgcagtctttgggaatgcgtggtggcctgagtgagattgtaaatggtccttatcattgttgtcttcctcgttgtgttgttgttgttgctgctcccgctgagttgtggtggttggttggaaactctaggtatgctttgtttgaggcacattacgaacatatggtgttgagatgtgctcataatgcttattatgataagtgattattgaaaagatagttataatttaatattgaccttagtgtgagtgtagtgttgtgcaacatgtcttttgagt

SEQ ID NO: 204769 - DNA, 2466 bp, Zea Mays
aaacacgaggacctcgcgacgcgactccacccacacgcacagctccatgcctgcccacgcggacgcctgagcatcagaccagaggagagctatatctactccgctcgccaccaccaccaccccagtccagcccagcccaccacacccagctctctcccttctccaccagacacagccaggccttgtcttcttcttcctcccgattcgtgtttttttcctttctttttcgctgctgcaaaatatcgccgtttcctatctcttatcccccacgcatctcccgcctcgcctccgccacacgttccgcgcctccacacctctctcgatctcgcgcgtctggatttttccgacccgatcttttccccccgcatcagctgtcttctccttgcgccgggccaggccgcctctccctcctcccttcgcttgcgtctcactactcatcactgctactgctacttcgttcgagagggatacggataccccattgccggcccactgcgcgagagagattttggtgcgactacagagtcccaatcctataccccggccccaaaactcttctctgctaccagtaaccgttccttccgccggaatcgattttgtgagggggcgagttccgccaccgtgggcgtatcaatatcggcgaacgctcgagttctcgcggcgaaaaacaacgcgttctgcgaggattccgtggtgaaagaccgggtccttttttctgcggattccagctgccaaacagagatgtcggctctcctcgacctactgatggggatcttccgccagcagaccctcggcggcgccgccctggagctggccgcgctggcggcgcccctctggcttgccgcgctcgttggcctcctcatcgggtgggcgtggcgcccgaggacgagcagctggcggtgaacacccgtgacttgatgcacctctggcggctcgtccaggagaaggacggtggcccgtcgtggatccacatgatggaccgcaccttgccgaccatgaggtaccaagcctggcggagagacccaccgaatggtccaccacagtaccgcagtagcactatctttgaggatgcatcaccagaggttgtgagagatttcttctgggacgacgagttccgggtgaagaacagctgggatgacatgcttcttcagtacgagacactggaacagtgcgccaagactggaaccatggttgtccggtgggtcaggaagttcccgttcttctgcagcgacagggagtacatcataggccgcaggatatgggcatctgggaagacgttttactgtgtgaccaagggcgtgcctcgtccctctgttccaagacaaaacaaacctcgtcgtgtggacttgtactactcgagctggtgcatccgtccagttgaatcaagaaaaggcgacggtgcaatgactgcatgtgaggtgctcttattccaccatgaagatatggggatcccatgggagattgcgaagctcggtgtccggcaggggatgtggggctgcgtcaagaggatagagcctggccttcgggcataccaggttgcgaggactgctggagagcctatctcaaaacatgccgccatggcgcatgttaccaccaggttcgatgccgacgagctcgtcacggaagacagcgcggaggccagttcatccagtgacaacaacaagaccgccgaggttgagaagccaaagcactggacaaacaacatacccaaggttctcatgatcggcggcgccgtcgccctggcttgcaccttcgacggtggattgatgaccaaggccgccatattcggcacggcgaggaggtttgcagggccaggaaggcggtaggtggatggagctggtcaccctagagcaatgccatgctaatcatgtgtagcaaagcgttggttggatggatgcctggaagtgccctaagcagtcctttttgtagcaatgcactgcagaggacagaatgccttgtctagttgctcagtctagacatcatcctcatgttgcagataaggtggtgtgctcttattacagatcagtatcagttgagaaaaatagatccctgcacatcccgagaaaggaaatggacgacaaagatccagcgacacagagaagtgtacgtaagcagaccgggcatgcttgtgctgctgctgcagccgcgccgccgggttagagccagctggataggttagaaatgtagcattattatgaggacaaagtgtacgatgaacaaggttcattctggcagctgtacgacgaacaaggttcattgtcgttagatgaaacgacaagaattcactgctgtttagtaacaagaattcttggtcttgtagctctggcatctatttgttctcccctatggaaactagatgttgacctttttggcagttggtgcaggatttttgcacgtacaagtttttacccaatgctgtgtccaatccagctacgctgtgtgtttggaataagaaattttttctct

SEQ ID NO: 204770 - DNA, 3447 bp, Zea Mays
cttccccaccccgcgtgagccgccgcctccccgcctcccccttcagtccgccgctctcccgcggatcgttcaccttcactccattctgaggatctcatcagcacgctctccggcgcggcggcggcccttccttcgagactaggagctcgccgtcggagtcatccccttccccaatccctgcgacgcgttcggccggtccgtgcgggaggaggacgacgatgaggcgctgcgctgggcggccatcgagcagctgcccatctacgaccgcatgcgcaagggcatcctcacgggggccgcggccggcgtcgaggaggtggacatccaggggctcggcatgcaggagcgcaagaacctcatcgagcgcctcgtgcgcaccgccgaggaggacaacgagcgcttcctgctcaagctccgcgaccgcatggagcgggttgggatcgataatccgacgatagaggtgcgttttgagaacctgaacatcgacgccgaggcctacgtcggcaaccgaggtgtccccacgatgaccaacttcttctccaacaaagtcatggatgtactaagtgctatgcacatcgtctctagcgggaagaggcctgtctccatcgttcacgatatcagtggggtcataagacccggcagcttctcacctgtagcggcgccgcagcaactcgcattcttcagcggcgtagtaagcagacggcgacccagatctaccacggaggagctcgacggcgatggagagggtttcatcagctccagaaatggatgaggctgcctcaactgatcaatcaagcagattaacaaaaagaagggctaaagtttgggattacgttgatacagaggtagtagatgggaaagagaaggcagtctgcaaatattgtaaggtccacttatcttctgctgcgggtaaaggtacaactcatctgaataggcatatttctgtgtattgccatgcaattccacaagaagagagacaaaggtttttagcgacccaaaaaacaaagcctggcgatgatcatgtttttgaccagtagtctttcgtagtataatagccaagtacttccttagcgcagagatttcatttcaaaagtgtgaagatccatcctggaaagaaatgataaattactgtcaaccatcttttcgattagtcggtcgacagactgtccgttcagattgtatgttgttgtatgaagaggagaagttgcagttaattgagcagtttacaaagttgaaatctcatgttagtttgactgctgatctttggtcctctaaccaaaatcttggatatcttggtgtaacagcacatttcattagtgaagattttgagttgcataaaaagattattgcattcaagaagatttccttcccacatacatcttatgctgtgcaagatggtattacctcttgtttgctagagtggggattggttggtgatttgtttacccttactttggataatgctagtgtaaacaatagagcaatgaaagatatgcgagatgctttgggcagccagatgtttttcagtggtgaacacctccatgtgaggtgttcttctcatgtgctcaacatcatggttcaagctggactaaaggtcattccaaatgcagtcgggaaggtgagggacattatcaaggtcgtgatatctacaccatctcgtttacagatcttcaattctattgttcaaatattgggtcttaaaagtaaatcggggctgattcttgatgttccacatcgttggaatgcaacctatgatatgctaaatgaagccctaaaatataaggctgctctgaacagatatgcagtagagcaacaccatgaatgtcccactgaagaagattggtcgaaggcagaagctcttcatggttttctacaagagttcagtgatgcaaccaaagcattctcagcggataggcatcccatagctcatctttttctcaagatgttgctcgttatccgaggtgtgctgcttgatgagaattataactcaaatgaactccttaatgagatggcaaatgttatgtataccaagttccaaaaatattggataaatcctaatattgtgttgctcatagctcctgttctagatccatcaatgaaaactgaatttgtcaagttctatttctacacagttggtgacaatgttgatatgaagatgagggagctcaaaaggtacttgaagaaatattacctagagtacgagaaaatcatgaggagtcatagtttgcatgtctttattactcccgatgatcagatgagaagtgatccttctacctcttcacctctttgtggtaaaagaagggtggaacatgcatttgctcaatttgcatctcaaaatgcgaatgcccgtccagagcgaacagaaatggatacatacttggaggaccctaggatccttatcaagccagatgaatgcttcaatgttttaggatggtggaagaaaaattcagatgcttatccaatattgtctttaatggctagggatttcttggctattcctgtgagtacggtgtcctcagaatctgcctttagtgcagctggtagagtccttggaaaaaataggacatcactatctcctgaaacacttgaagctttagtctgtgctaaagactggttgattggattcaatgacgaaaaagaaggtgaaccaatgactggaaagcgaatgtttgattcagatgatgaggaatatgattgggaaatttgaagcaggctaaggagttccttggtgcttccggtgacaagcgaaaggaagtcaattaactctgaatcagtggttacacacaacagtttattgaatagaaagaggacactcgatgaccacaagatcatcagatgatcatttgttgagctctggaactgaatcctctccgcatgtggtaactaggcgggttcccatccgagttccgaggtcactgcaatgctaaattgtcaagttcagttatctgaattcagtttgagttataattctcatcaagcatcaatgtcaccaactgtgtagaaatactgaattttagcatggagcgtctttgtaaacattttagcatggagcagtttctcatcgatcatggctgtcaagttctatttctctacacagttacaagttgttttctatcatttgtttgtgagcccatggattataataatttattaacttgtggtggtgcttgcttgtatatgaaggcccttggattggcccgtggatttttaaaaggatcgagacggattaggatgtcggggtattgaaaaacggattgaattgagttgtatcaaatcaatttggatttaagtagggctgggttcacttttaaaacttataggattggagtggggttgaggccggattgtgacccattaccaggcttaggtgaacctgatggtgttttcaaattacgcagacatgcttactgagctttcaagaagggagaaagaagccaacattaaaaccag

SEQ ID NO: 204771 - DNA, 3260 bp, Zea Mays
cttccccaccccgcgtgagccgccgcctccccgcctcccccttcagtccgccgctctcccgcggatcgttcaccttcactccattctgaggatctcatcagcacgctctccggcgcggcggcggcccttccttcgagactaggagctcgccgtcggagtcatccccttccccaatccctgcgacgcgttcggccggtccgtgcgggaggaggacgacgatgaggcgctgcgctgggcggccatcgagcagctgcccatctacgaccgcatgcgcaagggcatcctcacgggggccgcggccggcgtcgaggaggtggacatccaggggctcggcatgcaggagcgcaagaacctcatcgagcgcctcgtgcgcaccgccgaggaggacaacgagcgcttcctgctcaagctccgcgaccgcatggagcgggttgggatcgataatccgacgatagaggtgcgttttgagaacctgaacatcgacgccgaggcctacgtcggcaaccgaggtgtccccacgatgaccaacttcttctccaacaaagtcatggatgtactaagtgctatgcacatcgtctctagcgggaagaggcctgtctccatcgttcacgatatcagtggggtcataagacccggcagcttctcacctgtagcggcgccgcagcaactcgcattcttcagcggcgtagtaagcagacggcgacccagatctaccacggaggagctcgacggcgatggagagggtttcatcagctccagaaatggatgaggctgcctcaactgatcaatcaagcagattaacaaaaagaagggctaaagtttgggattacgttgatacagaggtagtagatgggaaagagaaggcagtctgcaaatattgtaaggtccacttatcttctgctgcgggtaaaggtacaactcatctgaataggcatatttctgtgtattgccatgcaattccacaagaagagagacaaaggtttttagcgacccaaaaaacaaagcctggcgatgatcatgtttttgaccagtagtctttcgtagtataatagccaagtacttccttagcgcagagatttcatttcaaaagtgtgaagatccatcctggaaagaaatgataaattactgtcaaccatcttttcgattagtcggtcgacagactgtccgttcagattgtatgttgttgtatgaagaggagaagttgcagttaattgagcagtttacaaagttgaaatctcatgttagtttgactgctgatctttggtcctctaaccaaaatcttggatatcttggtgtaacagcacatttcattagtgaagattttgagttgcataaaaagattattgcattcaagaagatttccttcccacatacatcttatgctgtgcaagatggtattacctcttgtttgctagagtggggattggttggtgatttgtttacccttactttggataatgctagtgtaaacaatagagcaatgaaagatatgcgagatgctttgggcagccagatgtttttcagtggtgaacacctccatgtgaggtgttcttctcatgtgctcaacatcatggttcaagctggactaaaggtcattccaaatgcagtcgggaaggtgagggacattatcaaggtcgtgatatctacaccatctcgtttacagatcttcaattctattgttcaaatattgggtcttaaaagtaaatcggggctgattcttgatgttccacatcgttggaatgcaacctatgatatgctaaatgaagccctaaaatataaggctgctctgaacagatatgcagtagagcaacaccatgaatgtcccactgaagaagattggtcgaaggcagaagctcttcatggttttctacaagagttcagtgatgcaaccaaagcattctcagcggataggcatcccatagctcatctttttctcaagatgttgctcgttatccgagttggtgacaatgttgatatgaagatgagggagctcaaaaggtacttgaagaaatattacctagagtacgagaaaatcatgaggagtcatagtttgcatgtctttattactcccgatgatcagatgagaagtgatccttctacctcttcacctctttgtggtaaaagaagggtggaacatgcatttgctcaatttgcatctcaaaatgcgaatgcccgtccagagcgaacagaaatggatacatacttggaggaccctaggatccttatcaagccagatgaatgcttcaatgttttaggatggtggaagaaaaattcagatgcttatccaatattgtctttaatggctagggatttcttggctattcctgtgagtacggtgtcctcagaatctgcctttagtgcagctggtagagtccttggaaaaaataggacatcactatctcctgaaacacttgaagctttagtctgtgctaaagactggttgattggattcaatgacgaaaaagaaggtgaaccaatgactggaaagcgaatgtttgattcagatgatgaggaatatgattgggaaatttgaagcaggctaaggagttccttggtgcttccggtgacaagcgaaaggaagtcaattaactctgaatcagtgtttgcatgcaggttacacacaacagtttattgaatagaaagaggacactcgatgaccacaagatcatcagatgatcatttgttgagctctggaactgaatcctctccgcatgtggtaactaggcgggttcccatccgagttccgaggtcactgcaatgctaaattgtcaagttcagttatctgaattcagtttgagttataattctcatcaagcatcaatgtcaccaactgtgtagaaatactgaattttagcatggagcagtttctcatcgatcatggctgtcaagttctatttctctacacagttacaagttgttttctatcatttgtttgtgagcccatggattataataatttattaacttgtggtggtgcttgcttgtatatgaaggcccttggattggcccgtggatttttaaaaggatcgagacggattaggatgtcggggtattgaaaaacggattgaattgagttgtatcaaatcaatttggatttaagtagggctgggttcacttttaaaacttataggattggagtggggttgaggccggattgtgacccattaccaggcttaggtgaacctgatggtgttttcaaattacgcagacatgcttactgagctttcaagaagggagaaagaagccaacattaaaaccag

SEQ ID NO: 204772 - DNA, 2443 bp, Zea Mays
tggaagagctcaaaacactcaatttgctgcaaagaagcttgatagaaggcttttacatcttggtgcagaaccagttctagagataggtcttggagatgaccaacacccttcaggatatgaaggggctttagatccttggttgctatctatgtggaagtctctgaatgaaattaatccgtcactcttacctagagtgtctgatatcaatgatcctaatttgagttttttgggggatccaaaagttcatgtcatttattactcttccaatgaagttacacaagatcctatacttttggattccaataaaataataagtagcgcaagatcaatgtcccctgccctacggttccatgctgatggagagccaccttacatgcttcaaatggtaaaaaaacagtgtttgactaaggagggtactgatagagatgttcgccactttgaattggaagatccatcttcggccatggccatcaactataaaattggtgatgctcttgaaattctaccaagtcaaaatccatcagctgttgatgccttcattgaacgctgtaacttggatccagattgttacataacgattcgagtgagaagtggggataaagttttcaagggttcagttgagcagatggaccgcatcaaattaagaacctttgttgctttgacaatggatgtcgtgtcagcttcccctcggcgatatttctttgaggtcatgagcttttttgcaacaagtgaacgtgaaaaggagaggcttcagtattttgcttcaccagaaggaagagatgatctttaccagtacaatcagaaggagagtaggactgttctagaggtgttggaggattttccttcagtgcaaatgccttttgaatggctggtgcaactaacgcctccactgaagaaaagagccttttctatctcatcatccccactggcacacccaaaccaaatccatttgaccgttagcgtcgtagcatgggttactccattcaagagaacccggcgtggactctgctctacatggttggccgggctcaatccaaataaaggcaatcttatcccgtgttggatacaccaagggtccctgcctcctccacgtccattggttcctctcgtgttgattggaccaggaacagggtgtgcaccattccgtgcatttgtggaggaaagggctgcacaggctgcagctgaaccaacagccccggttctgttcttcttcggctgtagaaaccaagaaaacgattttctatacaaggatttctggctaactcatgcgcaggatgagggggtgttgtcctcgaaaaggggcggtggtttcttcgtcgctttttcccgggatcagccgcaaaaggtctacgtgcaacataagataatggaacagagttcaagagtgtggaacttattactgtccgatgcagtgatctacattgcaggctcttcgacgaaaatgcctgccgatgttacagctgcgctagaggaggttatttgtaaagaaggtggtgtcaagcaagcggatgcttcgaaatggctcagggatctagaaagggctggtagacttaacatcgagacatggtcatagttgtgatgggcaagaatagagatggcaatgggtacccgcgacccaatacccgatgggtatttactccattagggtatgtatgtgggctaaatattctacccgtgggtctgttattgggcaaaaatcttcacccaatgggtaaacgggtattagaacgttccgccttcacccatacccgttaacccgtgggtataaaatacccaatataaacttagtccaagcatgaactttgactttagtcatccatcttttttactctttaacaaccttttaggccataatgtcatagaaggcttaacgacaatttaatgaacatgtaatgggacatgtaatgtgctatgtagtactatcctagtgttactactttatccaattatctttggtgtgttgaatggatggttaaatgattctagaaattttgtaatggtatttagatgttgacatttgtatcatataacattttgatagatgtttagcttttatgggtacgggtgacctgatgggtgacccatacccacatgggtatgggtatgggggtaaatccatacccgccagtgtatatgggtgacccgatggggttatttttgtgttgtgggtatgggtatggggtagtaatacccggtgggtatttacccattgccatctctaggcaagaaagtacatattatccatgtttgctgaatatggaaccagtgagaatttcatttcactgtaaatcaaaggcattggaaatgtggaaacatgtagatgttaaagcatccaatacggagaaatagttggaggatgatctaaagtttcctcatttagccctctgtacgaaacaccatttcatttgattaagtgagaacagtaattacatcagcttttgtt

SEQ ID NO: 204773 - DNA, 4518 bp, Zea Mays
ttccttctgatcgcctccttcccgttccccgcagccgcccaaaccctagccctagcccctagccccgctgccggcaaggccggagcgcccggagcccccgctggccggccccggagaagacgtcccatgcggctgtatcgcgcaggggaaatttaggtgaatgttacaagcatgatgactcaaaccctgcaagggaaagttatggcctacacaccgagcagttttcctgttcagcaacagattctgccggaggatcttgaaatgcttcagctggataacatggaccagggtacctctccggttcgtgctgtcatcattaaaagaattgaaacatgcctgagaaatagagaagaattttgtaacttgtgcccagattcattactgaaagcttcagaaatcattgacaacctgctatacaaaattgatccgcagccccaatacatggatcttgacacaatagaagccagggtgaatgatttgctgagatcgttcctgtatggaaaccaaagagacccatggatatcttcagcagttccatcaacaaaagatttgaggcagctgcctgggatacaaatgacagactctagtgtatatcataatagagttgtccctggttttactaatttgcctgcacgcccaggaggcataccttcacatgctgtgttcactgctcagagatatgtaccactgaatcacaacatgactgctgccagttttgctctagttgaaaggcctgaaagctttatgagtaccgtagttgctccatctgtgtcaggacttcctaactgtatttctggccctggtgggattgatagttctggattgcaaaatggctattcaaaggaccattttccaggtgatgcttatcatgttgatagtccacaactgtctatgtccgggagtcccagtcctttatcagccttatgtgatccaatcacaagttcgggtgcaatgataagatcatcaatggattttatccctaaagcaagtgggcaaaaactctttactggcaaaggacaaatgtttcaacaatacagagaatatgagaaagagttagatggtgcatggagccaccccacagagaagccagttcactcaaataggacaactcagagcgatgaaatatatctcaaaggagaatgcggacctgatacactcacagaaatgaaggaaaactatgggcgcatctcagactctagagatccttgtgaccctgagagagaaattgttgagagatctgaacagacatcaaatatcacagtatcaaaggcaacttcaccaatttcagatgaatcttctggcaggcgtccagcaaaacgcctgaaggctgatgctccccgtcttgtcaatgtcaatcaagtagagagtccacaggagcaaaaacctgttgtgaatgagaatcatgtatctggtggtgaaacagtacaatcggaaatcacagaattacctgcaaaaccaccttgcagttcattgggagacattaatgctgagagcaataatatgcttgaacagggtagtgaagatgtacccaacatggatattgttaaggaagaggaattgtcccgtgcaaaaggtgacattgagatgaaagatgctaagactgttgcattggatcatacaccaaaaggggtcaatttaagttcaagacgaaagagaggggcttctatactttatggattaactgctgaggagcttagagatcacatgagtagtctaataaaccggcatacttgtcagagcaaggtgacatctcaagaattcccatcaattgatggattgcctgatcagaacacatgcagtttgtgtgggatggagaagcttctttttgaacctcctccacgattttgtgcgctctgtttcaaaataataaattctgcagggtgctattatgttgaagttgaaaatggaactgagaaatcttctatatgtagcaaatgccaccatcttagcagtttaagagctaaatatcagaagaaatttaattatgcagaaacagatgctgaggctgaatggtgggtccagtgcgacaagtgcaaagcttggcaacatgaaatctgtgctctttttaacagaaagtgtgaaggggcaaaggctgagtatacttgtgcaaaatgttttttgaaggaaaaggatagtggagatattcaggcactggagtcatccactgttcttggggcacaggagttacaaagaaccaagctaagtgatcatattgagcaaagactttcagagaggcttgagcaggacaggcaacagagggcgagcgcctctggaaaagttgctgaagaggtaccaggtgtgaaagggcttacagttagagtagtttcttcagccgaaagattactgcaagtccaaccacgttttcgtggtttttttaaacaaggaaagtatcctggggaatttccatacaaatcgaaggccattctcttgtttcaaaagatcgaaggtgtggatgtttgcctctttgccatgtatgtacaagagtatggctcagattgcccaccaccaaatcaaagacatgtttatcttgcatatattgattctgtcaaatacttccggcctgaaatcaaatctgcaactggagaagctctccgcacctttgtgtatcatgaaattttgattggttatctggactactgcaagaaacgagggtttgtaagctgttcaatatgggcttgcccatctacgaagcgagatgattatgttttatattgccatccaacagtacaaaagatgcccaagtctgacaagcttcgaagctggtaccagaacctgatcaagaaggccattaaggagggtgttgttgtggagcgtaatacactctctgacttcttccttcagcctacaaatgagtgcaaggccaatatttcggcagcatgcttgccatattgtgagaacgatttctggcctggagaagcagagaggctgcttgagaagaaagatgataatgcttcacagaaggaagagacacagcttggggaaaggatgcgcacaatgaaagaagacttcattatgctttgtctgcaacagttttgcaagcactgccaccatcctatcctatctggcaaaagttgggtttgcactagctgtaaaaatttccatctatgtgacaagtgtcatgcagaggagcagaatacagcacagaaggacaggcatccggccaccacaaaacagaagcatgcattcgaaagaatggaggtacaacctcttccagagactgatgatggagatccgacaatggaaagtaagtattttgacagcaggatcgatttcttgaagcactgccaagacaatcaattccagtttgataccatccggcgggcaaagcactctacaatgatgattctgtattacctacacaattcaacctgctctgcttgccatcgtgccgtggaccaatgcttggtgtggcggtgcctagagtgcctaggctgcaccttttgtggtcaatgctataaacaaaatggtcaaggcttgcatattcatgaattaaggcagattgacactagagaaacttcacagaagcacactctacaggactacattgatggccttgtgcatgcatcgaggtgctatgatccacgtaactgcacccatccactctgtttaaccctgaagaaactgttcgcccatggtgcacgatgccatgtccgtgcctgcaatagcggcggttgcaaaaagtgtctctttatgtggaaactcctgttccgccactcaaaagattgcaacgacggagactgcgcggttcctagatgcagggatgtaaaggcattcatagctgaaaagatgaagcttaaaatctagtaatggaccccctcccccttctcccccttccttaaccagtcaaattcgttgatgaagatgcaataaactgcggttggccattgctggtggatggaactgcaaggtaaataatgtggtgacttactgcttctggtgtggttgcatgtgctccatgccacagaggatcacccaaccgaagcttacataggcaatctgacattggtttttagtgcccgtacataccttgtacatatagtttttctctccaacacaaataggggtttgttttaatttcttcatcgtcaaagttttgttctccataatgtctgcctcatttttgttcagtgttgcagtgctgcggtggcatccaaatattcaatgaatgggtaactaacaagtcagcgactagatagtttactagggtaaacaagagctaacagggaccagttagtcccatagatcaaacaagacctgacaaccatcctataagcttgttattcaagtggcaatttgcaaggcacggactactaattagtgctataacttgagaagttacacaatgatcttatccagggacccattgcgccgttcattttcttttccattcgaaccattggcttcatagagccgttgtctaaactcacgtatgatagattctagatagctataaaggggtaaataacgtataaaatatttttttataaaactcaattataactagagccaacttgatgg

SEQ ID NO: 204774 - DNA, 4599 bp, Zea Mays
ctccatcctccccttccttctgatcgcctccttcccgttccccgcagccgcccaaaccctagccctagcccctagccccgctgccggcaaggccggagcgcccggagcccccgctggccggccccggagaagacgtcccatgcggctgtatcgcgcaggggaaatttaggtgaatgttacaagcatgatgactcaaaccctgcaagggaaagttatggcctacacaccgagcagttttcctgttcagcaacagattctgccggaggatcttgaaatgcttcagctggataacatggaccagggtacctctccggttcgtgctgtcatcattaaaagaattgaaacatgcctgagaaatagagaagaattttgtaacttgtgcccagattcattactgaaagcttcagaaatcattgacaacctgctatacaaaattgatccgcagccccaatacatggatcttgacacaatagaagccagggtgaatgatttgctgagatcgttcctgtatggaaaccaaagagacccatggatatcttcagcagttccatcaacaaaagatttgaggcagctgcctgggatacaaatgacagactctagtgtatatcataatagagttgtccctggttttactaatttgcctgcacgcccaggaggcataccttcacatgctgtgttcactgctcagagatatgtaccactgaatcacaacatgactgctgccagttttgctctagttgaaaggcctgaaagctttatgagtaccgtagttgctccatctgtgtcaggacttcctaactgtatttctggccctggtgggattgatagttctggattgcaaaatggctattcaaaggaccattttccaggtgatgcttatcatgttgatagtccacaactgtctatgtccgggagtcccagtcctttatcagccttatgtgatccaatcacaagttcgggtgcaatgataagatcatcaatggattttatccctaaagcaagtgggcaaaaactctttactggcaaaggacaaatgtttcaacaatacagagaatatgagaaagagttagatggtgcatggagccaccccacagagaagccagttcactcaaataggacaactcagagcgatgaaatatatctcaaaggagaatgcggacctgatacactcacagaaatgaaggaaaactatgggcgcatctcagactctagagatccttgtgaccctgagagagaaattgttgagagatctgaacagacatcaaatatcacagtatcaaaggcaacttcaccaatttcagatgaatcttctggcaggcgtccagcaaaacgcctgaaggctgatgctccccgtcttgtcaatgtcaatcaagtagagagtccacaggagcaaaaacctgttgtgaatgagaatcatgtatctggtggtgaaacagtacaatcggaaatcacagaattacctgcaaaaccaccttgcagttcattgggagacattaatgctgagagcaataatatgcttgaacagggtagtgaagatgtacccaacatggatattgttaaggaagaggaattgtcccgtgcaaaaggtgacattgagatgaaagatgctaagactgttgcattggatcatacaccaaaaggggtcaatttaagttcaagacgaaagagaggggcttctatactttatggattaactgctgaggagcttagagatcacatgagtagtctaataaaccggcatacttgtcagagcaaggtgacatctcaagaattcccatcaattgatggattgcctgatcagaacacatgcagtttgtgtgggatggagaagcttctttttgaacctcctccacgattttgtgcgctctgtttcaaaataataaattctgcagggtgctattatgttgaagttgaaaatggaactgagaaatcttctatatgtagcaaatgccaccatcttagcagtttaagagctaaatatcagaagaaatttaattatgcagaaacagatgctgaggctgaatggtgggtccagtgcgacaagtgcaaagcttggcaacatgaaatctgtgctctttttaacagaaagtgtgaaggggcaaaggctgagtatacttgtgcaaaatgttttttgaaggaaaaggatagtggagatattcaggcactggagtcatccactgttcttggggcacaggagttacaaagaaccaagctaagtgatcatattgagcaaagactttcagagaggcttgagcaggacaggcaacagagggcgagcgcctctggaaaagttgctgaagaggtgtgaaagggcttacagttagagtagtttcttcagccgaaagattactgcaagtccaaccacgttttcgtggtttttttaaacaaggaaagtatcctggggaatttccatacaaatcgaaggccattctcttgtttcaaaagatcgaaggtgtggatgtttgcctctttgccatgtatgtacaagagtatggctcagattgcccaccaccaaatcaaagacatgtttatcttgcatatattgattctgtcaaatacttccggcctgaaatcaaatctgcaactggagaagctctccgcacctttgtgtatcatgaaattttgattggttatctggactactgcaagaaacgagggtttgtaagctgttcaatatgggcttgcccatctacgaagcgagatgattatgttttatattgccatccaacagtacaaaagatgcccaagtctgacaagcttcgaagctggtaccagaacctgatcaagaaggccattaaggagggtgttgttgtggagcgtaatacactctctgacttcttccttcagcctacaaatgagtgcaaggccaatatttcggcagcatgcttgccatattgtgagaacgatttctggcctggagaagcagagaggctgcttgagaagaaagatgataatgcttcacagaaggaagagacacaggtaggaaggctcttgcgtgttgccaaacgcgacgacagaaaaggaaaccttgatgatattttgcttgtgcataagcttggggaaaggatgcgcacaatgaaagaagacttcattatgctttgtctgcaacagttttgcaagcactgccaccatcctatcctatctggcaaaagttgggtttgcactagctgtaaaaatttccatctatgtgacaagtgtcatgcagaggagcagaatacagcacagaaggacaggcatccggccaccacaaaacagaagcatgcattcgaaagaatggaggtacaacctcttccagagactgatgatggagatccgacaatggaaagtaagtattttgacagcaggatcgatttcttgaagcactgccaagacaatcaattccagtttgataccatccggcgggcaaagcactctacaatgatgattctgtattacctacacaattcaacctgctctgcttgccatcgtgccgtggaccaatgcttggtgtggcggtgcctagagtgcctaggctgcaccttttgtggtcaatgctataaacaaaatggtcaaggcttgcatattcatgaattaaggcagattgacactagagaaacttcacagaagcacactctacaggactacattgatggccttgtgcatgcatcgaggtgctatgatccacgtaactgcacccatccactctgtttaaccctgaagaaactgttcgcccatggtgcacgatgccatgtccgtgcctgcaatagcggcggttgcaaaaagtgtctctttatgtggaaactcctgttccgccactcaaaagattgcaacgacggagactgcgcggttcctagatgcagggatgtaaaggcattcatagctgaaaagatgaagcttaaaatctagtaatggaccccctcccccttctcccccttccttaaccagtcaaattcgttgatgaagatgcaataaactgcggttggccattgctggtggatggaactgcaaggtaaataatgtggtgacttactgcttctggtgtggttgcatgtgctccatgccacagaggatcacccaaccgaagcttacataggcaatctgacattggtttttagtgcccgtacataccttgtacatatagtttttctctccaacacaaataggggtttgttttaatttcttcatcgtcaaagttttgttctccataatgtctgcctcatttttgttcagtgttgcagtgctgcggtggcatccaaatattcaatgaatgggtaactaacaagtcagcgactagatagtttactagggtaaacaagagctaacagggaccagttagtcccatagatcaaacaagacctgacaaccatcctataagcttgttattcaagtggcaatttgcaaggcacggactactaattagtgctataacttgagaagttacacaatgatcttatccagggacccattgcgccgttcattttcttttccattcgaaccattggcttcatagagccgttgtctaaactcacgtatgatagattctagatagctataaaggggtaaataacgtataaaatatttttttataaaactcaattataactagagccaacttgatgg

SEQ ID NO: 204775 - DNA, 4582 bp, Zea Mays
ctccatcctccccttccttctgatcgcctccttcccgttccccgcagccgcccaaaccctagccctagcccctagccccgctgccggcaaggccggagcgcccggagcccccgctggccggccccggagaagacgtcccatgcggctgtatcgcgcaggggaaatttaggtgaatgttacaagcatgatgactcaaaccctgcaagggaaagttatggcctacacaccgagcagttttcctgttcagcaacagattctgccggaggatcttgaaatgcttcagctggataacatggaccagggtacctctccggttcgtgctgtcatcattaaaagaattgaaacatgcctgagaaatagagaagaattttgtaacttgtgcccagattcattactgaaagcttcagaaatcattgacaacctgctatacaaaattgatccgcagccccaatacatggatcttgacacaatagaagccagggtgaatgatttgctgagatcgttcctgtatggaaaccaaagagacccatggatatcttcagcagttccatcaacaaaagatttgaggcagctgcctgggatacaaatgacagactctagtgtatatcataatagagttgtccctggttttactaatttgcctgcacgcccaggaggcataccttcacatgctgtgttcactgctcagagatatgtaccactgaatcacaacatgactgctgccagttttgctctagttgaaaggcctgaaagctttatgagtaccgtagttgctccatctgtgtcaggacttcctaactgtatttctggccctggtgggattgatagttctggattgcaaaatggctattcaaaggaccattttccaggtgatgcttatcatgttgatagtccacaactgtctatgtccgggagtcccagtcctttatcagccttatgtgatccaatcacaagttcgggtgcaatgataagatcatcaatggattttatccctaaagcaagtgggcaaaaactctttactggcaaaggacaaatgtttcaacaatacagagaatatgagaaagagttagatggtgcatggagccaccccacagagaagccagttcactcaaataggacaactcagagcgatgaaatatatctcaaaggagaatgcggacctgatacactcacagaaatgaaggaaaactatgggcgcatctcagactctagagatccttgtgaccctgagagagaaattgttgagagatctgaacagacatcaaatatcacagtatcaaaggcaacttcaccaatttcagatgaatcttctggcaggcgtccagcaaaacgcctgaaggctgatgctccccgtcttgtcaatgtcaatcaagtagagagtccacaggagcaaaaacctgttgtgaatgagaatcatgtatctggtggtgaaacagtacaatcggaaatcacagaattacctgcaaaaccaccttgcagttcattgggagacattaatgctgagagcaataatatgcttgaacagggtagtgaagatgtacccaacatggatattgttaaggaagaggaattgtcccgtgcaaaaggtgacattgagatgaaagatgctaagactgttgcattggatcatacaccaaaaggggtcaatttaagttcaagacgaaagagaggggcttctatactttatggattaactgctgaggagcttagagatcacatgagtagtctaataaaccggcatacttgtcagagcaaggtgacatctcaagaattcccatcaattgatggattgcctgatcagaacacatgcagtttgtgtgggatggagaagcttctttttgaacctcctccacgattttgtgcgctctgtttcaaaataataaattctgcagggtgctattatgttgaagttgaaaatggaactgagaaatcttctatatgtagcaaatgccaccatcttagcagtttaagagctaaatatcagaagaaatttaattatgcagaaacagatgctgaggctgaatggtgggtccagtgcgacaagtgcaaagcttggcaacatgaaatctgtgctctttttaacagaaagtgtgaaggggcaaaggctgagtatacttgtgcaaaatgttttttgaaggaaaaggatagtggagatattcaggcactggagtcatccactgttcttggggcacaggagttacaaagaaccaagctaagtgatcatattgagcaaagactttcagagaggcttgagcaggacaggcaacagagggcgagcgcctctggaaaagttgctgaagaggtaccaggtgtgaaagggcttacagttagagtagtttcttcagccgaaagattactgcaagtccaaccacgttttcgtggtttttttaaacaaggaaagtatcctggggaatttccatacaaatcgaaggccattctcttgtttcaaaagatcgaaggtgtggatgtttgcctctttgccatgtatgtacaagagtatggctcagattgcccaccaccaaatcaaagacatgtttatcttgcatatattgattctgtcaaatacttccggcctgaaatcaaatctgcaactggagaagctctccgcacctttgtgtatcatgaaattttgaaacgagggtttgtaagctgttcaatatgggcttgcccatctacgaagcgagatgattatgttttatattgccatccaacagtacaaaagatgcccaagtctgacaagcttcgaagctggtaccagaacctgatcaagaaggccattaaggagggtgttgttgtggagcgtaatacactctctgacttcttccttcagcctacaaatgagtgcaaggccaatatttcggcagcatgcttgccatattgtgagaacgatttctggcctggagaagcagagaggctgcttgagaagaaagatgataatgcttcacagaaggaagagacacaggtaggaaggctcttgcgtgttgccaaacgcgacgacagaaaaggaaaccttgatgatattttgcttgtgcataagcttggggaaaggatgcgcacaatgaaagaagacttcattatgctttgtctgcaacagttttgcaagcactgccaccatcctatcctatctggcaaaagttgggtttgcactagctgtaaaaatttccatctatgtgacaagtgtcatgcagaggagcagaatacagcacagaaggacaggcatccggccaccacaaaacagaagcatgcattcgaaagaatggaggtacaacctcttccagagactgatgatggagatccgacaatggaaagtaagtattttgacagcaggatcgatttcttgaagcactgccaagacaatcaattccagtttgataccatccggcgggcaaagcactctacaatgatgattctgtattacctacacaattcaacctgctctgcttgccatcgtgccgtggaccaatgcttggtgtggcggtgcctagagtgcctaggctgcaccttttgtggtcaatgctataaacaaaatggtcaaggcttgcatattcatgaattaaggcagattgacactagagaaacttcacagaagcacactctacaggactacattgatggccttgtgcatgcatcgaggtgctatgatccacgtaactgcacccatccactctgtttaaccctgaagaaactgttcgcccatggtgcacgatgccatgtccgtgcctgcaatagcggcggttgcaaaaagtgtctctttatgtggaaactcctgttccgccactcaaaagattgcaacgacggagactgcgcggttcctagatgcagggatgtaaaggcattcatagctgaaaagatgaagcttaaaatctagtaatggaccccctcccccttctcccccttccttaaccagtcaaattcgttgatgaagatgcaataaactgcggttggccattgctggtggatggaactgcaaggtaaataatgtggtgacttactgcttctggtgtggttgcatgtgctccatgccacagaggatcacccaaccgaagcttacataggcaatctgacattggtttttagtgcccgtacataccttgtacatatagtttttctctccaacacaaataggggtttgttttaatttcttcatcgtcaaagttttgttctccataatgtctgcctcatttttgttcagtgttgcagtgctgcggtggcatccaaatattcaatgaatgggtaactaacaagtcagcgactagatagtttactagggtaaacaagagctaacagggaccagttagtcccatagatcaaacaagacctgacaaccatcctataagcttgttattcaagtggcaatttgcaaggcacggactactaattagtgctataacttgagaagttacacaatgatcttatccagggacccattgcgccgttcattttcttttccattcgaaccattggcttcatagagccgttgtctaaactcacgtatgatagattctagatagctataaaggggtaaataacgtataaaatatttttttataaaactcaattataactagagccaacttgatgg

SEQ ID NO: 204776 - DNA, 4432 bp, Zea Mays
gcgagctggacccgccgagtggcccccatggccttgacttatttaccctttccctctccatcctccccttccttctgatcgcctccttcccgttccccgcagccgcccaaaccctagccctagcccctagccccgctgccggcaaggccggagcgcccggagcccccgctggccggccccggagaagacgtcccatgcggctgtatcgcgcaggggaaatttaggtgaatgttacaagcatgatgactcaaaccctgcaagggaaagttatggcctacacaccgagcagttttcctgttcagcaacagattctgccggaggatcttgaaatgcttcagctggataacatggaccagggtacctctccggttcgtgctgtcatcattaaaagaattgaaacatgcctgagaaatagagaagaattttgtaacttgtgcccagattcattactgaaagcttcagaaatcattgacaacctgctatacaaaattgatccgcagccccaatacatggatcttgacacaatagaagccagggtgaatgatttgctgagatcgttcctgtatggaaaccaaagagacccatggatatcttcagcagttccatcaacaaaagatttgaggcagctgcctgggatacaaatgacagactctagtgtatatcataatagagttgtccctggttttactaatttgcctgcacgcccaggaggcataccttcacatgctgtgttcactgctcagagatatgtaccactgaatcacaacatgactgctgccagttttgctctagttgaaaggcctgaaagctttatgagtaccgtagttgctccatctgtgtcaggacttcctaactgtatttctggccctggtgggattgatagttctggattgcaaaatggctattcaaaggaccattttccaggtgatgcttatcatgttgatagtccacaactgtctatgtccgggagtcccagtcctttatcagccttatgtgatccaatcacaagttcgggtgcaatgataagatcatcaatggattttatccctaaagcaagtgggcaaaaactctttactggcaaaggacaaatgtttcaacaatacagagaatatgagaaagagttagatggtgcatggagccaccccacagagaagccagttcactcaaataggacaactcagagcgatgaaatatatctcaaaggagaatgcggacctgatacactcacagaaatgaaggaaaactatgggcgcatctcagactctagagatccttgtgaccctgagagagaaattgttgagagatctgaacagacatcaaatatcacagtatcaaaggcaacttcaccaatttcagatgaatcttctggcaggcgtccagcaaaacgcctgaaggctgatgctccccgtcttgtcaatgtcaatcaagtagagagtccacaggagcaaaaacctgttgtgaatgagaatcatgtatctggtggtgaaacagtacaatcggaaatcacagaattacctgcaaaaccaccttgcagttcattgggagacattaatgctgagagcaataatatgcttgaacagggtagtgaagatgtacccaacatggatattgttaaggaagaggaattgtcccgtgcaaaaggtgacattgagatgaaagatgctaagactgttgcattggatcatacaccaaaaggggtcaatttaagttcaagacgaaagagaggggcttctatactttatggattaactgctgaggagcttagagatcacatgagtagtctaataaaccggcatacttgtcagagcaaggtgacatctcaagaattcccatcaattgatggattgcctgatcagaacacatgcagtttgtgtgggatggagaagcttctttttgaacctcctccacgattttgtgcgctctgtttcaaaataataaattctgcagggtgctattatgttgaagttgaaaatggaactgagaaatcttctatatgtagcaaatgccaccatcttagcagtttaagagctaaatatcagaagaaatttaattatgcagaaacagatgctgaggctgaatggtgggtccagtgcgacaagtgcaaagcttggcaacatgaaatctgtgctctttttaacagaaagtgtgaaggggcaaaggctgagtatacttgtgcaaaatgttttttgaaggaaaaggatagtggagatattcaggcactggagtcatccactgttcttggggcacaggagttacaaagaaccaagctaagtgatcatattgagcaaagactttcagagaggcttgagcaggacaggcaacagagggcgagcgcctctggaaaagttgctgaagaggtaccaggtgtgaaagggcttacagttagagtagtttcttcagccgaaagattactgcaagtccaaccacgttttcgtggtttttttaaacaaggaaagtatcctggggaatttccatacaaatcgaaggccattctcttgtttcaaaagatcgaaggtgtggatgtttgcctctttgccatgtatgtacaagagtatggctcagattgcccaccaccaaatcaaagacatgtttatcttgcatatattgattctgtcaaatacttccggcctgaaatcaaatctgcaactggagaagctctccgcacctttgtgtatcatgaaattttgattggttatctggactactgcaagaaacgagggtttgtaagctgttcaatatgggcttgcccatctacgaagcgagatgattatgttttatattgccatccaacagtacaaaagatgcccaagtctgacaagcttcgaagctggtaccagaacctgatcaagaaggccattaaggagggtgttgttgtggagcgtaatacactctctgacttcttccttcagcctacaaatgagtgcaaggccaatatttcggcagcatgcttgccatattgtgagaacgatttctggcctggagaagcagagaggctgcttgagaagaaagatgataatgcttcacagaaggaagagacacaggtaggaaggctcttgcgtgttgccaaacgcgacgacagaaaaggaaaccttgatgatattttgcttgtgcataagcttggggaaaggatgcgcacaatgaaagaagacttcattatgctttgtctgcaacagttttgcaagcactgccaccatcctatcctatctggcaaaagttgggtttgcactagctgtaaaaatttccatctatgtgacaagtgtcatgcagaggagcagaatacagcacagaaggacaggcatccggccaccacaaaacagaagcatgcattcgaaagaatggaggtacaacctcttccagagactgatgatggagatccgacaatggaaagtaagtattttgacagcaggatcgatttcttgaagcactgccaagacaatcaattccagtttgataccatccggcgggcaaagcactctacaatgatgattctgtattacctacacaattcaacctgctctgcttgccatcgtgccgtggaccaatgcttggtgtggcggtgcctagagtgcctaggctgcaccttttgtggtcaatgctataaacaaaatggtcaaggcttgcatattcatgaattaaggcagattgacactagagaaacttcacagaagcacactctacaggactacattgatggccttgtgcatgcatcgaggtgctatgatccacgtaactgcacccatccactctgtttaaccctgaagaaactgttcgcccatggtgcacgatgccatgtccgtgcctgcaatagcggcggttgcaaaaagtgtctctttatgtggaaactcctgttccgccactcaaaagattgcaacgacggagactgcgcggttcctagatgcagggatgtaaaggcattcatagctgaaaagatgaagcttaaaatctagtaatggaccccctcccccttctcccccttccttaaccagtcaaattcgttgatgaagatgcaataaactgcggttggccattgctggtggatggaactgcaagtgctgcggtggcatccaaatattcaatgaatgggtaactaacaagtcagcgactagatagtttactagggtaaacaagagctaacagggaccagttagtcccatagatcaaacaagacctgacaaccatcctataagcttgttattcaagtggcaatttgcaaggcacggactactaattagtgctataacttgagaagttacacaatgatcttatccagggacccattgcgccgttcattttcttttccattcgaaccattggcttcatagagccgttgtctaaactcacgtatgatagattctagatagctataaaggggtaaataacgtataaaatatttttttataaaactcaattataactagagccaacttgatgg

SEQ ID NO: 204777 - DNA, 4703 bp, Zea Mays
agacagtctcaaaatcggtccgtctggggatccaatccacatgcgagctggacccgccgagtggcccccatggccttgacttatttaccctttccctctccatcctccccttccttctgatcgcctccttcccgttccccgcagccgcccaaaccctagccctagcccctagccccgctgccggcaaggccggagcgcccggagcccccgctggccggccccggagaagacgtcccatgcggctgtatcgcgcaggggaaatttaggtgaatgttacaagcatgatgactcaaaccctgcaagggaaagttatggcctacacaccgagcagttttcctgttcagcaacagattctgccggaggatcttgaaatgcttcagctggataacatggaccagggtacctctccggttcgtgctgtcatcattaaaagaattgaaacatgcctgagaaatagagaagaattttgtaacttgtgcccagattcattactgaaagcttcagaaatcattgacaacctgctatacaaaattgatccgcagccccaatacatggatcttgacacaatagaagccagggtgaatgatttgctgagatcgttcctgtatggaaaccaaagagacccatggatatcttcagcagttccatcaacaaaagatttgaggcagctgcctgggatacaaatgacagactctagtgtatatcataatagagttgtccctggttttactaatttgcctgcacgcccaggaggcataccttcacatgctgtgttcactgctcagagatatgtaccactgaatcacaacatgactgctgccagttttgctctagttgaaaggcctgaaagctttatgagtaccgtagttgctccatctgtgtcaggacttcctaactgtatttctggccctggtgggattgatagttctggattgcaaaatggctattcaaaggaccattttccaggtgatgcttatcatgttgatagtccacaactgtctatgtccgggagtcccagtcctttatcagccttatgtgatccaatcacaagttcgggtgcaatgataagatcatcaatggattttatccctaaagcaagtgggcaaaaactctttactggcaaaggacaaatgtttcaacaatacagagaatatgagaaagagttagatggtgcatggagccaccccacagagaagccagttcactcaaataggacaactcagagcgatgaaatatatctcaaaggagaatgcggacctgatacactcacagaaatgaaggaaaactatgggcgcatctcagactctagagatccttgtgaccctgagagagaaattgttgagagatctgaacagacatcaaatatcacagtatcaaaggcaacttcaccaatttcagatgaatcttctggcaggcgtccagcaaaacgcctgaaggctgatgctccccgtcttgtcaatgtcaatcaagtagagagtccacaggagcaaaaacctgttgtgaatgagaatcatgtatctggtggtgaaacagtacaatcggaaatcacagaattacctgcaaaaccaccttgcagttcattgggagacattaatgctgagagcaataatatgcttgaacagggtagtgaagatgtacccaacatggatattgttaaggaagaggaattgtcccgtgcaaaaggtgacattgagatgaaagatgctaagactgttgcattggatcatacaccaaaaggggtcaatttaagttcaagacgaaagagaggggcttctatactttatggattaactgctgaggagcttagagatcacatgagtagtctaataaaccggcatacttgtcagagcaaggtgacatctcaagaattcccatcaattgatggattgcctgatcagaacacatgcagtttgtgtgggatggagaagcttctttttgaacctcctccacgattttgtgcgctctgtttcaaaataataaattctgcagggtgctattatgttgaagttgaaaatggaactgagaaatcttctatatgtagcaaatgccaccatcttagcagtttaagagctaaatatcagaagaaatttaattatgcagaaacagatgctgaggctgaatggtgggtccagtgcgacaagtgcaaagcttggcaacatgaaatctgtgctctttttaacagaaagtgtgaaggggcaaaggctgagtatacttgtgcaaaatgttttttgaaggaaaaggatagtggagatattcaggcactggagtcatccactgttcttggggcacaggagttacaaagaaccaagctaagtgatcatattgagcaaagactttcagagaggcttgagcaggacaggcaacagagggcgagcgcctctggaaaagttgctgaagaggtaccaggtgtgaaagggcttacagttagagtagtttcttcagccgaaagattactgcaagtccaaccacgttttcgtggtttttttaaacaaggaaagtatcctggggaatttccatacaaatcgaaggccattctcttgtttcaaaagatcgaaggtgtggatgtttgcctctttgccatgtatgtacaagagtatggctcagattgcccaccaccaaatcaaagacatgtttatcttgcatatattgattctgtcaaatacttccggcctgaaatcaaatctgcaactggagaagctctccgcacctttgtgtatcatgaaattttgattggttatctggactactgcaagaaacgagggtttgtaagctgttcaatatgggcttgcccatctacgaagcgagatgattatgttttatattgccatccaacagtacaaaagatgcccaagtctgacaagcttcgaagctggtaccagaacctgatcaagaaggccattaaggagggtgttgttgtggagcgtaatacactctctgacttcttccttcagcctacaaatgagtgcaaggccaatatttcggcagcatgcttgccatattgtgagaacgatttctggcctggagaagcagagaggctgcttgagaagaaagatgataatgcttcacagaaggaagagacacaggtaggaaggctcttgcgtgttgccaaacgcgacgacagaaaaggaaaccttgatgatattttgcttgtgcataagcttggggaaaggatgcgcacaatgaaagaagacttcattatgctttgtctgcaacagttttgcaagcactgccaccatcctatcctatctggcaaaagttgggtttgcactagctgtaaaaatttccatctatgtgacaagtgtcatgcagaggagcagaatacagcacagaaggacaggcatccggccaccacaaaacagaagcatgcattcgaaagaatggaggtacaacctcttccagagactgatgatggagatccgacaatggaaagtaagtattttgacagcaggatcgatttcttgaagcactgccaagacaatcaattccagtttgataccatccggcgggcaaagcactctacaatgatgattctgtattacctacacaattcaacctgctctgcttgccatcgtgccgtggaccaatgcttggtgtggcggtgcctagagtgcctaggctgcaccttttgtggtcaatgctataaacaaaatggtcaaggcttgcatattcatgaattaaggcagattgacactagagaaacttcacagaagcacactctacaggactacattgatggccttgtgcatgcatcgaggtgctatgatccacgtaactgcacccatccactctgtttaaccctgaagaaactgttcgcccatggtgcacgatgccatgtccgtgcctgcaatagcggcggttgcaaaaagtgtctctttatgtggaaactcctgttccgccactcaaaagattgcaacgacggagactgcgcggttcctagatgcagggatgtaaaggcattcatagctgaaaagatgaagcttaaaatctagtaatggaccccctcccccttctcccccttccttaaccagtcaaattcgttgatgaagatgcaataaactgcggttggccattgctggtggatggaactgcaaggtaaataatgtggtgacttactgcttctggtgtggttgcatgtgctccatgccacagaggatcacccaaccgaagcttacataggcaatctgacattggtttttagtgcccgtacataccttgtacatatagtttttctctccaacacaaataggggtttgttttaatttcttcatcgtcaaagttttgttctccataatgtctgcctcatttttgttcagtgttgcagtgctgcggtggcatccaaatattcaatgaatgggtaactaacaagtcagcgactagatagtttactagggtaaacaagagctaacagggaccagttagtcccatagatcaaacaagacctgacaaccatcctataagcttgttattcaagtggcaatttgcaaggcacggactactaattagtgctataacttgagaagttacacaatgatcttatccagggacccattgcgccgttcattttcttttccattcgaaccattggcttcatagagccgttgtctaaactcacgtatgatagattctagatagctataaaggggtaaataacgtataaaatatttttttataaaactcaattataactagagccaacttgatgg

SEQ ID NO: 204778 - DNA, 2769 bp, Zea Mays
agccggtccagcccacagtccacgaggacacgatccccgacctcatatcaggttcccctccccatcccggagagcaaaagcgcttctctcgctagcgagttcggcagtagaaaccctaaaaaaagacaccgccctccccttcgctagcggaaccgccctcccctcgccggggtaggggtttcgggggtagacgcccgccatggacgcgttccggaaacagctggacgtgctcatgggcgccaaccgcaacggcgacgtcgaggaggtgagccgcaactactacgaccgcgacgtctgccgcctcttcctcgccggtctctgcccacacgacctctttcagctcacgaaaatggatctcggtccttgttctaagattcactctcttcaactgcggaaagattatgaagaagcgaaagcaaagggaacagaaaattttgatagagaactcgaggatatgatagaaaggctcattgtggagtgtgacaggaaaattcagagggccctaaaacggcttgcagatgatgatgccaatgctgctattgcgatatcggtctctgaggttactctgacggatgacatactgcagctgtcaaaacagataaaggagaaaatggcagaagttgatgcctttgattttgaagggagaactgatgacaaaataaaggcccaggaagtagtggaagagctaagagctaaaagagctgatatgcaggctaccctcttgcttgatgcttttaacaaggacagagcttcattaactcagcctgctccacctcaagtggcagcagttccaccaccagctccacctgatgctcgtactcaagaaattatcaacgaaaagcttaagaaagctgaagagcttggtgaacaaggcatggttgatgaagctcaaaaagctttggaagaggcagaagctctgaaaaagctggcgccacgttcagagccaccttcagacccttcgaaatatactgctgctgatgttcgaattactgatcaaaaattacgcctctgtgacatatgtggagcatttctgagtgtatatgacaatgatcgacgtcttgctgaccattttggtgggaaattacacctaggctacatgctgattcgtgagaaacagaaagaacttcaggtgctgaatgtaatgtaccattttctgctttaaagagttactctgttttggcccttttggcatatgaattagtccatgttgcgtgattggaatctcatgcgatcatcttcatacccatggatacaacagtcactgtctgttggcaaattattatgttgggcagaagccggaggtttcttttctactgcctgagccatattatgtagaccaggtgataaataatactggttaagttatcctgaaagctttgccaacatttgctgtaagtgacaacttgttctattttttatctgctacctccataagtttgcaagttaaactttgctgaagcagccttgcctgtaaagtatgactcccctttctcttggaacgttgtcgctgacttcatgtatggcaaaatatcatcatttctactgtcaataaataaaatacactatgccaccttgcaggagcagagaaataaaaggagaccgggcaaagctgaagatgatagacgatcaagagagcacagcaaggatcgcaacggccggtcgtccagggatagagaaccagaaaggagagacagggttgagtctcgagatggtagaagagattatgaaagggatcgtgatagacgtcatgatagggacaggcgccatgaccgtgatcgggatagggattatgaccgctcccgtggacatgattcaaggaggagagagcgttcacgctccagggagcgcagcaggcgccacgagagatactaaatgttacaccatgcctgacagatttaggagtactggcggcgtctgttcaagatatggtttgagcttgtgcttcgtatcttctgaagaccggtctacttgacgctaaattcgcatggagtgttaagcatttattaaacgcatctggaatcaaatgaagttgtacttgcgaacggcttcacttaaaattcgcgccatttctaatattgtaataagctgtgcttgaaccttagctgtctctgtgtactcgacgtaccactcgctcccacaaatagcttcgaacatcctgtacctgaaacatgacgctgtttggtggaggtggagctgagaattcaactccgaagaaagatgtttatcaattgttcgctgagaaggttagggataacaaacagctggaatcaagatgggcaatcatgcaagaaacccgtgtggagtattttcgtggaaaagatttcaatgccttcatcaagaattatccagaagtcagggaaattttggggccagataaggatttagaagtggaagacattgttaacactttgttgaccaagaaccttgtgataaggtgtgaccgagttatgaaaactgtgaggcctggcaagaaaaagttatcatcatggcctgctcacttggagatacataatgaacaagtgtttactgaaaatgatgggttttatgcttggatgtttctgaaaaggcggaccttgtggcagacagttctttcatttgtttggcctctttttgcactggcagtctgcttatttccagtttacccataccaatgcaagattgttgtactgtactcatgtgctggagctctacttttcattgtctccattcttttgctaagagctgccatctttggcatcttatgggttctccttgggaaacgcggtggtg

SEQ ID NO: 204779 - DNA, 2778 bp, Zea Mays
agccggtccagcccacagtccacgaggacacgatccccgacctcatatcaggttcccctccccatcccggagagcaaaagcgcttctctcgctagcgagttcggcagtagaaaccctaaaaaaagacaccgccctccccttcgctagcggaaccgccctcccctcgccggggtaggggtttcgggggtagacgcccgccatggacgcgttccggaaacagctggacgtgctcatgggcgccaaccgcaacggcgacgtcgaggaggtgagccgcaactactacgaccgcgacgtctgccgcctcttcctcgccggtctctgcccacacgacctctttcagctcacgaaaatggatctcggtccttgttctaagattcactctcttcaactgcggaaagattatgaagaagcgaaagcaaagggaacagaaaattttgatagagaactcgaggatatgatagaaaggctcattgtggagtgtgacaggaaaattcagagggccctaaaacggcttgcagatgatgatgccaatgctgctattgcgatatcggtctctgaggttactctgacggatgacatactgcagctgtcaaaacagataaaggagaaaatggcagaagttgatgcctttgattttgaagggagaactgatgacaaaataaaggcccaggaagtagtggaagagctaagagctaaaagagctgatatgcaggctaccctcttgcttgatgcttttaacaaggacagagcttcattaactcagcctgctccacctcaagtggcagcagttccaccaccagctccacctgatgctcgtactcaagaaattatcaacgaaaagcttaagaaagctgaagagcttggtgaacaaggcatggttgatgaagctcaaaaagctttggaagaggcagaagctctgaaaaagctggcgccacgttcagagccaccttcagacccttcgaaatatactgctgctgatgttcgaattactgatcaaaaattacgcctctgtgacatatgtggagcatttctgagtgtatatgacaatgatcgacgtcttgctgaccattttggtgggaaattacacctaggctacatgctgattcgtgagaaacagaaagaacttcaggtgctgaatgtaatgtaccattttctgctttaaagagttactctgttttggcccttttggcatattcattacaggaattagtccatgttgcgtgattggaatctcatgcgatcatcttcatacccatggatacaacagtcactgtctgttggcaaattattatgttgggcagaagccggaggtttcttttctactgcctgagccatattatgtagaccaggtgataaataatactggttaagttatcctgaaagctttgccaacatttgctgtaagtgacaacttgttctattttttatctgctacctccataagtttgcaagttaaactttgctgaagcagccttgcctgtaaagtatgactcccctttctcttggaacgttgtcgctgacttcatgtatggcaaaatatcatcatttctactgtcaataaataaaatacactatgccaccttgcaggagcagagaaataaaaggagaccgggcaaagctgaagatgatagacgatcaagagagcacagcaaggatcgcaacggccggtcgtccagggatagagaaccagaaaggagagacagggttgagtctcgagatggtagaagagattatgaaagggatcgtgatagacgtcatgatagggacaggcgccatgaccgtgatcgggatagggattatgaccgctcccgtggacatgattcaaggaggagagagcgttcacgctccagggagcgcagcaggcgccacgagagatactaaatgttacaccatgcctgacagatttaggagtactggcggcgtctgttcaagatatggtttgagcttgtgcttcgtatcttctgaagaccggtctacttgacgctaaattcgcatggagtgttaagcatttattaaacgcatctggaatcaaatgaagttgtacttgcgaacggcttcacttaaaattcgcgccatttctaatattgtaataagctgtgcttgaaccttagctgtctctgtgtactcgacgtaccactcgctcccacaaatagcttcgaacatcctgtacctgaaacatgacgctgtttggtggaggtggagctgagaattcaactccgaagaaagatgtttatcaattgttcgctgagaaggttagggataacaaacagctggaatcaagatgggcaatcatgcaagaaacccgtgtggagtattttcgtggaaaagatttcaatgccttcatcaagaattatccagaagtcagggaaattttggggccagataaggatttagaagtggaagacattgttaacactttgttgaccaagaaccttgtgataaggtgtgaccgagttatgaaaactgtgaggcctggcaagaaaaagttatcatcatggcctgctcacttggagatacataatgaacaagtgtttactgaaaatgatgggttttatgcttggatgtttctgaaaaggcggaccttgtggcagacagttctttcatttgtttggcctctttttgcactggcagtctgcttatttccagtttacccataccaatgcaagattgttgtactgtactcatgtgctggagctctacttttcattgtctccattcttttgctaagagctgccatctttggcatcttatgggttctccttgggaaacgcggtggtg

SEQ ID NO: 204780 - DNA, 2299 bp, Zea Mays
cgccgacccggcctccgcctccgactccgacaccggctcgccgcgcggccgcgtcggctgcatcgtcaagaagctcagcggggcgtcgtcgctgcccgaggatgagctcgacgacgccgccaagtccgagctctcgctctcgcagtccgcgcccccgtcgcccgcgcccacgcgcgacgcctcgcagtacccgccgtacgcgtcgggcgcgatcaactgcccccgcccgccgcagctcgtcgtccggacggtgcgcggccgccgcgccatggaggagctcgtcgccgccatcgcgcaccggcggaggcgcgaggtcgccgcgctcgccgagaggcacgccgtgtcccgcttcgcgcacaagggcaggatccagtccatgcttcgtctgagattgttacgccagagaggtacagttgaggatgaaccgtggagtctactaaagccggttaggccacaccaacaaaaacatgtgggcaagttgaggtacgatagcagggacacagacttacaaaaagcaaacaattcctgtcaacaaaataatagcaagtgcatgcctgacgaacaactttataacgatagagttccagctgaggaaaaatcaaatgatatatccgctgaaggccttgttgatggttcaggaaatctacagtgtgatgagcagatgaaagcaaagggggatacatgtcagaaagattgtgaaaacttttgtgttcatagtcaacactattctgaagcatcaagctttgcaaggtatggtgagcatagtactatcgatgagaatcagtttgtggaagatatctccccaagcactacaagcacgttgcatgaactagaaactccatcgtccagaggagataatcttcgcgaagaagacaaccaaagcataaacggttcctgggaagagagagggttatggataagcagcctaggttggcctgcaccaattgatactatgagtccggatagctggcatcaggaaacaatgggtgatattgagaatcataataatccaattcaattcaatgaccgcccctggatagagtcccctaactcgtggagatcactatgtgttgtcacgcaatcagactgtcatgctctgtcacacaatgctgacatttgcaaccttcttgagagaaaaaaggtctcaaagtctcttgagagtgacttcagcaataaaatgaaccagctgttgctaacagctctgcaaaaacaaaggcaacaacggatgatggatgactttggaggatactatgatgaacgcatgtactggagacaaaatgatgaaattcgtgatgctgataaggaggcatctgctccatgttcattagcccctgtcgcacatcttggagctcatcagcaagagagttggcagcattcttcatttggaagtcaacatcaacaccacgataaccaaaatttacttgaaatggaagtcagggtaaggggtgaaatgtcccagattcatcaggaaatatatcaactgcggaagttggtggaaagttgcattgcatcccaagtaaagatgcagcactccattaaagaagaggtgtgcagtgcacttcgtgaggcaggcttgatgcgaagccaacccgacacagcagcagcaaaaaggggtaactgctgcatctgccatcgaatgcaagttgactctctactttacaggtgtgggcatgtgtgcacctgttttgactgcgccgatcagctgaaatcgagcggcatgagctgcccaatctgtcaatctcctattgatgatgttgttctggcgcggttgaatttttgagcttagaatttaggaaaggccaagagaaaaagagccggcactcccagatttagacgtggagtttgcgaagccctggttttgaggcggcttcttacctttttgcttaaccaccactaaagaaatacgagctagttcttggagaaaatgtaaatatgtttttttggcgcaagagcggtgtgcttgtatcgcactaaaggaaaacagagttctaattaaaatgctggttgtattccccgtatgtaccacatcacttgttcacggagagaatgtaatggttctggttctatttgcgcgataggtttgaactcacagcattgatactcttcactcaggcctatttgaacaaattcaacgccaactaataatatgtttggtttgaggaatgagttagtctattatattcttacttggtttgaaaaatggaacgagtccttcaccatttcatttatcatatactaataaaattaataataatatgagaaatacatttattacatcaaatttatgtaatgaactaat

SEQ ID NO: 204781 - DNA, 2928 bp, Zea Mays
cctgattacgcatggagagagagagagagcgcagaacaaataaatcccaaccaccagccaagccagcggaagtaacagctcatccatcagagagaaacaaagaaaagaaaagcacgggtggggcccacagccggcgggacccacgcggggagacggacctccgtcgtcctactactcgctctgggcctctggccacccctcgactgcctgcggcctgcctgcgctcaattcaattcgactgcggcgaacaaaacaaacgcagggagaaggtgccccgcggccgcacgccaggccatcccaagcgaggcgtggcgacgcggagctgaggggcgctactgcggggccgtccttggcgagaggaggggaggggcccccgagggatcggttttcggcgggggagccagcggccgcgggcgaatggctggcggcgaggtagcggtcgtggaggaaacggcggtgggggcgccgactgcgacggcgacgccgcctgacttggcggcgcatgccgcggccggtggcggggaggaggcgatgcggatggagggctggctgtacctgatccgatccaaccgatttgggatgcagtactcgcgcaagcgctacttcgtgctcgaggacgccgcgctccgctgcttcaagtccacgccatcctccaagcgcgaggatcctgtcagaagtgcaataattgactcttgtattcgtgtgacagacaatggcagagaaagtgtacataggagtgacttttacatattcacactatataattcttccaatcattatgatcaacttaagttgggtgcgagaagttcagaagaagcagctaggtggatcaggtgcttaatggagtctgccttaaagtcacctagaaaagatgagcacattgttgcttgttcacacagaagatggcaggctttcaggttgagccgccgcaatagccgtatgcactcaatagattggactttattttcatctgctcataacgatccaatggcatctgatgtcattgcaccttctccatggacaatatttggctgtacaaacgggttacgtttgtttaccgaggcaaacgatggtggctctcatgggaagtattgggatgatcatccggctataatggcagttggtgtggttgatgcgaattccgaggctgtctttcagactctaatgtcccttggccaatcaagatctgaatgggacttctgtttgcgggaaggaaaggtaatcgagcatcttgatgggcatacagacataatccaaaagaaattaagaagcgactggttaccatggggaatgagaaagagagatctattacttagacgatattggaggcgagaagatgatggaacttatgtaattctataccactctgttttccactacaaatgtcgtcccgagaaaggctacatccgtgcatgtcttaaaagtggaggttatgtaatatcaccagtcaatcaaggaagacaatcagttgtaaagcacatgcttgccatagattggaaattctggaagtcttatctgtttacatcatctgccaaatatatcactatacgaatgttaggcagagtagcagcactacgagaattcttccgagcgaaaaatggtaattgttcttgcatggagttctcatctggagagttgaccagggacacgggattacctcaaggtgaaaatcagcgaataaatttggaaatgcagcaagaaaatgagaacggaagacttgaaggtcctactgaaggatcactgggtggttctaacaggcacttaagcagtactggttcctttgttcaactcaatgatgcagcagatgagttctttgacgtgccagacgaatcagaatatgatcagagagaagttatgtttccttctgatgagagcttgcatgctgcggaccagcgtcacgctaaactgtccactgctgctgtttttgtaaaaaggttgcatgatcttgcagttcagaaaagaggatacattgacttacagggagctgcagatgctgataatgggccatgttgctatggatatactcttcccaaagattcgagctatacagtgccttctacttgggcaatgacagatcctacaacattcttaatccggggagagacttatttgcacgatcgtataaagatcaaggcaaatagtaccctgatgcaaatggtaggtgctgactggataaaatctgataagcgtgaggatgatctagctggtcgccctggggggctagtccagaaatgtgcagcacaagggggcacccgattcttcttcattgtaaacattcaggttcctggttcaaccacatacagcttagctttgtattatatgatggatacaccattagaaaaggtccctctgcttgaaagatttgtaaatggagatgatgcattcagaaattcaaggttcaagctcattccttacatctcaaagggatcttggattgttaaacagagtgtgggcaagaaagcttgcttggttggacaagcattagaaatcaattattttcgtggaagaaactatttggagcttggagttgatattggttcatcaacggtggcacgaggtgtggtgagcctagtgcttggctacttgaacaatcttgtgatcgaaatggccttcttggtacagggaaacacaaatgaagaactcccggaattcctcctaggtacctgccgactgaattacctggatgcctccaaggcagtgtccatagacgagtgctaggaccccaactgacctcattttttaaagccaagtacaccaaaagacaaaaaaaaaaggctgaatccccattccttgctgccgacacaatcggcaaccctagcccagatgcccattttattgcctcaccgcaaaagtgggggatccattgcaaccgttgtacattctcttcttgccgactgctcaggcgaggtgcgctcggcttgtggtggc

SEQ ID NO: 204782 - DNA, 1577 bp, Zea Mays
ctcacccgttcactccgtccatgacgaaacggcaagcgtcgccctctccaccgccaccagtccacctcctcgtcctcctccggtcacgcacgcagctagcttacccgccccgccactataaaaatccacctccaccccaccgcgcgtctacagttccacacacgcgtgcacgggcgggcaagcaccagaaaggaaaggcggaggccgcgcggcgggcgccagctgcagccaagagcccactagtagtagtagtagctagttcaccaccgcctgcttgcctcctttactttgccatatttgctagcgtttcctggattggggacgcttccgtttcgggaagccgtgaagggatcggccacgacgatggtgcgggggaagacggagctgaagcggatagagaacgcgacgagccggcaggtgaccttctcgaagcgccgcaacgggctgctcaagaaggccttcgagctctccgtgctctgcgatgctgaggtcgggctcgtcgtcttctccccgcgcggcaagctctacgagttcgccagcgccgccaggaccaaaagcctgaagaaaccgatgacagcatcgtacatgggggcaacgcggaggtcctgaattaatgcgcggccaatcggaggaagagtgagtggaaagaggcaggcgtgcccagtaactgtgggtggaaggattgctgctcatgggccatggctacaaacggagaagcgtcgtcatgtgacttctggtcgcttggcttgttcctccggcctgccaaagccacttttttcttgcctccagaaaacaattgaccgctacaggacatacacaagggaaaatgtcaataacaagactgttcaacaagatatacagcaagtcaaagcagatgccgtaagcttggcaagtagactcgaagccctagaaaagaccaaacgaatgtttctgggtgaaaatttagaagaatgctccattgaagaactgcataatctggaggttaaactggcgaagagccttcacgtcatcagagggaagaagacacaactgctggagcagcagatatccaagctgaaggagaaggagaggaccctgctccaagacaacaaagagttgcgggataagcgcaacctccagtctccaccggaggcgccaccggacctgaaccgctgtgtccctccttggccgcgtagcctgccggcaccgagcaatgacatggacgtggagacggagctgtacataggattacccggcagggagcgctcctccaaccgggactctgattgaaccacggattttcagttcgatcggctaaaaggaataagctccctgaaattaaagcatcgaagggcacacgtcaatggttttatttgcaacttttgtatgcaaacttgtacttgaaaagtaaaaaaaataaaaataaatctgtagtatgtggatgcaagaaacggctggttagctagctgcaagccttctggggcctgaaaatgaaatccacccatggatacacccaaccaagcttgatgcgctacttttcttatacgcagctgccgaagtctttagagttcacttggcatatcgcatgcgacgccgac

SEQ ID NO: 204783 - DNA, 884 bp, Zea Mays
tatttcggaaacaatcctttcttgtagtggtggtgccgattgacttttcttgcttgcgttatccaatcacatcatcagttccggacgagcctccagaaaacaattgaccgctacaggacatacacaagggaaaatgtcaataacaagactgttcaacaagatatacagcaagtcaaagcagatgccgtaagcttggcaagtagactcgaagccctagaaaagaccaaacgaatgtttctgggtgaaaatttagaagaatgctccattgaagaactgcataatctggaggttaaactggcgaagagccttcacgtcatcagagggaagaagacacaactgctggagcagcagatatccaagctgaaggagaaggagaggaccctgctccaagacaacaaagagttgcgggataagcgcaacctccagtctccaccggaggcgccaccggacctgaaccgctgtgtccctccttggccgcgtagcctgccggcaccgagcaatgacatggacgtggagacggagctgtacataggattacccggcagggagcgctcctccaaccgggactctgattgaaccacggattttcagttcgatcggctaaaaggaataagctccctgaaattaaagcatcgaagggcacacgtcaatggttttatttgcaacttttgtatgcaaacttgtacttgaaaagtaaaaaaaataaaaataaatctgtagtatgtggatgcaagaaacggctggttagctagctgcaagccttctggggcctgaaaatgaaatccacccatggatacacccaaccaagcttgatgcgctacttttcttatacgcagctgccgaagtctttagagttcacttggcatatcgcatgcgacgccgac

SEQ ID NO: 204784 - DNA, 819 bp, Zea Mays
cagaagcttaaagccacagtttcgcctccagaaaacaattgaccgctacaggacatacacaagggaaaatgtcaataacaagactgttcaacaagatatacagcaagtcaaagcagatgccgtaagcttggcaagtagactcgaagccctagaaaagaccaaacgaatgtttctgggtgaaaatttagaagaatgctccattgaagaactgcataatctggaggttaaactggcgaagagccttcacgtcatcagagggaagaagacacaactgctggagcagcagatatccaagctgaaggagaaggagaggaccctgctccaagacaacaaagagttgcgggataagcgcaacctccagtctccaccggaggcgccaccggacctgaaccgctgtgtccctccttggccgcgtagcctgccggcaccgagcaatgacatggacgtggagacggagctgtacataggattacccggcagggagcgctcctccaaccgggactctgattgaaccacggattttcagttcgatcggctaaaaggaataagctccctgaaattaaagcatcgaagggcacacgtcaatggttttatttgcaacttttgtatgcaaacttgtacttgaaaagtaaaaaaaataaaaataaatctgtagtatgtggatgcaagaaacggctggttagctagctgcaagccttctggggcctgaaaatgaaatccacccatggatacacccaaccaagcttgatgcgctacttttcttatacgcagctgccgaagtctttagagttcacttggcatatcgcatgcgacgccgac

SEQ ID NO: 204785 - DNA, 596 bp, Zea Mays
attgtatgcatctgtggtgctgctctgttttcatgaacctatgaacggtcaactgtggtccaacagaaggccgctttgtgcttattgacagatcaggttgtacaagaatgcaaagagatatacgagaactcgcttgtggatggcaaccctcagaagtccggttttgtgtttggcaaattgaagtgcttgacagcaaagaaaggcatatggaggaagcttgggcagtaagtgtggacttgagcagagtggacagaagtaccacctaggcaaagactgtacgtttcacttctctatgatcattcttttgttcttttgtcgatgctactgttgggtttcacgtttagactatcagtgtgtactcagcttgaggagcaaaaatgtatattccactttgcttagctacagaggattttggtgtaagaatatgtaatttattcaataaaatggttgctatttgcaataagttggcccaagtcatcgtacgcgcttgacggctgctgatccaggcgcacgtcatgtatgatagactgcaatttctctgtgaaatggaaacaaggcaatatcatataatagacaacggccgtgctgcatgcgag

SEQ ID NO: 204786 - DNA, 2423 bp, Zea Mays
attaacgtcactaaaacaatcaggcttgattggttgctgcagcagctccaaggcattctagactggaggtctcaagttcgattcctcttaaatgcatctttttttgtgcaattactaggggcaacaacgtccaaatcccagacccacgcgcgctatgacttctttttgtgcacgctcggtcacgcgcaggatgacttcttttactgcaccggagggagtactcaaccaaccactttctacttttcaaatttagtccatctgtgaatcatttaggcgttttttatcactccagttgacagagaatactttgaggatgttgaccgaacatgggaaacctttgagaaaacattatggagccatatctctaactttttcaaactttcaaaagagagtcctcagacattggttcgagctttgagggttgttgaaatgcaagagatcttagatcaacaagttgcagaagaagcagctgaggctgagggtgctggtgctatggcgacaataacaaaccaacgtagaactgcaaaaaaaggtgcaggggcaacagttaccccaagaaagggcactcaagaaaaatcgaaggttcagggaaagggctacaaggacaaatgctatgagtctatcaggatggctgttgaggcccgcttcaacaagttgcttactgagcttgtttttgtggaggacttgatggaagctttggaggaagccaaagctattggagatgagcttggcgatatatatgattatgttgcaccatgctttcctcctaggtatgaaattttccagctcatggtaaacctgtatactgagagattcattcagatgcttcgacttctcagtgatagagcaaacgatattcaaaatataaatatcctgaaggtgactggttgggtcgtgcaatatcaagaaaacttgattggtcttggtgtggatgaatcacttgcccaagtttgttctgaaagtggtgcattggatcccctcatgaacatgtatgttgagcgtatgcaggcaacaaccaagaaatggtacagcaacattttggaggctgacaaaacacaaccaccaaagagtacagaggatggaaaactatatacacctgcagcagtggatctattcagaatattgaccgagcaagttcagatagttagagacaacagcacagacgtcatgctatatcgaattgcacttgcggttattcaggtcatgcttgattttcaagcagctgagaggcaaaggcttgaggagccagcttctgatgttggtctggaatctctatgtgcattgattaacaataatctgcgttgctatgaactttcatcagagctaagtagcagtacattggaggcgcttccacaaaactatgctgaacaggttaattttgaagacacctgcaaaggatttcttgaggttgccaaggaggccgtcctccaaactgttagtgttatttttgaagacccaggtgtgcaggatctactcgtgaagctttaccagaaagactggctggagggaatggtcacagaatatcttgtcgcaacatttgctgattactttggtgatgttaaaatgtatattgaagaaagatcatttcgaagatttgtggaggcttgcatagaggaaacaattgtggtctatgttgaccatctcctttctcagaaaaactacataaaagaagaaacgatagagaggatgaggttagatgaagaggtgcttatggatttcttcagggaacacatcaacgtgacaaaagttgaaagcagagtgcggattctggcagatatgagggagctagcttcagctgagagtttggatagctttactctcatttacactaatatactggaacatcaacctgattgcccgcctgaggttgtcgagaagcttgtggcaatgcgggaaggcattccaaaaaaggaagcgaaggaggttgtacaagaatgcaaagagatatacgagaactcgcttgtggatggcaaccctcagaagtccggttttgtgtttggcaaattgaagtgcttgacagcaaagaaaggcatatggaggaagcttgggcagtaagtgtggacttgagcagagtggacagaagtaccacctaggcaaagactgtacgtttcacttctctatgatcattcttttgttcttttgtcgatgctactgttgggtttcacgtttagactatcagtgtgtactcagcttgaggagcaaaaatgtatattccactttgcttagctacagaggattttggtgtaagaatatgtaatttattcaataaaatggttgctatttgcaataagttggcccaagtcatcgtacgcgcttgacggctgctgatccaggcgcacgtcatgtatgatagactgcaatttctctgtgaaatggaaacaaggcaatatcatataatagacaacggccgtgctgcatgcgag

SEQ ID NO: 204787 - DNA, 2584 bp, Zea Mays
attaacgtcactaaaacaatcaggcttgattggttgctgcagcagctccaaggcattctagactggaggtctcaagttcgattcctcttaaatgcatctttttttgtgcaattactaggggcaacaacgtccaaatcccagacccacgcgcgctatgacttctttttgtgcacgctcggtcacgcgcaggatgacttcttttactgcaccggagggagtactcaaccaaccactttctacttttcaaatttagtccatctgtgaatcatttaggcgttttttatcactccagttgacaggtaataaaactattgctgatggcataataaaaaacagttgaagaaaagaaaacttgtcctcaatcctcattgattcatctaagatgatgtgttacctagctgatgctgaaccgttcgttttcgtaactaaacctcttttacatatcaatgggatgcaaattttttcttgtggttctgtattgcatgaagtacacaagtgtaattcacttgatggattcttaactccacagagaatactttgaggatgttgaccgaacatgggaaacctttgagaaaacattatggagccatatctctaactttttcaaactttcaaaagagagtcctcagacattggttcgagctttgagggttgttgaaatgcaagagatcttagatcaacaagttgcagaagaagcagctgaggctgagggtgctggtgctatggcgacaataacaaaccaacgtagaactgcaaaaaaaggtgcaggggcaacagttaccccaagaaagggcactcaagaaaaatcgaaggttcagggaaagggctacaaggacaaatgctatgagtctatcaggatggctgttgaggcccgcttcaacaagttgcttactgagcttgtttttgtggaggacttgatggaagctttggaggaagccaaagctattggagatgagcttggcgatatatatgattatgttgcaccatgctttcctcctagtgatagagcaaacgatattcaaaatataaatatcctgaaggtgactggttgggtcgtgcaatatcaagaaaacttgattggtcttggtgtggatgaatcacttgcccaagtttgttctgaaagtggtgcattggatcccctcatgaacatgtatgttgagcgtatgcaggcaacaaccaagaaatggtacagcaacattttggaggctgacaaaacacaaccaccaaagagtacagaggatggaaaactatatacacctgcagcagtggatctattcagaatattgaccgagcaagttcagatagttagagacaacagcacagacgtcatgctatatcgaattgcacttgcggttattcaggtcatgcttgattttcaagcagctgagaggcaaaggcttgaggagccagcttctgatgttggtctggaatctctatgtgcattgattaacaataatctgcgttgctatgaactttcatcagagctaagtagcagtacattggaggcgcttccacaaaactatgctgaacaggttaattttgaagacacctgcaaaggatttcttgaggttgccaaggaggccgtcctccaaactgttagtgttatttttgaagacccaggtgtgcaggatctactcgtgaagctttaccagaaagactggctggagggaatggtcacagaatatcttgtcgcaacatttgctgattactttggtgatgttaaaatgtatattgaagaaagatcatttcgaagatttgtggaggcttgcatagaggaaacaattgtggtctatgttgaccatctcctttctcagaaaaactacataaaagaagaaacgatagagaggatgaggttagatgaagaggtgcttatggatttcttcagggaacacatcaacgtgacaaaagttgaaagcagagtgcggattctggcagatatgagggagctagcttcagctgagagtttggatagctttactctcatttacactaatatactggaacatcaacctgattgcccgcctgaggttgtcgagaagcttgtggcaatgcgggaaggcattccaaaaaaggaagcgaaggaggttgtacaagaatgcaaagagatatacgagaactcgcttgtggatggcaaccctcagaagtccggttttgtgtttggcaaattgaagtgcttgacagcaaagaaaggcatatggaggaagcttgggcagtaagtgtggacttgagcagagtggacagaagtaccacctaggcaaagactgtacgtttcacttctctatgatcattcttttgttcttttgtcgatgctactgttgggtttcacgtttagactatcagtgtgtactcagcttgaggagcaaaaatgtatattccactttgcttagctacagaggattttggtgtaagaatatgtaatttattcaataaaatggttgctatttgcaataagttggcccaagtcatcgtacgcgcttgacggctgctgatccaggcgcacgtcatgtatgatagactgcaatttctctgtgaaatggaaacaaggcaatatcatataatagacaacggccgtgctgcatgcgag

SEQ ID NO: 204788 - DNA, 2535 bp, Zea Mays
attaacgtcactaaaacaatcaggcttgattggttgctgcagcagctccaaggcattctagactggaggtctcaagttcgattcctcttaaatgcatctttttttgtgcaattactaggggcaacaacgtccaaatcccagacccacgcgcgctatgacttctttttgtgcacgctcggtcacgcgcaggatgacttcttttactgcaccggagggagtactcaaccaaccactttctacttttcaaatttagtccatctgtgaatcatttaggcgttttttatcactccagttgacaggtaataaaactattgctgatggcataataaaaaacagttgaagaaaagaaaacttgtcctcaatcctcattgattcatctaagatgatgtgttacctagctgatgctgaaccagaatactttgaggatgttgaccgaacatgggaaacctttgagaaaacattatggagccatatctctaactttttcaaactttcaaaagagagtcctcagacattggttcgagctttgagggttgttgaaatgcaagagatcttagatcaacaagttgcagaagaagcagctgaggctgagggtgctggtgctatggcgacaataacaaaccaacgtagaactgcaaaaaaaggtgcaggggcaacagttaccccaagaaagggcactcaagaaaaatcgaaggttcagggaaagggctacaaggacaaatgctatgagtctatcaggatggctgttgaggcccgcttcaacaagttgcttactgagcttgtttttgtggaggacttgatggaagctttggaggaagccaaagctattggagatgagcttggcgatatatatgattatgttgcaccatgctttcctcctaggtatgaaattttccagctcatggtaaacctgtatactgagagattcattcagatgcttcgacttctcagtgatagagcaaacgatattcaaaatataaatatcctgaaggtgactggttgggtcgtgcaatatcaagaaaacttgattggtcttggtgtggatgaatcacttgcccaagtttgttctgaaagtggtgcattggatcccctcatgaacatgtatgttgagcgtatgcaggcaacaaccaagaaatggtacagcaacattttggaggctgacaaaacacaaccaccaaagagtacagaggatggaaaactatatacacctgcagcagtggatctattcagaatattgaccgagcaagttcagatagttagagacaacagcacagacgtcatgctatatcgaattgcacttgcggttattcaggtcatgcttgattttcaagcagctgagaggcaaaggcttgaggagccagcttctgatgttggtctggaatctctatgtgcattgattaacaataatctgcgttgctatgaactttcatcagagctaagtagcagtacattggaggcgcttccacaaaactatgctgaacaggttaattttgaagacacctgcaaaggatttcttgaggttgccaaggaggccgtcctccaaactgttagtgttatttttgaagacccaggtgtgcaggatctactcgtgaagctttaccagaaagactggctggagggaatggtcacagaatatcttgtcgcaacatttgctgattactttggtgatgttaaaatgtatattgaagaaagatcatttcgaagatttgtggaggcttgcatagaggaaacaattgtggtctatgttgaccatctcctttctcagaaaaactacataaaagaagaaacgatagagaggatgaggttagatgaagaggtgcttatggatttcttcagggaacacatcaacgtgacaaaagttgaaagcagagtgcggattctggcagatatgagggagctagcttcagctgagagtttggatagctttactctcatttacactaatatactggaacatcaacctgattgcccgcctgaggttgtcgagaagcttgtggcaatgcgggaaggcattccaaaaaaggaagcgaaggaggttgtacaagaatgcaaagagatatacgagaactcgcttgtggatggcaaccctcagaagtccggttttgtgtttggcaaattgaagtgcttgacagcaaagaaaggcatatggaggaagcttgggcagtaagtgtggacttgagcagagtggacagaagtaccacctaggcaaagactgtacgtttcacttctctatgatcattcttttgttcttttgtcgatgctactgttgggtttcacgtttagactatcagtgtgtactcagcttgaggagcaaaaatgtatattccactttgcttagctacagaggattttggtgtaagaatatgtaatttattcaataaaatggttgctatttgcaataagttggcccaagtcatcgtacgcgcttgacggctgctgatccaggcgcacgtcatgtatgatagactgcaatttctctgtgaaatggaaacaaggcaatatcatataatagacaacggccgtgctgcatgcgag

SEQ ID NO: 204789 - DNA, 2616 bp, Zea Mays
attaacgtcactaaaacaatcaggcttgattggttgctgcagcagctccaaggcattctagactggaggtctcaagttcgattcctcttaaatgcatctttttttgtgcaattactaggggcaacaacgtccaaatcccagacccacgcgcgctatgacttctttttgtgcacgctcggtcacgcgcaggatgacttcttttactgcaccggagggagtactcaaccaaccactttctacttttcaaatttagtccatctgtgaatcatttaggcgttttttatcactccagttgacaggtaataaaactattgctgatggcataataaaaaacagttgaagaaaagaaaacttgtcctcaatcctcattgattcatctaagatgatgtgttacctagctgatgctgaaccgttcgttttcgtaactaaacctcttttacatatcaatgggatgcaaattttttcttgtggttctgtattgcatgaagtacacaagtgtaattcacttgatggattcttaactccacagagaatactttgaggatgttgaccgaacatgggaaacctttgagaaaacattatggagccatatctctaactttttcaaactttcaaaagagagtcctcagacattggttcgagctttgagggttgttgaaatgcaagagatcttagatcaacaagttgcagaagaagcagctgaggctgagggtgctggtgctatggcgacaataacaaaccaacgtagaactgcaaaaaaaggtgcaggggcaacagttaccccaagaaagggcactcaagaaaaatcgaaggttcagggaaagggctacaaggacaaatgctatgagtctatcaggatggctgttgaggcccgcttcaacaagttgcttactgagcttgtttttgtggaggacttgatggaagctttggaggaagccaaagctattggagatgagcttggcgatatatatgattatgttgcaccatgctttcctcctaggtatgaaattttccagctcatggtaaacctgtatactgagagattcattcagatgcttcgacttctcagtgatagagcaaacgatattcaaaatataaatatcctgaaggtgactggttgggtcgtgcaatatcaagaaaacttgattggtcttggtgtggatgaatcacttgcccaagtttgttctgaaagtggtgcattggatcccctcatgaacatgtatgttgagcgtatgcaggcaacaaccaagaaatggtacagcaacattttggaggctgacaaaacacaaccaccaaagagtacagaggatggaaaactatatacacctgcagcagtggatctattcagaatattgaccgagcaagttcagatagttagagacaacagcacagacgtcatgctatatcgaattgcacttgcggttattcaggtcatgcttgattttcaagcagctgagaggcaaaggcttgaggagccagcttctgatgttggtctggaatctctatgtgcattgagctaagtagcagtacattggaggcgcttccacaaaactatgctgaacaggttaattttgaagacacctgcaaaggatttcttgaggttgccaaggaggccgtcctccaaactgttagtgttatttttgaagacccaggtgtgcaggatctactcgtgaagctttaccagaaagactggctggagggaatggtcacagaatatcttgtcgcaacatttgctgattactttggtgatgttaaaatgtatattgaagaaagatcatttcgaagatttgtggaggcttgcatagaggaaacaattgtggtctatgttgaccatctcctttctcagaaaaactacataaaagaagaaacgatagagaggatgaggttagatgaagaggtgcttatggatttcttcagggaacacatcaacgtgacaaaagttgaaagcagagtgcggattctggcagatatgagggagctagcttcagctgagagtttggatagctttactctcatttacactaatatactggaacatcaacctgattgcccgcctgaggttgtcgagaagcttgtggcaatgcgggaaggcattccaaaaaaggaagcgaaggaggttgtacaagaatgcaaagagatatacgagaactcgcttgtggatggcaaccctcagaagtccggttttgtgtttggcaaattgaagtgcttgacagcaaagaaaggcatatggaggaagcttgggcagtaagtgtggacttgagcagagtggacagaagtaccacctaggcaaagactgtacgtttcacttctctatgatcattcttttgttcttttgtcgatgctactgttgggtttcacgtttagactatcagtgtgtactcagcttgaggagcaaaaatgtatattccactttgcttagctacagaggattttggtgtaagaatatgtaatttattcaataaaatggttgctatttgcaataagttggcccaagtcatcgtacgcgcttgacggctgctgatccaggcgcacgtcatgtatgatagactgcaatttctctgtgaaatggaaacaaggcaatatcatataatagacaacggccgtgctgcatgcgag

SEQ ID NO: 204790 - DNA, 2737 bp, Zea Mays
cccaaatacttctcatccccactccccagcgtcctctgctctgccgccgcacccaactaaagcgcagtgcgtggccagtagtgtggacgtgcggtggcttcacgctcgcaccgctcgccagcccggaccctaatccagcgtgcttggcgcgagcacggaaggaatccccgtagcgaggaaggaatcaccggcagcgggtggaaagcttcacggggcccaagcaggggctgcaggaggccgcgaccgggctgtttcggctcatgcctggatctgggggagagggacgcgcggagccgcgccgcgccggatcccgttcgtcggcgcccggatggtgatcagcggttccagggtttacaagtaacgtttgcacaacaatagtgaactaggtacacactacaagatgacaactgaggtcaatcaaaacttttttgcatggtcacaggaggaaacttcggtgcaagatctttcacagggaacatcacaaatgtttggtcatggttccatatcttttggaagatttgacttggaatcattagaatgggagaaatggtctgtatttaccaatgacaggcgtcatgaagagtttggaaagttcaatggattagttgcgaagaagaaggcatactttgaagaatactttaagaggattagggagcttaaggctttacagcaacaggaccagcaaactgaacttcatctggagtactgtggtgatggcagcgattctagtcaaacaggagaatatgaaccagctgcagcccatggagctcctactgaatctgaaacacttgttgaagattccacaaagcagacagcagctgcaaccacgtttgaacatggaacggaatgctacggttatcatgagaatgggagtttagttaatgaaatttctgcaccaacccatttttcacctgttggtgatttgcagcatataggcaaacaaatgaaaggaagtgttagtggcaaaatggatatattgaagcaagatgctaattccagccaagatgttcctatgatccatgagattatgatcactcctaacaaacgagcaattgagaaagactctcgggttggtcaggcttcaaaaacaatttcgaagactgtcaaggtgacttctagtaatgtttctgatcacacatacgtttccaagggaccctgttcaggcgagcctagtgtgataaaccagatggcgaaaccagaaaatatcctgtcattgcggaggccaagagaagcaaccagtgatttagttggcaccacagcaagaagtggtattacaggtgtaagaagaccttcagcagcattacaacggccctctaccaaagaacggcgacctgtcacaaaagatgcttcaaggaagcatgctgaagttaccaccccatgccgtccatctacttctgaaagacgcacggtgaccggagagtcggcactaaagcctgaaaacaatgctattccatgtcgacctgttaccgctcacagacgccctatcaccaaagaatcagcaacaaggcaatgcagcattgctacaccacgccggccttctactgctgacaggcgccctgccaccaaagatctaacaccaaagctatccaacattgctgccccacatcgaccttctactgctcacaggcgccctatatccaaagagtcggcaccaaagcatttcaatgttgctagcccacatagaccttctactgttgaaaggcacactagtggcagagatatgacatcgaagtatgttggtattgctacctcatatctgccatctgctgtcaaacagcgccctatcactggagagggtgcacataagcatgctgatgttgtcaccctgagctgttctactgctgataggcgccccattagagacgttgcaccaaagtatgccactttagctctgccaaggagaccgtctactgccgagaggcaccccattgctagagatattgcaccaaagaatggtttatcactcagaccttctactgcagagaggcgaaccattgctagaaatgttgaaccaaagcatgcaccggcacagaggccttctactgctgagagacgtcctgttaccagagagactgtactgaagcaagctaatgttgccaactcatgtttacctttgacgccagatagacgcctcaccaaaaaaggtgacatttccacccttgagtgcccttctacaggaggaaggtgccctatcaccagtggtactgcactctggtcaagaacaatgccgtactattcaaagggtgctttggtcacagaagttactccccagaagacaataactcccagggttgttagaaacagcaagctagaaaacctaagctatgcaaaagaaagggtggaacttcaagtggatagaaagcaaaagtcaagtctttttaacctgtcctcgaagaaaacattgacttccaacgttagagatgaccaaggtcttgaaatgttcaaaaagccaaacaaggaggggggagttcgggctcatgcatacaaatcaaataatgcaactacttcatggaccggaaatgtaaagacaaaggctcctgtgcctccgcctctgccaccgcgccgaccgtactgcactgagaagaaaccgaatgtcaacagttcacctgttggtggaagaaagacaaaggcctcagctccacactggcactgaccccattatctaggatcctgcagcataactctgaagccgtgaaggtcacatcacatgctgctttgaaccgttgagagatgttca

SEQ ID NO: 204791 - DNA, 2977 bp, Zea Mays
cccaaatacttctcatccccactccccagcgtcctctgctctgccgccgcacccaactaaagcgcagtgcgtggccagtagtgtggacgtgcggtggcttcacgctcgcaccgctcgccagcccggaccctaatccagcgtgcttggcgcgagcacggaaggaatccccgtagcgaggaaggaatcaccggcagcgggtggaaagcttcacggggcccaagcaggggctgcaggaggccgcgaccgggctgtttcggctcatgcctggatctgggggagagggacgcgcggagccgcgccgcgccggatcccgttcgtcggcgcccggatggtgatcagcggttccagggtttacaagtaacgtttgcacaacaatagtgaactaggtacacactacaagatgacaactgaggtcaatcaaaacttttttgcatggtcacaggaggaaacttcggtgcaagatctttcacagggaacatcacaaatgtttggtcatggttccatatcttttggaagatttgacttggaatcattagaatgggagaaatggtctgtatttaccaatgacaggcgtcatgaagagtttggaaagttcaatggattagttgcgaagaagaaggcatactttgaagaatactttaagaggattagggagcttaaggctttacagcaacaggaccagcaaactgaacttcatctggagtactgtggtgatggcagcgattctagtcaaacaggagaatatgaaccagctgcagcccatggagctcctactgaatctgaaacacttgttgaagattccacaaagcagacagcagctgcaaccacgtttgaacatggaacggaatgctacggttatcatgagaatgggagtttagttaatgaaatttctgcaccaacccatttttcacctgttggtgatttgcagcatataggcaaacaaatgaaaggaagtgttagtggcaaaatggatatattgaagcaagatgctaattccagccaagatgttcctatgatccatgagattatgatcactcctaacaaacgagcaattgagaaagactctcgggttggtcaggcttcaaaaacaatttcgaagactgtcaagggaccctgttcaggcgagcctagtgtgataaaccagatggcgaaaccagaaaatatcctgtcattgcggaggccaagagaagcaaccagtgatttagttggcaccacagcaagaagtggtattacaggtgtaagaagaccttcagcagcattacaacggccctctaccaaagaacggcgacctgtcacaaaagatgcttcaaggaagcatgctgaagttaccaccccatgccgtccatctacttctgaaagacgcacggtgaccggagagtcggcactaaagcctgaaaacaatgctattccatgtcgacctgttaccgctcacagacgccctatcaccaaagaatcagcaacaaggcaatgcagcattgctacaccacgccggccttctactgctgacaggcgccctgccaccaaagatctaacaccaaagctatccaacattgctgccccacatcgaccttctactgctcacaggcgccctatatccaaagagtcggcaccaaagcatttcaatgttgctagcccacatagaccttctactgttgaaaggcacactagtggcagagatatgacatcgaagtatgttggtattgctacctcatatctgccatctgctgtcaaacagcgccctatcactggagagggtgcacataagcatgctgatgttgtcaccctgagctgttctactgctgataggcgccccattagagacgttgcaccaaagtatgccactttagctctgccaaggagaccgtctactgccgagaggcaccccattgctagagatattgcaccaaagaatggtttatcactcagaccttctactgcagagaggcgaaccattgctagaaatgttgaaccaaagcatgcaccggcacagaggccttctactgctgagagacgtcctgttaccagagagactgtactgaagcaagctaatgttgccaactcatgtttacctttgacgccagatagacgcctcaccaaaaaaggtgacatttccacccttgagtgcccttctacaggaggaaggtgccctatcaccagtggtactgcactctggtcaagaacaatgccgtactattcaaagggtgctttggtcacagaagttactccccagaagacaataactcccagggttgttagaaacagcaagctagaaaacctaagctatgcaaaagaaagggtggaacttcaagtggatagaaagcaaaagtcaagtctttttaacctgtcctcgaagaaaacattgacttccaacgttagagatgaccaaggtcttgaaatgttcaaaaagccaaacaaggaggggggagttcgggctcatgcatacaaatcaaataatgcaactacttcatggaccggaaatgtaaagacaaaggctcctgtgcctccgcctctgccaccgcgccgaccgtactgcactgagaagaaaccgaatgtcaacagttcacctgttggtggaagaaagacaaaggcctcagctccacactggcactgaccccattatctaggatcctgcagcataactctgaagccgtgaaggtaaaagctatgcgtctgacgtgacctagaaggctgcatccatcaagcaacgattgatgttatctattgtagcttaccagcagtcttgtgacttgtcacctgtgttagaataaccgtagtagttagtgtatgtagcaacgcgtagcatatatatatatatatatccactaatgtctaattgaaccgtagtagaactgccctggatttaactagaacattgtatatacctggaataattggagcttgagtatcgaaccaggagttatccgcacggttttgcaggtcacatcacatgctgctttgaaccgttgagagatgttca

SEQ ID NO: 204792 - DNA, 2904 bp, Zea Mays
cccaaatacttctcatccccactccccagcgtcctctgctctgccgccgcacccaactaaagcgcagtgcgtggccagtagtgtggacgtgcggtggcttcacgctcgcaccgctcgccagcccggaccctaatccagcgtgcttggcgcgagcacggaaggaatccccgtagcgaggaaggaatcaccggcagcgggtggaaagcttcacggggcccaagcaggggctgcaggaggccgcgaccgggctgtttcggctcatgcctggatctgggggagagggacgcgcggagccgcgccgcgccggatcccgttcgtcggcgcccggatggtgatcagcggttccagggtttacaagtaacgtttgcacaacaatagtgaactaggtacacactacaagatgacaactgaggtcaatcaaaacttttttgcatggtcacaggaggaaacttcggtgcaagatctttcacagggaacatcacaaatgtttggtcatggttccatatcttttggaagatttgacttggaatcattagaatgggagaaatggtctgtatttaccaatgacaggcgtcatgaagagtttggaaagttcaatggattagttgcgaagaagaaggcatactttgaagaatactttaagaggattagggagcttaaggctttacagcaacaggaccagcaaactgaacttcatctggagtactgtggtgatggcagcgattctagtcaaacaggagaatatgaaccagctgcagcccatggagctcctactgaatctgaaacacttgttgaagattccacaaagcagacagcagctgcaaccacgtttgaacatggaacggaatgctacggttatcatgagaatgggagtttagttaatgaaatttctgcaccaacccatttttcacctgttggtgatttgcagcatataggcaaacaaatgaaaggaagtgttagtggcaaaatggatatattgaagcaagatgctaattccagccaagatgttcctatgatccatgagattatgatcactcctaacaaacgagcaattgagaaagactctcgggttggtcaggcttcaaaaacaatttcgaagactgtcaagggaccctgttcaggcgagcctagtgtgataaaccagatggcgaaaccagaaaatatcctgtcattgcggaggccaagagaagcaaccagtgatttagttggcaccacagcaagaagtggtattacaggtgtaagaagaccttcagcagcattacaacggccctctaccaaagaacggcgacctgtcacaaaagatgcttcaaggaagcatgctgaagttaccaccccatgccgtccatctacttctgaaagacgcacggtgaccggagagtcggcactaaagcctgaaaacaatgctattccatgtcgacctgttaccgctcacagacgccctatcaccaaagaatcagcaacaaggcaatgcagcattgctacaccacgccggccttctactgctgacaggcgccctgccaccaaagatctaacaccaaagctatccaacattgctgccccacatcgaccttctactgctcacaggcgccctatatccaaagagtcggcaccaaagcatttcaatgttgctagcccacatagaccttctactgttgaaaggcacactagtggcagagatatgacatcgaagtatgttggtattgctacctcatatctgccatctgctgtcaaacagcgccctatcactggagagggtgcacataagcatgctgatgttgtcaccctgagctgttctactgctgataggcgccccattagagacgttgcaccaaagtatgccactttagctctgccaaggagaccgtctactgccgagaggcaccccattgctagagatattgcaccaaagaatggtttatcactcagaccttctactgcagagaggcgaaccattgctagaaatgttgaaccaaagcatgcaccggcacagaggccttctactgctgagagacgtcctgttaccagagagactgtactgaagcaagctaatgttgccaactcatgtttacctttgacgccagatagacgcctcaccaaaaaaggtgacatttccacccttgagtgcccttctacaggaggaaggtgccctatcaccagtggtactgcactctggtcaagaacaatgccgtactattcaaagggtgctttggtcacagaagttactccccagaagacaataactcccagggttgttagaaacagcaagctagaaaacctaagctatgcaaaagaaagggtggaacttcaagtggatagaaagcaaaagtcaagtctttttaacctgtcctcgaagaaaacattgacttccaacgttagagatgaccaaggtcttgaaatgttcaaaaagccaaacaaggaggggggagttcgggctcatgcatacaaatcaaataatgcaactacttcatggaccggaaatgtaaagacaaaggctcctgtgcctccgcctctgccaccgcgccgaccgtactgcactgagaagaaaccgaatgtcaacagttcacctgttggtggaagaaagacaaaggcctcagctccacactggcactgaccccattatctaggatcctgcagcataactctgaagccgtgaagcggatgaaatctgatgaaaagttgggattttgctgatgttcggctccagaacaagctgcagccactagactacagtgacatgcctcccatttggcgtcttcaaagtagtgttcatcacttcgttcttcaaccccattcttaatgactcgcggtccaacgtattagctctcacccctaacatattcaacctaacatattcagcagcatgtagagtggctgatgtaagtgcatgtacaactctattcaata

SEQ ID NO: 204793 - DNA, 2705 bp, Zea Mays
cccaaatacttctcatccccactccccagcgtcctctgctctgccgccgcacccaactaaagcgcagtgcgtggccagtagtgtggacgtgcggtggcttcacgctcgcaccgctcgccagcccggaccctaatccagcgtgcttggcgcgagcacggaaggaatccccgtagcgaggaaggaatcaccggcagcgggtggaaagcttcacggggcccaagcaggggctgcaggaggccgcgaccgggctgtttcggctcatgcctggatctgggggagagggacgcgcggagccgcgccgcgccggatcccgttcgtcggcgcccggatggtgatcagcggttccagggtttacaagtaacgtttgcacaacaatagtgaactaggtacacactacaagatgacaactgaggtcaatcaaaacttttttgcatggtcacaggaggaaacttcggtgcaagatctttcacagggaacatcacaaatgtttggtcatggttccatatcttttggaagatttgacttggaatcattagaatgggagaaatggtctgtatttaccaatgacaggcgtcatgaagagtttggaaagttcaatggattagttgcgaagaagaaggcatactttgaagaatactttaagaggattagggagcttaaggctttacagcaacaggaccagcaaactgaacttcatctggagtactgtggtgatggcagcgattctagtcaaacaggagaatatgaaccagctgcagcccatggagctcctactgaatctgaaacacttgttgaagattccacaaagcagacagcagctgcaaccacgtttgaacatggaacggaatgctacggttatcatgagaatgggagtttagttaatgaaatttctgcaccaacccatttttcacctgttggtgatttgcagcatataggcaaacaaatgaaaggaagtgttagtggcaaaatggatatattgaagcaagatgctaattccagccaagatgttcctatgatccatgagattatgatcactcctaacaaacgagcaattgagaaagactctcgggttggtcaggcttcaaaaacaatttcgaagactgtcaaggtgacttctagtaatgtttctgatcacacatacgtttccaagggaccctgttcaggcgagcctagtgtgataaaccagatggcgaaaccagaaaatatcctgtcattgcggaggccaagagaagcaaccagtgatttagttggcaccacagcaagaagtggtattacaggtgtaagaagaccttcagcagcattacaacggccctctaccaaagaacggcgacctgtcacaaaagatgcttcaaggaagcatgctgaagttaccaccccatgccgtccatctacttctgaaagacgcacggtgaccggagagtcggcactaaagcctgaaaacaatgctattccatgtcgacctgttaccgctcacagacgccctatcaccaaagaatcagcaacaaggcaatgcagcattgctacaccacgccggccttctactgctgacaggcgccctgccaccaaagatctaacaccaaagctatccaacattgctgccccacatcgaccttctactgctcacaggcgccctatatccaaagagtcggcaccaaagcatttcaatgttgctagcccacatagaccttctactgttgaaaggcacactagtggcagagatatgacatcgaagtatgttggtattgctacctcatatctgccatctgctgtcaaacagcgccctatcactggagagggtgcacataagcatgctgatgttgtcaccctgagctgttctactgctgataggcgccccattagagacgttgcaccaaagtatgccactttagctctgccaaggagaccgtctactgccgagaggcaccccattgctagagatattgcaccaaagaatggtttatcactcagaccttctactgcagagaggcgaaccattgctagaaatgttgaaccaaagcatgcaccggcacagaggccttctactgctgagagacgtcctgttaccagagagactgtactgaagcaagctaatgttgccaactcatgtttacctttgacgccagatagacgcctcaccaaaaaaggtgacatttccacccttgagtgcccttctacaggaggaaggtgccctatcaccagtggtactgcactctggtcaagaacaatgccgtactattcaaagggtgctttggtcacagaagttactccccagaagacaataactcccagggttgttagaaacagcaagctagaaaacctaagctatgcaaaagaaagggtggaacttcaagtggatagaaagcaaaagtcaagtctttttaacctgtcctcgaagaaaacattgacttccaacgttagagatgaccaaggtcttgaaatgttcaaaaagccaaacaaggaggggggagttcgggctcatgcatacaaatcaaataatgcaactacttcatggaccggaaatgtaaagacaaaggctcctgtgcctccgcctctgccaccgcgccgaccgtactgcactgagaagaaaccgaatgtcaacagttcacctgttggtggaagaaagacaaaggcctcagctccacactggcactgaccccattatctaggatcctgcagcataactctgaagccgtgaaggtcacaag

SEQ ID NO: 204794 - DNA, 1872 bp, Zea Mays
caaggaccctgttcaggcgagcctagtgtgataaaccagatggcgaaaccagaaaatatcctgtcattgcggaggccaagagaagcaaccagtgatttagttggcaccacagcaagaagtggtattacaggtgtaagaagaccttcagcagcattacaacggccctctaccaaagaacggcgacctgtcacaaaagatgcttcaaggaagcatgctgaagttaccaccccatgccgtccatctacttctgaaagacgcacggtgaccggagagtcggcactaaagcctgaaaacaatgctattccatgtcgacctgttaccgctcacagacgccctatcaccaaagaatcagcaacaaggcaatgcagcattgctacaccacgccggccttctactgctgacaggcgccctgccaccaaagatctaacaccaaagctatccaacattgctgccccacatcgaccttctactgctcacaggcgccctatatccaaagagtcggcaccaaagcatttcaatgttgctagcccacatagaccttctactgttgaaaggcacactagtggcagagatatgacatcgaagtatgttggtattgctacctcatatctgccatctgctgtcaaacagcgccctatcactggagagggtgcacataagcatgctgatgttgtcaccctgagctgttctactgctgataggcgccccattagagacgttgcaccaaagtatgccactttagctctgccaaggagaccgtctactgccgagaggcaccccattgctagagatattgcaccaaagaatggtttatcactcagaccttctactgcagagaggcgaaccattgctagaaatgttgaaccaaagcatgcaccggcacagaggccttctactgctgagagacgtcctgttaccagagagactgtactgaagcaagctaatgttgccaactcatgtttacctttgacgccagatagacgcctcaccaaaaaaggtgacatttccacccttgagtgcccttctacaggaggaaggtgccctatcaccagtggtactgcactctggtcaagaacaatgccgtactattcaaagggtgctttggtcacagaagttactccccagaagacaataactcccagggttgttagaaacagcaagctagaaaacctaagctatgcaaaagaaagggtggaacttcaagtggatagaaagcaaaagtcaagtctttttaacctgtcctcgaagaaaacattgacttccaacgttagagatgaccaaggtcttgaaatgttcaaaaagccaaacaaggaggggggagttcgggctcatgcatacaaatcaaataatgcaactacttcatggaccggaaatgtaaagacaaaggctcctgtgcctccgcctctgccaccgcgccgaccgtactgcactgagaagaaaccgaatgtcaacagttcacctgttggtggaagaaagacaaaggcctcagctccacactggcactgaccccattatctaggatcctgcagcataactctgaagccgtgaaggtaaaagctatgcgtctgacgtgacctagaaggctgcatccatcaagcaacgattgatgttatctattgtagcttaccagcagtcttgtgacttgtcacctgtgttagaataaccgtagtagttagtgtatgtagcaacgcgtagcatatatatatatatatatccactaatgtctaattgaaccgtagtagaactgccctggatttaactagaacattgtatatacctggaataattggagcttgagtatcgaaccaggagttatccgcacggttttgcaggtcacatcacatgctgctttgaaccgttgagagatgttca

SEQ ID NO: 204795 - DNA, 1740 bp, Zea Mays
cccgccacctactgacctacccctccacttccctaccctactctcccccctccctctctcttccccgcctctcctctctcttcccgcagcggcagtcgacggcaaaaccctagatccctctccctcttaaaccctctacgagtgcgggaggatgtcggagccttccaaggtaatccacatccgcaacgtcgggcacgagattgccgagtctgatctccttcagctgctgcagccgttcggcgtggtctccaagatcgtcatgttgcgtgccaagaaccaaactcttctgcagatggaagacatacatgcttccgtgagtgcgctgcaatattacacttccgttcaacctagcataaggggaaggaatgtttacatgcagttctcatctcaccaagagcttaccacagaccagagctcgcatggaaggaattctgatcaggttttcaagctcttattcagtttcactcgcgccaagaagctgtggaagcatttggttctttgcatggaaggaacatatatgatggttgctgccagctagatattcaatattcaaatctcagtgaactgcaagtccattacaacaacgaccgatctagagatttcacaaatccatcattacctacagaacaacgccctagggcctctcagcaagcttatcctgatccagctaatctctatgccttccaacaagctggagcttcatatgcacagatggggagggctgcaatgattgctgccgcatttggtggaactttacctcatggagtgactggtaccaatgaacggtgcacactcatagtcagtaatctgaataatgataaaattgatgaggataagctcttcaatctgttttccttgtacggaaacatagttcgtatcaaggtactgcgtaataaaccagatcatgctcttgttgagatggctgacgggttgcaggctgagctagctgtgcattatttgaagggggctatactatttgggaagaagctggaagttaactactcaaagtaccctaacattacacctgccccagatgcccacgactacttgaactcgagcctaaaccgattcaacagcaacatggtaaaaaactaccgacattgctgctctccaacaaagatgatccacatctctgccctcccccaagagatctctgaggaagcaatcctgaaccatttgtctgagcacggtactgttgtcaacaccaagctatttgaggtgaatggcaagaggcaggctctcgttttatttgagactgaagaggcagcgaccgaggccctcgtgtcaaagcatgccagcacacttgagggtaacacgatccggatctctttctcccagatgcagagtatataagccacctcaagggaaagctcatgtcgccctcgcttaccacccggcgagcactatttaggaagcatttcagactaagatgtgaatcctctgcgccattctccaagacatgctgtctgagctgtacctccccctgaccttcgggttttcttttcactctacactggccttgcaccaaaaggtttctgtgtttctttccaaatcctgttggctaggttatcaaaggacatttaccccttgtcgtgatattctgagttggaaggcctgttaattgtgtgaatcgtattatccttttgcctggacgctatttgccttgttttatatttttttcggtgtaattgttgcactggacttacttgcagctgcgacctttctgaacacaatccatca

SEQ ID NO: 204796 - DNA, 916 bp, Zea Mays
ggcggcctggcgcgctctttctgacgccgtcgatgcataacccgcatcccccttccgcggcatccatcgtcggctcctcgtgcgttgtctctctctctctctgtctctctctctctcgtccccctcgctctcagacgaccggtgggccgccgccgccgacgccgcaataagccaggtgctgaggctcttgttggtctcttcgccagcgaggagcacccagcaggacaaggcaacaggctgttggaatatggaccaacaaggcatgcatgaccatgggtccacgttgttggatttgaagtcccgccttcaccggattccagctacgacaaccctgttcctgggaatgaagacgaaggccgggagcccccactgatgccacctcatctgcagcacacgctgctgagcttcccaccaagccaagacgagtcgagcccgctgccccagccccagaccgtggttctgaaccacctttacatcgagaaagagaacacgaggtccatggttgctctggggatcacgcaccggttcaaggctaagttcgtgaccgtcgtgctttacaagccagtgctgaggcggtagggtgtggtcgtgtgcctgcgctcctgctccctcttctcgcgcaggatcggtaatggtaatgccgtaatggtaatggtaattgaacaccccttgggttgcagcccaccccttccagttgttgttattgttgttgtagtggtgcagaaacgggcgagaacgtcattttcgaatgattattagccttgttgtacctaatttggctgctggtggtggcagtgatggtttggttggagtagtttgcttgtgatttggcaccattcttctgtcgctgctgttatgattgcggatgtgccggctctctgcattttgaccggtcaatcggacagtgcaattggac

SEQ ID NO: 204797 - DNA, 733 bp, Zea Mays
caggcccttacaaaggataattcatgtactcaactgcaatgacaaggcaacaggctgttggaatatggaccaacaaggcatgcatgaccatgggtccacgttgttggatttgaagtcccgccttcaccggattccagctacgacaaccctgttcctgggaatgaagacgaaggccgggagcccccactgatgccacctcatctgcagcacacgctgctgagcttcccaccaagccaagacgagtcgagcccgctgccccagccccagaccgtggttctgaaccacctttacatcgagaaagagaacacgaggtccatggttgctctggggatcacgcaccggttcaaggctaagttcgtgaccgtcgtgctttacaagccagtgctgaggcggtagggtgtggtcgtgtgcctgcgctcctgctccctcttctcgcgcaggatcggtaatggtaatgccgtaatggtaatggtaattgaacaccccttgggttgcagcccaccccttccagttgttgttattgttgttgtagtggtgcagaaacgggcgagaacgtcattttcgaatgattattagccttgttgtacctaatttggctgctggtggtggcagtgatggtttggttggagtagtttgcttgtgatttggcaccattcttctgtcgctgctgttatgattgcggatgtgccggctctctgcattttgaccggtcaatcggacagtgcaattggac

SEQ ID NO: 204798 - DNA, 204 bp, Zea Mays
cttgcttgttcccgatttcgcgctgtgttgaatgatcaggatcaggtccaaacttgaacggtctttttgggagacagtcgggtaccactgcaggctactcctactctgcgggaaacaaaaacaaggctgtagtctgggaagaagacactttgtatgagtacctgcttaaccctaaaaagaggcatcgaaaaggatgaaaggggg

SEQ ID NO: 204799 - DNA, 1812 bp, Zea Mays
gtttgggccacatggcccgaccgtccggccgtcgaggtaccaaatctggtgctcaacaatttcaaaaatcaaaggcttcattccagctatccccaatacgaacaaatcaatgggggcgaaacttgaaaatgaagctgcatcgtcgctttgtctctactcttggtactggtacgacacaaggacgaagcaacaagtcagagcgcgaggccgtggtagctcttgcttgcttccctagccttatagctagcaaatgtatgcaacctgtcaggggcttgactccttgctgggcatatatatatataggacgtgtgcgctagtcgggcgggatacggtcgctagcagccatggcatcatcgagtgctgctctcgccgtcctgatgctcagctgggcggcggctctcgcggccgcgtcgtcgccggtgacgttgttcgaagccggctacatgccgctgttcggcggcggcaacctagtaccgtcgcccggcggccgctccgtccgcctcaaacttgaccgccacaccggctccgggttcgtgtcccgatcgtcttaccaccatggattcttcagcgcttccatcaagctgcccgaccatcacaccgccggtgtcgtcgtcgccttctacctgtcgaacgcggacgtgttccctggcaaccacgacgaggtggacttcgagctgctgggcaaccggcggggccacgagtggcgcgtccagaccaacatctacggcaacggcagcacctcccgcgggcgcgaggagcggtacctcctccccttcgaccccaccctccggccgcacgcctacgccgtggcctggacccccacggccatcctcttctacgtggatgggacgcccatccgcgaggtggtccgcgtgccggccatgggcggcgacttcccgtccaagcccatgtccgtgtacgccaccatctgggacggctccgcctgggccaccgagggcgggcggtacaaggtcgactacgccttcgcgcccttcgccgccgacttctcgtcgctcgtcctgagcggctgccccgtcgccggcggcggcgacgacctcgcggccgccgagtgccaggtggccacgatgacggcggactgcgccgtcatgacccccgccaagcgcgccgccatgcgccgcttccgccgccggtacctcctctacacggtgtgccacgacatgtaccgctacaacggcaccgtcttccccgagtgcgacgccgacggctcggaacgcgacgacttccacaagtggggcgagtccaagcgcgtgtctcccagcagccgcgggtacgtggaggtggaggaggacgccggcgtggagctcttctactacttcgtccaggccgagtccggcgccgccgccgccgccgatgacacccctttcctcttctggctcaccggcggcgaccgctgctccgtcttcagcggcctcgcctacgagatcggtcccatcagattcgtcctggaaccctacaacggcaccctgccgcgcctgcgatacaaccacaactcgtggtcaaaggtgtcacatatcctcttcgtcgattcaccggttggagctggattttccttctcgagagatcccaaaggctacgatgtcggagacatctcggcctcactgcagctacaggaattcctcatcaaggtgctgtccatcaatccaactagctagacatatataccaatgccacaaacccattcggataacgttagatgcaaatcttttaacgtttatttatgctgtttgcttatacatattccgtggatgtccagtggttcagtgatcatcccgagtacctcgcgaatccttt

SEQ ID NO: 204800 - DNA, 4354 bp, Zea Mays
atggaaagtaagaacaatcagcaccacattcaaggtcgagggttttctcaaagcaatgcaaaagcagattcattcagctggaaaacgtggatttttttctaaaaagtctgttgggccacaaactcgcgagaagttcactttggaagatatgctgtgctttcaaaaggattctattccaacttcattactaaagataagcaatgaccttgtaagccgctcgattaagttgttccatgtcatactaaagtacatgggcatcgattcaccagcaataattagtttggaggagagaatagaatttgttgagaagctctacaagcatacgttaaagcgttctgaacttcgagatgaactctttgcacagatttcaaaacaaacacgtaacaatcctgataggggttggtcaataagagcttgggagcttatgtacctgtgtgcatcatccatgccaccaagcaaagatattggggcatacttgtctgagtatattcactttgttgcccatggagccacaactgatgctgatgttcgagttctagcactgaacacactaaatgcattaaaacgatcagtcaaggcgggtcctaggattacaattcctgcatgggaggaaatagaagctctcttaacaagccggaagcttacaacaattgtatttttcttggatgaaacatttgaagagatcacctatgacatggcaacaactgttgctgatgctgttgaggaacttgctggcattatcaaactttcagtgtattctagcttcagcctatttgaatgtcggaaggttgttaatggatcgaagtcttcagagattggcaatgaggaatacattggattagatgataacaaatatattggtgacttgctatctgaattcaaatcagctaaggatcgcaacaaaggagaaattcttcattgcaaactcgtattcaagaaacgtctcttccgtgagtcggatgaggctgtgactgatccaatgtttgttcagctatcatatgtccagttgcaacatgattacattttgggaaactatcctgtcggcagggatgatgcttcacaactctctgctcttcagatcttggttgagattggattcattgataatcctgagtcctgtgttgaatggatatcacttttagagagatttcttcctagacaagtggcgattaccagagcaaagcgagactgggagcttgacatcatttcacgctttcagttaatggaacacttatcaaaggacgatgcacggcaacaatttctcagaatcttaaggactcttccatatgggaactctgttttcttcagtgttcggaagattgatgatccaataggattgctacctggaaaaattattttggggatcaacaaacgaggggttcactttttccgcccggttcccaaggaatatcttcattctgcagaactaagagacatcatgcaatttggtagcagcaatactgctgtcttctttaaaatgcgggttgctggtgttcttcatatctttcaatttgaaacaaagcagggcgaggaaatatgtgtagcacttcaaacacatataaatgatgtcatgctccgcagatattcaaaagcacgctctggtaatagtgttacatcacaaaatgatgttaaccaagcatataagccaccaaatatcgaaatgtttgaaaaacgtgtccaagaactgacaaaaacagccgaggattctcagaagaaagcagatcagttgcgagaagatttacagttgaagacaaaacaagaaacagagatgcaagaagagttggaagggctaagagataccttgcaatctgaacgacaaagttccaaagacataaaaaatgagcttgataagctaaaatctctatgtgatgagaaagaatctgctttgcaggctgccctgatggaaaaaagtagacttgaaaccagattaactagtggccagggccgtgagagagatacattgacaactgtaggcagcatcaataatgacattgaggatgcttgcaagcttgaggaggagttgaaatcataccaaaaagagcttgatgcatcaaaagaggtctcaaagaagctaatgttggaaaagaatattcttgaccagaaagttcaaaggcttgaaagaatgaaaaatgaagagaaaagcgcaatggaaaaggtttatgcggatgaatgctgtaaactgaaatctcagattgctgaattggagcagaaattggaagttgctacacgatccttaaatgtggctgaatcaaatcttgctgtaagaaatgctgaggttgatagcttgcaaaatagtctgaaagaacttgatgagctaagagagttcaaagcggatgttgacagaaagaatcaacagactgttgagattcttaaaaggcaaggagcacaattggtggaacttgagaatctttataagcaagaacaggttctacgaaagcgttactataatacaattgaagatatgaaaggaaaaataagagttttttgtcgcttgcgccctctaagcgacaaggaactttcttttgaggagaaaaatatagtttgcagtcctgatgaatttacaatttcacatccatggaaagatgaaaagtcaaagcaacatatatatgatcgtgtttttgatgcaaacacaagtcaagaagaagtctttgaggatactaagtatctggtacaatcagctgttgatggatataatgtctgtatatttgcgtatggccaaactggttctggaaagactttcactatttatggttcagaaaacaatcctggtcttactccaagggccacatctgaactttttagggtgataaagcgcgatggaaacaaatattcattttctttgaaggcatatatggtggagctttatcaagataatcttgtggacctgttattgcccagaaatgcaaagcagctgaagttagagataaaaaaagattccaagggtgttgttaccgttgaaaatgtaacagttgtgagcatttcaagtattgaggaactgagggctataatctcaagaggttctgagaggaggcacactgctggaacgaatatgaatgatgagagttcaaggtctcatttaattctttcaatcattattgaaagtacaaatctccaaactcaatcatatgcaagaggcaagctaagttttgtggaccttgctggttctgagagggtgaaaaaatcaggttcagcaggaaagcaattgaaagaagcgcaaagtataaataaatctctttctgctttggctgatgttattggtgctttatcttctgatggacaacatataccttaccggaaccataagttaacaatgcttatgagtgattctctcggaggcaatgcgaagaccttgatgtttgtgaatgtttcaccagctgagtctaacttggaggagacttacaactcgctaatgtatgtgcttctttgttcactgagtcttatgttccctcgtctcttggatttgctatttgtcactgtttccatctatgtggttttgatatattagctttcccatcgacgaccatttcaattgttcgtatcaaatgggtatgatggttaggttaatttcgtttctactgattggaatctatttttttggaagtttgtatgaatatatgacattcctgtggtatggtgcagtggctttgtttatactctctgtcctaaaatatagttctttctaacctacttttttttgtccacgttcattcaaatgataatgaatctagacatacatggaaactacattcatatgttatttaatgaatatgtgattagtctaaaacgaattatattttgggacgggaggtagtataatttttgaaaccctgtaggtatgcttcacgggttcgttgcattgttaatgatacgagcaagcatgttgccccaaaagaaatcatgaggttgaagaagttgatcgcctactggaaggagcaagcaggcaagcggagtgatgaggacgaactagaggagatacaggaagagaggatctcaaaagagagatcagacaatcgcatgactagctgacgatgctcctggtttcattcttccattacctggtgaagaggtgattgatgccgatgagcatttgtgactgccacgagttctgcgatcgctctctaacagaatgttcctatatcatctgacggccctgtaagtgtacactaattgtatagtagctacgtattatttctatggcggcggcgatgcccagcctgcttgtacaaagaggaatgtagcacatacattgatagaaggggaaaaagttgattatcgcttctttgctgacgagagattggcgatgtgttgctctatgccttggcgtcataccataaagaaaccttccaaagtcaga

SEQ ID NO: 204801 - DNA, 1084 bp, Zea Mays
taacaatattactcgttagattactcttatctcatctactgataaatatggcttgttaatgctttgttcaattgcatatacgattaggattcttgtgttcaagccttgtcaactttgacgatcaatatttatggacttagacaattgttgatgtaagactaatcttggtgagggtgaatttgtcgtgaaaaatacttccgtataatttttttgtttggttttttttaccgaaatttgctgtaaaattattatcttgttgtacttgtggatttagtaaacaacttacagatagagtacatagacgacataataatacactgcaacaattaatagaattagaatgtaacaacctatatgcatgcatggcaggactcgtgaatatagtggagttattagttcagcatgcatgttctatctgcttacctccttagagcagcatatgtatatgtttgggatgctacatgccatttaaattggataggtggtggtctggtggacatcgatccctggagaatggcttgaacctttcatttgcgtgattctagcatagacatctgaatatctgatggttagtgaaaggctggataccatcatatatacgtgtcatatgccatttgaagtgtgccatactaaaattgtagtcccaggagtattatgctttggctgtaattaaactttaaatagtgttctgtacatatgtattacagtgcctcattgtctcacacatgggctatcagggtagccccgaccatatatggatgaaggagaggaagaaaactatgtataaaagatatatagaggatcagagggagaagaaaaagagaggaagaaagagaaagaaaaggagaagaaaattgtgtatgatgttactattcagatttattcatggtcagctattcagagattgatgcatggtcatgtagccctttcatattctaccacataacaagagattcacaatcaaataaagcttaccaggactgctaggtatcgaatcttagggcatagctactcaagtttgatgtattaagaacaaggtcattccacattagctgataatcaaatgggggaaacttccagtgtc

SEQ ID NO: 204802 - DNA, 1833 bp, Zea Mays
cacgacggtcctatatatgagtataatatatacagctacttcccaccctctcccccgcaccgtcggcaccaagatgacgaccccgccgcgccgatcgccgccgctccggggaagaggccatgcgggacttcgggctctggcgcctatggtcaacatccacgagcgctcgcctgtgcccgcgtgcgtgccggcacacccggacccttcgtcgtcgatctccccggacgactggcggcgtttggagggcgcaacgttctctgtgatgtgcaagatccatcccaccgtctcctcccagcaccttcgcgccagggtaatcgactacgtccagcgcctcttcaggctccaccatgacggctaccaggtcatttcatttggatctgttccattgaagacatatcttcctgatggagatatcgacttgactttattgtgcgctgcaatttctgatgagaatctggaaaatgaagtgtgcgctattctaaaatcggaagagcagaggaaagattctgaatttgaagtcaaggatgtcaagtcaagcttgtgaagtgcaaggtgcaaaacattgctgtagacatctcagttaatcagattggtggacccaataaagtttattttctagagaaggttgatcaaaacttggggaaaaataacttgttgaggagaagcataatgcttatcaaacattggtgttattatgaaagctgcattcttggtgctcaacgtggtttggtttccacttatgctttggagacattagtgctgtacattttccatgtcttccacaagtctctggatggtccattggctgttctctataggtttcttgactactatagcaaatttgattgggataacaaggggatcagcttgtttggtcctatttcactatcttcactacccgagctagtcaccgagccaccatatactcgtgatgatggttttctctcacgggaggcgtttctcaaagactgtgctaaggcttttagtgtccccccaataaactctgaggaaaatccgcaagtattctccaaaaagtttgtgaatatagttgacccattgaagcagagtaacaatcttggacgcagtatcagcaaaggaaaccttggccggatacgcaaggaattctattttggtgcttgcaagctcggcaagattcttcaggcgcccgcgtgtttctctgccaacgaaatcaaccggtttttcaggaacacattaagcagggcagatgttccggtgagctctcctgatgatgttctacaggccgctagtgtttctgcgtcaccgggcaacaagggcgtggaaggagtcagcaagggcagttcacccaacaactcgtgtgacgttctgtgcaatcagttcggttacattaaaatctcagattccaacaatgcgctgcagaatctggtcgtggacaggcccgcttaggctgtacctgcacatggtcatagaacctccagcagcttactcatcttactttctaccatattttttttaaaaaaaacttccacattataaagaatacagtctatggtataaaataatgttttacatggctgtatacacggaccgctgatcatagcctaagtcgttgtcgttggtggccacaacaactgtgaatggtgtgtataaaaggatgggccaacaaattacgagattaattgtgcataaggttagctcattgcgaagctaggcacataaattttcttttgttaatatgtatatttatgttcttcgtaaggaaatgtctagatcaagaaaatgtggcccatggataatattttatattgtaatagacgtgattgacaaagactttcaccatatattttggtttcc

SEQ ID NO: 204803 - DNA, 3554 bp, Zea Mays
ctcccgttcccttccttccgtcgcggcccgcctccttcactacaaccaggacaggccaacgcggaagcccgtcctccccacccccttccagatttgcagctcgcacctcgcgaatccccgaattccccactgcctcgccacgccgcgcgctgaccgcggcacccggagccccacctgctattcccgaggcggaggacccatcctgccttggcgctcgttcctccctcgtgatcggcgccgcgggcgaatcgcgctgcccggtgggggggaatctagggttccggccatgccggcctagtcgtagggcgggggtaccggcctgcgtcgccggcgcgcgtggagatctcggtgcctccgaaccctggcgggggccggggaggccgcagctgctgaggcatggacgtggactcgcgcatgacgacggagtccgactccgactccgacgcggcggccgcggccgcccgcgggggcaacgccggaggttccgggtccgggagcgagacctcctcgtcgtccgcgccctcgacgcctgggacacccgggacgcccgcggcggccccgaatccggcgccggtcggcgctgtgggtccgaggccagcacctgggtacacggccgtgaacgcggtgatcgagaagaaggaggacgggccagggtgccggtgcgggcacactcttaccgcggtgccggctgtcggggaggagggcgcgcccgggtacatcggaccgcggctgatcctgtttggtggggccacggcgctcgaaggaaactctgccacgccgccctcttcggccgggagcgcggggatccgtcttgctggtgccacagcagatgtccattgctacgatgtgtcattgaacaagtggagcaggcttaccccacttggcgagcctccttcaccaagagctgcacatgtggcaactgcggttggaaccatggtggttattcagggtggaattggtcctgctggtttatctgcagaggatcttcatgttctagaccttacacagcaacgaccacgatggcacagagtggtggttcaaggacctggtccaggtccacgatacggtcatgtgatggccttggttgggcagagatttttgttgactattggtggaaatgacgggaagcggcctctggcggatgtatgggcccttgatactgcagctaagccatatgaatggaggaaacttgaaccagaaggtgaaggaccacccccatgcatgtatgccactgcaagtgcacgctcggatggacttctcttactttgtggtgggagggatgcgaatagcgtgcccttatcaagtgcatatggtcttgcgaaacatagagatgggcgctgggagtgggcaattgcccccggtgtctctccatcacccagataccaacatgcagctgtttttgtgaatgcacgtcttcatgtgtccggaggtgctcttggaggtgggcggatggtggaagactcctcaagtgttgcagtactggacactgctgctggagtctggtgtgacacaaaatctgttgttacaactcctaggacaggaagatttagtgcagatgcagcagggggtgatgctgctgttgagcttacacgacggtgcaggcatgcagcagctgctgttaatgatctcatattcatttatggaggtttacggggcggggtacttctggatgatcttcttgtggccgaggatcttgctgctgctgaaacaacaaatgctgctaatcatgcagcagcaaatgcagctgccacaaatttgcaagcaggacgaacacctgggaagtatgcgtataatgaacaaacaagacaaacaattacagaatcaggtcctgatggggctgtagttcttgggactccagttgcacctcctgtaaatggggacatgtatactgatatcagtcctgagaatgcggtgctgcaaggacagaggagattaagcaaaggcgtggattacttggttgaagcatcagcagcagaggcggaggcaatcagtgctacattagctgctgtgaaggccaggcaggttaatggtgagatggagcagttgccagacaaggagcagtctccagactccacatcaactagcaaacattcaagcctcatcaaactggacagtgctctttctaacaacttggcagctccacctggggttcggttgcaccatagagccgtcgtggtcgctgcggaaactggaggtgctctaggtggcatggtcaggcagctttcaattgaccagtttgaaaatgaagggagaagagtcagctatggcaccccagagaacgcaactgcagcaaggaagttgctagatagacaaatgtctattaatagtgttcctaaaaagatctttgtgacagtgccgagagaatattttcaagcgaaccaagtgttttgcagcttaaagcacctgttaaaatatttggagatttacacggacaatttggagatctgatgaggttattcgatgaatatggtgctccttcgactgctggtgacattgcttacattgattatctattcttgggggattatgtagatcgtggccagcatagtttagaaactatcactcttcttctcgcattgaaggttgaatatcctcaaaatgtacacttgattcgaggaaatcatgaagctgcagatatcaatgctttgtttggtttccgaatagagtgcatagaacgaatgggtgagagagatggtatctggacatggcatcggatgaataggctatttaattggcttcctttggctgcgcttatagaaaagaaaatcgtttgtatgcatggtggcatcggtcggtcaatcaaccatgttgagcaaattgagaatcttcaaaggccaattacaatggaagctggctcggttgtcctcatggatcttctgtggtctgatccaacagagaacgacagtgttgaaggactgaggcccaatgcccggggtcctggtcttgttacatttgggcctgatcgggttatggagttctgcaacaacaatgatcttcagttaattgtacgagcacatgagtgtgtgatggatggatttgagcgctttgctcaaggtcacttgatcactccttcattaacaacaaaataaggaggtactgcaaataatgccggagcgatcttggttttgggtagagatcttgtggttgtgccaaaactaatccatcctttgccccctgcaattacgtcacgtgaggcgtcgccggatcatattgaggacacatggatgcaggagctaaatgctaacagaccaccaactccgaccagggggcgtccccaagcagtagctaatgacaagggttctcttgcctggatatagtagattgaccacacattggttggtatgattcatatgaagcctgagtggtctggatcttgttattttcatttgtgttcgggagaggggctggtcgacagccgtaccgaaacgaaagattgatgtacaggggagcataaagactataaagttggtagaagggagcttaatctattttcttctctctccaattcgtttcattgaacacgagtagcaaacgaatcaagctgattcatcaga

SEQ ID NO: 204804 - DNA, 973 bp, Zea Mays
taagaggctgatttgggccagagggttgtgcacggaattcaacattgagaagctgcagcttgttgaagctgagaaaaagaagattagacaagagtatgaacgcaaagagaagcaggttgaagtacggaagaaaattgagtactctatgcagttgaatgcttctcgcatcaaagttcttcaagctcaggatgatctagtaaacaaaatgaaagacgatgcgatgaaggaactcctccttgtcagccacaaccaccatgaatacaagaaccttttgaaagatctaattgttcagggcttgctccgtttgaaagagccagctgtattgctccgttgccgcaaggaagatcaccatcatgtggaatcagtactgcattcagcaaagcacgagtatgcatcaaaagcagatgtccatgaaccagagatatttgttgaccatgatgtgtacctaccacctgccccaagccatcatgatgctcacggccagttttgctctggaggtattgtcttggcttctcgagatggaaagattgtgtttgagagtacacttgacgccagactggaagttgttttccgcaagaaattgccagagatccggaagcttctttttggccagactgcagcttaattgactcaatccgcagatgatggtatggctcgcttctacctagtggtttttgccaaattgatcgtttacggtattcatccccaatgtacaaactaccttatttgttcattactgtcgccgagcaccgactgtttgtacttcgttcgctccgaggaataagaataaagcactgctagacttcccattgcgaagctgaataaatattgtaaagccatttgtcgtgctgaacttcccgttccgttcctgtcctgtcctgttgatgtgtatatctagttaatgtcggatacggttcttgtgggaaaaataaaaaataaaagttcttgtaaagttcgccagctcacctcctgt

SEQ ID NO: 204805 - DNA, 1335 bp, Zea Mays
gtagggtaggtgcctcgtcggctcgtcgccgtcgcgatcagcaattagtggagtggagtagtatgcctgaccaacgcgactggtcgactgctagcccgtagctgcgctgttggcctgttgccatgccatatccgtcgagctgaagcctgaagcaaccaccatttcgatacgcgcgagggaacggggccggccggccggccggggatcggaactgaagtgtgggcacacaagagtcacaacagggggagtgggggacattccaatcagttccctgcgtgtgagcgatgcagcgggacgcgagaagctggtcgccggcgccggccacggacgccgccggcccttacgcgatgccttcgcccgtgcagccgtcgaccaagagcacgaaggagacggtgaagaatgcgctgtcgcggtgggggcggaaggtcggggaggcgaccaggaaggccgagggcctgtcgcgcaacacatggcagcactgtgggcgactctgctctgttcatcaactctctctaactatatacaccatcgccgatcagactggttgaggacggcgccgagcatcgcggaggccgcggtggggaggatcgcgcaggggaccaaggtgctggcggagggcggccacgacaggatattccgccaggccttcagcgccccgcccgacgagcagctgcgcaagtcctacgcttgctacctctccacggccgccggcccggtgatgggcgtcctgtacctgtccacggccagggtcgccttctgcagcgacagcccgctgtcctacgaggcttccggcggcgacagaacggagtggacccactacaaggtggcgattcctcttcaacggctgcgggcggcgagcccgtcggccaacaagaccaagcccgcggagaagttcatccagctggtgtcggtggacagtcacgagttctggttcatgggcttcgtcaactacgacggcgcggttgcgcacctgcaggaagcgctgagcgggttccgcaacctgcaggcgtgacatggaggacctcaatgcaatggacagtgttgtcttgtacgtgctcgccagaactgattgatcgaacagagcgattgtgtacccgctctctgtgtgtgttgcggtgctagtgtttgcatcgtgttgtgcgtgtgcggatttgtatgacatttttttgatttggttgccattgtcagcgagagaacagtccaatcattttattcagatttcagagaagaccatggttatccatggcgatggctttgatgatcacctgcaacatcatcaacacatctattttagacgctcttttgtgttggatttgatctcaaacttatataggg

SEQ ID NO: 204806 - DNA, 516 bp, Zea Mays
aaatcgagtcgagcaagttatcgaggaaccagtatttcgtccggtcgtccagccctatctgcagtccaccgtcgggcgagcccgagaatcccgtctcctcggcgccgcggcccccggtttttttatgctttcctttcggtcggcgacgcatacattcggcgagggagaggaagaagtcagtaaagtaaattctgttgctccaattcggacgaggagatgccgcggatccctctgatcaggttccccaagcggaatctcaaagccccatctccatccgcgccagcggcgtcgcaacccgcagaccagcacgcgaccctcatgttccggttaggggctaaagcagaggcaccatcttctggagagattaaaaattaccgctttagatctgatgtgccttgcccaccttctcatactgccgtaggaggtccagcttcactccttcctaagcgcaaacccctgactgaagaagagattgaggctattatgggattgattgagcgaagcaccaaccggcag

SEQ ID NO: 204807 - DNA, 1734 bp, Zea Mays
gtcggtgtcaggtccagcttctggagccttcgcgtttagcgtggaaccgcaagccagccaagcaacttgcgccactcgcctcgcctcgcctcgcctcgcccctgtttgtttgcttctggccggaccccttccccttctccggtgcacgccactctgcaacccccctcctctcgagcagagcagtcgagcagagcggcagcctcggcgcgcgccggcgccagccgacatgactgccggtcagtgcggcaacatccaggaccaggaggcagctcctggcgccgacctctacgccgtgctcgggctcaacagggagtgcaccgacgccgagctcagggtcgcgtaccggaggctcgccatgatatggcatccggacaggtgctcggcgtccggcagctcggcgcgcgtggaggaggccaaggagcggttccaggagatccagggcgcctactccgtgctctccgactccaacaagcggctcctctacgacgtcggcgtctacgacagcgaggacgacgacgctgacgtaactactcgaccgaactcaatcgcatgcatgtgccctcagtatcgtattttccggcccaaccggtgttcttcaggggtttggttcgcgggggaaattcgattcgatttgctttgctgacagtctctttcttctctgatcgtgcatgcaacatgcatcatccataccataccttaccatccgcagctgtcggggatgggcgacttcctcggagagatggccgacatgatgagccaggccacgccaacgtccatccgtcaacgtgcaggagagcttcgaggagctgcagcagctgttcgtggacatgttccaggacgacctggacggcgccgggttcttcggcgggcttccgacgagccgcagtgcccagggtcctagcagcacctcgttgccaccgtcgacgtcgccattgcggccgacgcctcctgcaagaagtaagggtgcgcaaacaccgtcgtcgtttaacggcgctgggaggcggggttcgacggcgaagcggccgaggaccggttgggctggcctggaaccggatctgggcctctctggattctgtttcatggtgagcaagtcgaaggagaggccggcggcatgggcgtgcgacggcggtgacgagaggagcggcagcaagcagaggctgtcaacgagccgcgacgtctccggctccggtggtgggatgtcgcgctcgcgcggcagagccaaagcagtagaaacttgtgggcagtgaacggcctctagtcttgaatcttgattagagcaccgtttattcacttactggctcgcgtcagtcgtagtagctcgaggcacgttgaaaaggagagagaaaagatctgtttcattcttcaatctattccaagctagccataaatagccaatctcttgctgcattgtttcgatgaatttttatttgggagaaattgagagtggttggtagtaaactagtaacaactttacgaagagatgcggccatcgtgccgaattaattgggcggaggtacggtacggataaatagcgggtcgtgtcgtattcgtggatcaaagtctaagcttaaacacggactaattagtttttaaacggtcatgtcgggctattatatcgtatcgtgctaaatctaaggcctgacttgtaacagagttcaaaaataacatgttttttcttgtttatttttctatttttatagcataactcgaaaatagcatgaaagtgatggtcga

SEQ ID NO: 204808 - DNA, 1544 bp, Zea Mays
ccagcttctggagccttcgcgtttagcgtggaaccgcaagccagccaagcaacttgcgccactcgcctcgcctcgcctcgcctcgcccctgtttgtttgcttctggccggaccccttccccttctccggtgcacgccactctgcaacccccctcctctcgagcagagcagtcgagcagagcggcagcctcggcgcgcgccggcgccagccgacatgactgccggtcagtgcggcaacatccaggaccaggaggcagctcctggcgccgacctctacgccgtgctcgggctcaacagggagtgcaccgacgccgagctcagggtcgcgtaccggaggctcgccatgatatggcatccggacaggtgctcggcgtccggcagctcggcgcgcgtggaggaggccaaggagcggttccaggagatccagggcgcctactccgtgctctccgactccaacaagcggctcctctacgacgtcggcgtctacgacagcgaggacgacgacgctgacgtaactactcgaccgaactcaatcgcatctgtcggggatgggcgacttcctcggagagatggccgacatgatgagccaggccacgccaacggagagcttcgaggagctgcagcagctgttcgtggacatgttccaggacgacctggacggcgccgggttcttcggcgggcttccgacgagccgcagtgcccagggtcctagcagcacctcgttgccaccgtcgacgtcgccattgcggccgacgcctcctgcaagaagtaagggtgcgcaaacaccgtcgtcgtttaacggcgctgggaggcggggttcgacggcgaagcggccgaggaccggttgggctggcctggaaccggatctgggcctctctggattctgtttcatggtgagcaagtcgaaggagaggccggcggcatgggcgtgcgacggcggtgacgagaggagcggcagcaagcagaggctgtcaacgagccgcgacgtctccggctccggtggtgggatgtcgcgctcgcgcggcagagccaaagcagtagaaacttgtgggcagtgaacggcctctagtcttgaatcttgattagagcaccgtttattcacttactggctcgcgtcagtcgtagtagctcgaggcacgttgaaaaggagagagaaaagatctgtttcattcttcaatctattccaagctagccataaatagccaatctcttgctgcattgtttcgatgaatttttatttgggagaaattgagagtggttggtagtaaactagtaacaactttacgaagagatgcggccatcgtgccgaattaattgggcggaggtacggtacggataaatagcgggtcgtgtcgtattcgtggatcaaagtctaagcttaaacacggactaattagtttttaaacggtcatgtcgggctattatatcgtatcgtgctaaatctaaggcctgacttgtaacagagttcaaaaataacatgttttttcttgtttatttttctatttttatagcataactcgaaaatagcatgaaagtgatggtcga

SEQ ID NO: 204809 - DNA, 1648 bp, Zea Mays
gtgcacgcactggtccatccttctagggactcgacgtggtcggcgatgaggagcacggtggttccgctctaccagccagcgcggcttgccgggctcattccggtgatgcagtcgtacgtcgacacactggcggcgaacatcgccgcctgcccggaccaggactgcgtccccttctgccagctctcgctccggatggccatcgacatcatcggcaggacggccttcggcatcgagttcggcctgtccaagaacgccgcaggcacaggcagcagcagcagcgagtccccaggcggcggcgagggcgagggcgacgtcagggaattcctcagggagtacaagcggtccatggagttcgtcaagatggacctgacgagctctctgtccaccatcctcggcctcttcctcccgtgcgtccagacgccgtgcaagcgcctgctgcggcgggtgcccggcacggcggactacaagatggaccagaacgagcgccgcctctgctcccgcatcgacgccatcatagccggccgccggcgggaccgggccacgcgccggcgttgcggccccggcgccgcccccgcccccgccccgctggacttcatcgcggcgctgctggatgcgatggagagcgggcggcggcggcggcggcggtgcaggtgccaacaaggacttcgcgctggcggacaggcacgtgcgcgcgctggcgtacgagcacctcatcgccggcaccaagaccacggcgttcacgctgtcgtcggtggtgtacctggtctcgtgccacccgctcgtggaggccaagctgctgcgggagttggacggcttcgcgccgcgccgcgggcgcgggcgcgcgccggacgccgacgagctccagagcgggttcccctacctcgaccaggtcatcaaggaggccatgcggttttacgtcgtctcgccgctcatcgccaggcagacctccgagcgcgtggagatcgggggctacgttctccccaagggcgcgtacgtttggctggcgccgggtgtgctggcccgggacgcggcgcagttcccggacccggaggagttccggccggagcggttcgcgccggaggcggaggaggagcgggcgcgccacccgtacgcgcacatccccttcggcgtcgggcccagggcgtgcatcgggcacaagttcgcgctgcaacaggtgaagcttgccgtggtggagctctaccgccggtacgtgttccgacactcgccgtccatggagtcgcccatccagttcgactttgacctcgtccttgccttccgccacggcgtcaagctcagggccatcaggaggggctgaggctgcctagcttggggtcacgtgtgtgtggaactgcatccgtgacgtgatggtgccacagcgtgtcttcttgtgtgtaatatagcactaataagcatatattgagtatgtatatatagaaatagatggtgaagaagattgcacgtattggacagctggcaaatgtgttgcagatactccctctgtttcgttttagttgtcgctggatagtgcaaaattgaactatccagcgacaactaaaaagaaacggagggagtacaacttcagtagaagaacgtacgcgtgtgttgtcctggactaaacatgaatctgacatatttctcgagattttgc

SEQ ID NO: 204810 - DNA, 803 bp, Zea Mays
gcccaaacctaatggcgctggcagcctctagccctctacacgccgtccctcctgctcctgctctccacacgccgccggagaaacgcggcggaacgcccagcacgggctgcacggcaggtcggcactcggtagcacatccctcccggtggtccggccctccgccgtcccagcacgacagcacttccggcgaccaggtcctaggctcccagcgtccggcggtcccagcagtccagcacgacagtgacagcacttcgggaccacggctccgcgcgttctgctgtgcaggttctagcgttctgctgtccacggctccgcgcgtccaggaggatgtgtattccaagttttggtattccaagtttactgccttgttgggagggaaaatcctttttggaggatctgccattgaatcagaaggaaactttgtgcaaccaacaattgtggaaattacacgttctgcaccagttgtgaaagaagaactctttggtcctgtcctttatgttatgaaatttcagaccttgaaggaagcaattgaaatcaataactctgttcctcaaggattgagcagttttatatttacaaagtggccagatattatttttaagtggctcgggccccatggtagtgattgtggtatagtgaatgtgaacatacctactaatggtgctgaaattggtggagcatttggtggagaaaaagcagctggtggtggacgagaagcagggagtgattcctggaagcagtacatgaggagggcgacttggagggaggtcctagaggtagtaagtcacttgtttactccatga

SEQ ID NO: 204811 - DNA, 619 bp, Zea Mays
cccatctaagcccaaacctaatggcgctggcagcctctagccctctacacgccgtccctcctgctcctgctctccacacgccgccggagaaacgcggcggaacgcccagcacgggctgcacggcaggttctagcgttctgctgtccacggctccgcgcgtccaggaggatgtgtattccaagttttgggagggaaaatcctttttggaggatctgccattgaatcagaaggaaactttgtgcaaccaacaattgtggaaattacacgttctgcaccagttgtgaaagaagaactctttggtcctgtcctttatgttatgaaatttcagaccttgaaggaagcaattgaaatcaataactctgttcctcaaggattgagcagttttatatttacaaagtggccagatattatttttaagtggctcgggccccatggtagtgattgtggtatagtgaatgtgaacatacctactaatggtgctgaaattggtggagcatttggtggagaaaaagcagctggtggtggacgagaagcagggagtgattcctggaagcagtacatgaggagggcgacttggagggaggtcctagaggtagtaagtcacttgtttactccatga

SEQ ID NO: 204812 - DNA, 671 bp, Zea Mays
cccatctaagcccaaacctaatggcgctggcagcctctagccctctacacgccgtccctcctgctcctgctctccacacgccgccggagaaacgcggcggaacgcccagcacgggctgcacggcaggttctgctgtccacggctccgcgcgtccaggaggatgtgtattccaagttttgggtttggtcaaaaccgtaaaaactacgaacatcagtaactaaattatttaggtgaagcatggagggaaaatcctttttggaggatctgccattgaatcagaaggaaactttgtgcaaccaacaattgtggaaattacacgttctgcaccagttgtgaaagaagaactctttggtcctgtcctttatgttatgaaatttcagaccttgaaggaagcaattgaaatcaataactctgttcctcaaggattgagcagttttatatttacaaagtggccagatattatttttaagtggctcgggccccatggtagtgattgtggtatagtgaatgtgaacatacctactaatggtgctgaaattggtggagcatttggtggagaaaaagcagctggtggtggacgagaagcagggagtgattcctggaagcagtacatgaggagggcgacttggagggaggtcctagaggtagtaagtcacttgtttactccatga

SEQ ID NO: 204813 - DNA, 1984 bp, Zea Mays
cggggcagtcacacgctggagaagggctgctgagggtgcgcaaccgcgcggacaacggctattgtgctgctactgtggtacaggtttcgtggggaaagaatgttattcttgtgggagggaaaagtgatcaaccttatgacaagatatcagtatggaccttcaatacagagagtgagctctggtctcatatggaagcgaagggtgacattccggtgtctcgaagtgggcatacggtgattagagccggtcctgttttaattctctttggaggtgaagatgccaaagggaagaaactacatgaccttcatatgtttgatctgaagtcattaacatggcttcctctgaactataagggtgctggaccttctccaagatcaaatcatgtagccgccctttacgatgatagagtcctattgatttttggaggtcagtcgaagtccaagaccctgaatgatattcatgctctagattttgaaacagtaagtattgtcgtgttactttattggttttgcttgttaacagattgctgaaaaatttgatatctttatactattagatggtatggtcaagggtcaaaacccatgggcatcatccatcacctcgagcaggttgctgcggagctctttgtggaactaaatggtatattgcaggaggtggaagcaagaaaaaacggcaccctgaaacatgggttttcgatgtccttgagtccagatggtctgtttgtgtagtgcctcctagttcctcaatcactacaaagaaaggtttcagcatggttccattgtactacagggacaagatcgtgcttgttgcttttggagggaacaaaaaggaaccatccgacaaggttgaagtactagtggtgctgcaaaacgagcactgtttcagctggcggtctgcgcccgaggtggaacccttactgtacgacgagtctcctccaggctcaagggaactcgccgaccatctcagcagctgcgctccaccgtatcctactagctccgcggcgaggagcggtctcgccgccacagcggagaactcctgcgggaggaaacccctcccggactcactgctacggacctcgaacctcgggggctcgtcgctccgcaggcagttccgtcaggaagaggagtgcagcagcctggcgcaaaagctgcagaaaccgatcgacgacgacaggtacaaggacgccgccgacgagtgctccgagcatcaaccaccctcggccacgaaccctaaaccgcggaacgacgcgcggcggtcgtccccggaggtcgtcgtcgacgcaaaagcgaggaggctgctgggcaggagctcgtcggacatgaacaaccaccaggacgcaagggtggccgccctggtcaggaggaacgtggcgctggaagagcagctgtcggcggcgctggcgagcaaggacgaggcggagaagaacctgtccctggtcatcgacagcaaggacggcctggagaagaggctggccgagaaggacagggaggtcgaggcgctgagggagaaggcgacggggttggagctggcgcaggaggaggccaacagcctctccaacaccgtccacgccgacaacgtgcggctggagcgcgaggtggcgttcctgaaggccgtcatggacgagacccagaaggaactgcactcgactcgcggagttcttgcaggagaacgcgcacgggcattccagcttcaggttgaagtctttcatctgaagcagcgcctgcagacgatggaagggaggtcacccgcagcaccaagaaagcctcagaatgcgtagggtagggtgcaggcgtgtagagtttttgagcgatagatctgctgtagattcattcagtgatgtaatgtaactgtagtaggtgccggagctactgtaatttgtaatattattcgacgcgatgcgatgcaaacgtatttcgcaactgggacgtacgtaattgtgtagaatgagttgcggtcgactatatatgcaagatgtcttttatct

SEQ ID NO: 204814 - DNA, 2631 bp, Zea Mays
gtccgggacaagtcaatctgccactggccgcgaggccgacccacgccacgctcctcctcagctacagtccctcctccaccgctgctgcgctcacgctcctcgacctcccacactcactgtcagtgtaaagctcacgccggaggccggagctagctgccccctgcccgtgagctagtcactcacagcacaggtgacagggtggtggtgggcggcgggattgcggttgcggcagtagggttcaggctcggataccagcctcctcctcctcctcctcctcctccgcctccgtttccagaagggggcgagcgctaccggggagctcgacagacgccgagccgcaatgcccaagatgttcgggttctctcggcgccggatgaagctgggcaggttgaagggccatctgcacgaccatttccatggccctcgaagcccgtctcggaccaccaagcgttccagcagtcatcacaacaggatccattggctacctcagtgagtgggcgcgccgacgacctcgcctggcgctgctcgtccgacactttcgatctcaatgggcgcgatttcgagagctccgagaactgggcggtcctgtccaccgagggtgacaagccagctcctcgtttcgatcatgcagcagccatggttgggagcaaaatggtggtgtttggtggcgactccggtcaatctttgctagatgatactaagatattgagcttagacaagcttacctgggattctgttgctcctaaagttcgaccaccattgaacgggcgttctctgaagctgaggccatgcagaggtcattgcctggtttcgtggggaaagaatgttattcttgtgggagggaaaagtgatcaaccttatgacaagatatcagtatggaccttcaatacagagagtgagctctggtctcatatggaagcgaagggtgacattccggtgtctcgaagtgggcatacggtgattagagccggtcctgttttaattctctttggaggtgaagatgccaaagggaagaaactacatgaccttcatatgtttgatctgaagtcattaacatggcttcctctgaactataagggtgctggaccttctccaagatcaaatcatgtagccgccctttacgatgatagagtcctattgatttttggaggtcagtcgaagtccaagaccctgaatgatattcatgctctagattttgaaacaatggtatggtcaagggtcaaaacccatgggcatcatccatcacctcgagcaggttgctgcggagctctttgtggaactaaatggtatattgcaggaggtggaagcaagaaaaaacggcaccctgaaacatgggttttcgatgtccttgagtccagatggtctgtttgtgtagtgcctcctagttcctcaatcactacaaagaaaggtttcagcatggttccattgtactacagggacaagatcgtgcttgttgcttttggagggaacaaaaaggaaccatccgacaaggttgaagtactagtggtgctgcaaaacgagcactgtttcagctggcggtctgcgcccgaggtggaacccttactgtacgacgagtctcctccaggctcaagggaactcgccgaccatctcagcagctgcgctccaccgtatcctactagctccgcggcgaggagcggtctcgccgccacagcggagaactcctgcgggaggaaacccctcccggactcactgctacggacctcgaacctcgggggctcgtcgctccgcaggcagttccgtcaggaagaggagtgcagcagcctggcgcaaaagctgcagaaaccgatcgacgacgacaggtacaaggacgccgccgacgagtgctccgagcatcaaccaccctcggccacgaaccctaaaccgcggaacgacgcgcggcggtcgtccccggaggtcgtcgtcgacgcaaaagcgaggaggctgctgggcaggagctcgtcggacatgaacaaccaccaggacgcaagggtggccgccctggtcaggaggaacgtggcgctggaagagcagctgtcggcggcgctggcgagcaaggacgaggcggagaagaacctgtccctggtcatcgacagcaaggacggcctggagaagaggctggccgagaaggacagggaggtcgaggcgctgagggagaaggcgacggggttggagctggcgcaggaggaggccaacagcctctccaacaccgtccacgccgacaacgtgcggctggagcgcgaggtggcgttcctgaaggccgtcatggacgagacccagaaggaactgcactcgactcgcggagttcttgcaggagaacgcgcacgggcattccagcttcaggttgaagtctttcatctgaagcagcgcctgcagacgatggaagggaggtcacccgcagcaccaagaaagcctcagaatgcgtagggtagggtgcaggcgtgtagagtttttgagcgatagatctgctgtagattcattcagtgatgtaatgtaactgtagtaggtgccggagctactgtaatttgtaatattattcgacgcgatgcgatgcaaacgtatttcgcaactgggacgtacgtaattgtgtagaatgagttgcggtcgactatatatgcaagatgtcttttatct

SEQ ID NO: 204815 - DNA, 2349 bp, Zea Mays
agataatttatgtttagtatttatttatcggtcctaacattccctagtttaactattgttcgtatcagatctatccatgtagctaaacacaccttgacaaggccaacccttttaattccatacctccacacgttaaatttatggtctataatacctgtgtgaattctttagtctgattctgttgcattttgaacagtaattttgtatgctgaagttgacgtatgattaggctcattctctattcggtgctgttccttgcttttcgttgaagttaattacttctgtagtgtttgtttggtgtaagtagaagtttgaattataatgtagtgttgtaggaccatgtgcttactttcttttttccaaatctgaccttggacattattttgttatttataatcaattttgtgatcaagctaattattattatcattcaggcctactgctgctacaggcaaaacaaactgcatgaggctcttgagcttttaagaggccaagaagaaacttcagctgttctccagctggaatcccagatcttttaccgactaggaagaatgaatgattgcatgagtagctatgagaagcttaaaaaatttaaaattgactcaatggatctgaagataaatatcattgctgctctagttgctgctggaagggcttctgaggtacaggcagctatgaaggcgcttaaggttgatcttaccacgagagcactcagggatactcgtagttttgagctcgcatacaattctgcttgctccttgatagaaaacaagaagtactctgaagccaaggagcaattggacttggctaaaagaattgggaaagaagagcttatggtggaagactacggcgaggcggatattgaatatgaattagctcctgtttctgctcagcttgcttatgtgcagcagctacaaggacaatctcaagaagctatgcaaacatatgttaatatgataaatgggcagtcagctgatttatcatcacttgctgtggcaacaacaaatcttatttcaataaaagaaagaagctctgtattctgcacgtgttcttttactgctccatgcaaataaaactgaacaggcacatgagttggtcagggggctgcttggtatgtttccagatagtgtattccctgttttacttcaagccgctgttcatgttaaagaaaagaagattcacaaagctgaagatgttcttagccagtacgctgagaagcgtcctgagaattctaaagggctcctccttgcacttgcccagattgctgctaatgccaaccattttcagcttgctgctgactcactatccagaatacctgacattcagcacatgcctgcaacagttgctacattagtggcccttaaagagcgcctaggtgactccaatgctgcagcttctgtacttgattctgctatcaactggtggaagaattccatgaccgaggataacaaattagatatattaacacgggaggctgctgcatttaagctcagccatggacgtgatgaagaggcttgtttgttgtatgaggaacttgtgaagagccatggaagcatagaagctttggctgggttagtaatgacttcagcgcgcactaacttggagaaggcagaacaatacgagaagaaactgaagccattgccaggcctcaaaggagttaatgttgagagcttggagaagacatctggtgcaaggcatgtggaagggccccaagacatgaaggtagatgttcccgaggaagtgaagaagcaaaaggcaaagaagaggaagcggaagcctagatacccgaaaggcttcgatccagcaaacccggggccgccaccagatcccgagagatggctgccaaggagagagcggtccagttaccgtccaaagaggaaggataagagggctcaggtcagaggtgctcaaggagctgtgtctagggaaacatcggccaccaatgtcggtgcttcctcaaaaggaagccaaaccaccaattcatcaaagacaccggcggtaaatgctgaacagccaaaaactagcaacaaatctaggaagaagaagtccaggcattagatgagaattttatgttacattaccgtacaaaagaatatgttcgtttatcttctggatgacttgcaattttggactggattgcattcaattgcagatttgctttgcttttacactaacgtttgaagcgactgagactattgattttttttttgccaagatgtgattgatgggttgctccagtaacattctattttttatgagttaatagttcttttgattccattcgagaatattggtaactcttattgctcctagcttccgcgttaccttgcccttgtgactgtttactct

SEQ ID NO: 204816 - DNA, 2060 bp, Zea Mays
ccaagtcccacgcctgcgtctcgtgatgccgccgaaatcgaaggcgtccgccgccgcggagccggtggccgtcgaggacctcttcgcctcgctccaccgccacatcgaggcagttctcaaggcagcgccgggagatgaggacgcggcctactgctgctacaggcaaaacaaactgcatgaggctcttgagcttttaagaggccaagaagaaacttcagctgttctccagctggaatcccagatcttttaccgactaggaagaatgaatgattgcatgagtagctatgagaagcttaaaaaatttaaaattgactcaatggatctgaagataaatatcattgctgctctagttgctgctggaagggcttctgaggtacaggcagctatgaaggcgcttaaggttgatcttaccacgagagcactcagggatactcgtagttttgagctcgcatacaattctgcttgctccttgatagaaaacaagaagtactctgaagccaaggagcaattggacttggctaaaagaattgggaaagaagagcttatggtggaagactacggcgaggcggatattgaatatgaattagctcctgtttctgctcagcttgcttatgtgcagcagctacaaggacaatctcaagaagctatgcaaacatatgttaatatgataaatgggcagtcagctgatttatcatcacttgctgtggcaacaacaaatcttatttcaataaaagaaagaagctctgtattctgcacgtgttcttttactgctccatgcaaataaaactgaacaggcacatgagttggtcagggggctgcttggtatgtttccagatagtgtattccctgttttacttcaagccgctgttcatgttaaagaaaagaagattcacaaagctgaagatgttcttagccagtacgctgagaagcgtcctgagaattctaaagggctcctccttgcacttgcccagattgctgctaatgccaaccattttcagcttgctgctgactcactatccagaatacctgacattcagcacatgcctgcaacagttgctacattagtggcccttaaagagcgcctaggtgactccaatgctgcagcttctgtacttgattctgctatcaactggtggaagaattccatgaccgaggataacaaattagatatattaacacgggaggctgctgcatttaagctcagccatggacgtgatgaagaggcttgtttgttgtatgaggaacttgtgaagagccatggaagcatagaagctttggctgggttagtaatgacttcagcgcgcactaacttggagaaggcagaacaatacgagaagaaactgaagccattgccaggcctcaaaggagttaatgttgagagcttggagaagacatctggtgcaaggcatgtggaagggccccaagacatgaaggtagatgttcccgaggaagtgaagaagcaaaaggcaaagaagaggaagcggaagcctagatacccgaaaggcttcgatccagcaaacccggggccgccaccagatcccgagagatggctgccaaggagagagcggtccagttaccgtccaaagaggaaggataagagggctcaggtcagaggtgctcaaggagctgtgtctagggaaacatcggccaccaatgtcggtgcttcctcaaaaggaagccaaaccaccaattcatcaaagacaccggcggtaaatgctgaacagccaaaaactagcaacaaatctaggaagaagaagtccaggcattagatgagaattttatgttacattaccgtacaaaagaatatgttcgtttatcttctggatgacttgcaattttggactggattgcattcaattgcagatttgctttgcttttacactaacgtttgaagcgactgagactattgattttttttttgccaagatgtgattgatgggttgctccagtaacattctattttttatgagttaatagttcttttgattccattcgagaatattggtaactcttattgctcctagcttccgcgttaccttgcccttgtgactgtttactct

SEQ ID NO: 204817 - DNA, 2103 bp, Zea Mays
cgcgtgctgggtgctgctctggtactctcttctctctccctgctgacccaagtcccacgcctgcgtctcgtgatgccgccgaaatcgaaggcgtccgccgccgcggagccggtggccgtcgaggacctcttcgcctcgctccaccgccacatcgagttctcaaggcagcgccgggagatgaggacgcggcctactgctgctacaggcaaaacaaactgcatgaggctcttgagcttttaagaggccaagaagaaacttcagctgttctccagctggaatcccagatcttttaccgactaggaagaatgaatgattgcatgagtagctatgagaagcttaaaaaatttaaaattgactcaatggatctgaagataaatatcattgctgctctagttgctgctggaagggcttctgaggtacaggcagctatgaaggcgcttaaggttgatcttaccacgagagcactcagggatactcgtagttttgagctcgcatacaattctgcttgctccttgatagaaaacaagaagtactctgaagccaaggagcaattggacttggctaaaagaattgggaaagaagagcttatggtggaagactacggcgaggcggatattgaatatgaattagctcctgtttctgctcagcttgcttatgtgcagcagctacaaggacaatctcaagaagctatgcaaacatatgttaatatgataaatgggcagtcagctgatttatcatcacttgctgtggcaacaacaaatcttatttcaataaaagaaagaagctctgtattctgcacgtgttcttttactgctccatgcaaataaaactgaacaggcacatgagttggtcagggggctgcttggtatgtttccagatagtgtattccctgttttacttcaagccgctgttcatgttaaagaaaagaagattcacaaagctgaagatgttcttagccagtacgctgagaagcgtcctgagaattctaaagggctcctccttgcacttgcccagattgctgctaatgccaaccattttcagcttgctgctgactcactatccagaatacctgacattcagcacatgcctgcaacagttgctacattagtggcccttaaagagcgcctaggtgactccaatgctgcagcttctgtacttgattctgctatcaactggtggaagaattccatgaccgaggataacaaattagatatattaacacgggaggctgctgcatttaagctcagccatggacgtgatgaagaggcttgtttgttgtatgaggaacttgtgaagagccatggaagcatagaagctttggctgggttagtaatgacttcagcgcgcactaacttggagaaggcagaacaatacgagaagaaactgaagccattgccaggcctcaaaggagttaatgttgagagcttggagaagacatctggtgcaaggcatgtggaagggccccaagacatgaaggtagatgttcccgaggaagtgaagaagcaaaaggcaaagaagaggaagcggaagcctagatacccgaaaggcttcgatccagcaaacccggggccgccaccagatcccgagagatggctgccaaggagagagcggtccagttaccgtccaaagaggaaggataagagggctcaggtcagaggtgctcaaggagctgtgtctagggaaacatcggccaccaatgtcggtgcttcctcaaaaggaagccaaaccaccaattcatcaaagacaccggcggtaaatgctgaacagccaaaaactagcaacaaatctaggaagaagaagtccaggcattagatgagaattttatgttacattaccgtacaaaagaatatgttcgtttatcttctggatgacttgcaattttggactggattgcattcaattgcagatttgctttgcttttacactaacgtttgaagcgactgagactattgattttttttttgccaagatgtgattgatgggttgctccagtaacattctattttttatgagttaatagttcttttgattccattcgagaatattggtaactcttattgctcctagcttccgcgttaccttgcccttgtgactgtttactct

SEQ ID NO: 204818 - DNA, 2278 bp, Zea Mays
cgaacctattttcttgcagcgcgtgctgggtgctgctctggtactctcttctctctccctgctgacccaagtcccacgcctgcgtctcgtgatgccgccgaaatcgaaggcgtccgccgccgcggagccggtggccgtcgaggacctcttcgcctcgctccaccgccacatcgaggcaggtgctttcaaacaggccgccaaggtcgccgaccaagttctcaaggcagcgccgggagatgaggacgcggcctactgctgctacaggcaaaacaaactgcatgaggctcttgagcttttaagaggccaagaagaaacttcagctgttctccagctggaatcccagatcttttaccgactaggaagaatgaatgattgcatgagtagctatgagaagcttaaaaaatttaaaattgactcaatggatctgaagataaatatcattgctgctctagttgctgctggaagggcttctgaggtacaggcagctatgaaggcgcttaaggttgatcttaccacgagagcactcagggatactcgtagttttgagctcgcatacaattctgcttgctccttgatagaaaacaagaagtactctgaagccaaggagcaattggacttggctaaaagaattgggaaagaagagcttatggtggaagactacggcgaggcggatattgaatatgaattagctcctgtttctgctcagcttgcttatgtgcagcagctacaaggacaatctcaagaagctatgcaaacatatgttaatatgataaatgggcagtcagctgatttatcatcacttgctgtggcaacaacaaatcttatttcaataaaaggtacaaaagataccgcagatagcttgaagaagctcgatcggcttattggaacaactacagctccaaaccagttgcatcttgttgaaaaccttgactacaagttatccccatggcagaaagaagctctgtattctgcacgtgttcttttactgctccatgcaaataaaactgaacaggcacatgagttggtcagggggctgcttggtatgtttccagatagtgtattccctgttttacttcaagccgctgttcatgttaaagaaaagaagattcacaaagctgaagatgttcttagccagtacgctgagaagcgtcctgagaattctaaagggctcctccttgcacttgcccagattgctgctaatgccaaccattttcagcttgctgctgactcactatccagaatacctgacattcagcacatgcctgcaacagttgctacattagtggcccttaaagagcgcctaggtgactccaatgctgcagcttctgtacttgattctgctatcaactggtggaagaattccatgaccgaggataacaaattagatatattaacacgggaggctgctgcatttaagctcagccatggacgtgatgaagaggcttgtttgttgtatgaggaacttgtgaagagccatggaagcatagaagctttggctgggttagtaatgacttcagcgcgcactaacttggagaaggcagaacaatacgagaagaaactgaagccattgccaggcctcaaaggagttaatgttgagagcttggagaagacatctggtgcaaggcatgtggaagggccccaagacatgaaggtagatgttcccgaggaagtgaagaagcaaaaggcaaagaagaggaagcggaagcctagatacccgaaaggcttcgatccagcaaacccggggccgccaccagatcccgagagatggctgccaaggagagagcggtccagttaccgtccaaagaggaaggataagagggctcaggtcagaggtgctcaaggagctgtgtctagggaaacatcggccaccaatgtcggtgcttcctcaaaaggaagccaaaccaccaattcatcaaagacaccggcggtaaatgctgaacagccaaaaactagcaacaaatctaggaagaagaagtccaggcattagatgagaattttatgttacattaccgtacaaaagaatatgttcgtttatcttctggatgacttgcaattttggactggattgcattcaattgcagatttgctttgcttttacactaacgtttgaagcgactgagactattgattttttttttgccaagatgtgattgatgggttgctccagtaacattctattttttatgagttaatagttcttttgattccattcgagaatattggtaactcttattgctcctagcttccgcgttaccttgcccttgtgactgtttactct

SEQ ID NO: 204819 - DNA, 2652 bp, Zea Mays
aggcgtacgttaattttcatcagccgcgcgctgtagtagaacagcatgtggcggctgaagatcggcgagggcgggccgtggctcaagagcggcaacgggcacattggaagggagacgtgggagttcgacgaggatttcggatcggaagcagacagggaggccgtcgactccgcgcgggaggagttcagcaagaaccggctccggatgcgacacagctccgatctcttggcccgcatgcagatagcgaaggagaacggtttcagcctcgacctgcacaagacgagagacgacgacgggcggtctcctctgctggtggcgacgacaggctccagcacggtgtcggagacgctgcgaaaggcgctggactacttcgcggcgatacaggcgcacgacgggcactggccaggagacttcccagggccgctgttcaccacagcaaccatgatcacggttctgtacgtgacggggtcgttggacagcacgctgtcgtcggagcaccgcagggagatctgccgctacctgcacaaccgccagaacgcggacggggggtgggggctgcacgcggaaggcgaaagctccatgctcagcacagctctcaactacaccgctctcaggctgctcggcgagggcggagacggcggcggcgggcccggcatgtcgtcgtcgtccatgcttattagagcgaggaagtggatacgtgatcgtggtggcgccaccatgatacccatccttgggaaagtgtggctctcggtgcttggagttttcgaatggtcaggcgtaaaccccatcccaccagaactgtttcttttcccatcctgggttcctattcaaccaggacggctgtggagccacttcaggatggcgttcattcccatgtcctatttgtacggcaagaaatttgtcgggcccatcaccagattggtcgtgtcgctacgggaagagctgcatgtccacccctacgaaaagattgactggaaggcagctcgtaattcatgtgccaaggaagatgtgtatagtccacatacgtggctgcaggagtgtctatctcactgcctttacagcttcggcgaaccttttctcacccgttggccaatttcctacatgagaaagaaagccctacagcaagtcgctgaattcttgaaatacgaagacgagaattctcaatacatctgcattggtgctgcacagaaggcactgtccatgttgtgctgctggatcgaaaaatccaactcagatgcgttcaagcgacatttggccagagtcgctgatttcctatggatcggtgaagatggcatgaaagtgcgggtctgtgctggtcagctatgggatgttgctttcgcagtccaagcaatactagcatgtaacatcgcagaagaatacagaggcaccctcaagaaagcgcacgatttcataaaggcctcccagaaagtaccgccacatatctaagggagggtggggcttccaggttgcagatcaggggtggcaggtttcagattgcacagcagaagctctcaaggttttgttaatgctgtccagattttcatcagacattggaagcgatcagatggaaacatgccgcctatatgatgcagtgaatgtgttgttatccttacagaacccaaacggtggctatggaacttgggagctagctcgcacatatccatggatagagattttcaacatgacagagatatacgcagacatcatggtggagcatcagtacgtcgagtgtacctcatcagtcatgcaagcattagtattgtttcgggagaaggacccttggcatcgaaaagatgaaatagaccaatgcattaggggagctactgaattcatcgagaagttgcagaatgatgatggctcatggtttggatcttggggtatttgtttcacatatggcacatggtttgctattgagggtctatcagctgttgggcagagttatggtaacagcacttgtatccagaaggcctgcaagtttctcttagcaaagcagctaaagaatggtggatggggtgagagtcatctttcatctacaaccaaggcatacacaaatctggataaggagaagtcacacatagtgaacactgcgtgggcaatgttggcgctcatgaaagctggacagttccaggcggaaagagatcccactccacttcacaaagctgcacggcttatcatgagtatgcagctcagcaatggcgacttcccacaggaggaaatgatcggaagtttcttgaaaaatggccccttgtgttacatggcttatcgcaacatatttcctatatgggcgcttggagagtatcagaaattagtcctccagtgtgacctccaatggccaaccttctagcccaaaagcaagatacagttccatctgctggcagtgctactttgcataatttggtagctgtggtgccatcttgatttgtcgaaaagaattggaaggtttcatatgacttcaagtaaaacagaagtgcgaatagtacagcgtaatcatggtggtgtgaatatctgaagttagaacaaagatctacacccataatttgttgcattatttttgacacccacgttcttcaggtcttatgtacaggagtgtaaagcccaaaattggtagaaaaagaaatgaataataaaataaatagatatatttatgatagt

SEQ ID NO: 204820 - DNA, 1115 bp, Zea Mays
  misc_feature (1)..(2): n is a, c, g, or t
nntcaaactcacatagaagcaactcatgtccagcaccagctgggcataatggtattcctactgcaccgtgcaatttctggccaagcgggccaccttatcatggaccaccaatcaattatcctgatatgagtcggttgaatatttctgaatatcctaggggtattcataataaccaaggtttgcatgccaactaccatccaaaccatcctggttacaatgattatagctacagacctccaactcaacctaacatgcctagcaacatgcaaaatattggacactggggagccaacccgggatgttcacagccatcttcggaccctcaaggtcttgtaagatatatcttaggtgctttggaagttttgaagactgagaagattcctccaacagagcaatatatagcagattgtatatggtatggacatggtgatgctaatatgccaaattttgatgttaagaaggcacttcaagttgccatgcagcatcaagctgttgtcaagaaaaagttagggaaaatgtcattctttctgggaaaagatgaaaatctctggaaatgtgttaatataatggatgataacgcaaaatacccaaaagaaactctagatgctgttcatgctttcatgtcttctgctccaggctattctgagataaagagttctcaatctaggttggcagccgttgtcgtttaacataatagtggctgatgctactactgccactggtggaaaggcttagcatcggtacattatctgcttgtaccaattgaacatgttgaggttctggtcgttggtgcaagctgcgtccgcaaaagctaagttctgttgaggtttcctagcacaatgctctgcattttgccaagtttggggttaagttgttttacacacagtatatgttagctggagtgaaacagtaagtagccttagactgctaaattttagtgggagtcaatctgtcaactattgggcatgttgaaagaactctgggcagccctggctgtggctactcctatgggtgataattgtggtggtaagatgcttatgcaatcaagcataaagcggttcagagggactatcgtcttttgttcaggcagtataccgatgcttgatgctggtggt

SEQ ID NO: 204821 - DNA, 575 bp, Zea Mays
taggagtgtagctgatatgttgtcatgtatgattatgctgaatatctggcactaagaacctttgtgtataacccactcacagttctttttttcttccccaataagccaggttccaagtgaagaagaaacaattctttcgaaacttcattactattacactgtttggtgcagttggcaccttgatctcttttactctaatatcccttggcgctctaggactaatatcaaggcttaatatcggcgcacttgaactggaagactatcttgcacttggggcaatattctcggccacagactcggtttgcaccttgcagaactttgatcctggaaatatcagcggtgccaaattactgaacttcattggcagtttcctttatctgttcagctccagcaccattcttggagtagctataagttatatgctcttccacttctagctttgctaaagtttactgacatgtgtttttttttctgcagtctggacttcttagtgcttataccattaagaagttgtactttggcaggtttttacttgtaaagccctaaaattggtataataaaaaaaataaaataaa

SEQ ID NO: 204822 - DNA, 1813 bp, Zea Mays
accccgcgcggcgttgcgtgtgctctatctatccgccccgcgcgcttctccgccaaccaactccccggcgcctccctcctccaccagaccaccacccacaaacccttcttattgataccatccacagtcccagcccgcgccagcctctgcctctgccccccagactaccccctgcctgcaggctcctgcaactgcaatgtcggcgctcgggacgctctccggcggggccgccggtgtctccggcctcatccgcctccgccgtcgggtggcccccgcgctcgcggcgccgtcgcaccacgccgctgggacgttgaactgcgccgccttgcccgatgccgccccgctcgtctggggacgccagctccgcccgtcgctcctcctccccgccacactgctcccgtcgtcgtcgcagggcgccaggaggcacacgccacggcggcccgccgcagccgcaggggaggccaagtctgtgggtttcctggagaagtacccggccctggtcactggcttcttcttcttcatgtggtacttcctcaacgtcatattcaacatcctcaacaagaagatctacaactacttcccctatccatactttgtgtccttgatccatctagtagtgggtgtcgtatactgcctcatcagctggagtgtcggtctccccaagcgagcgcctatcaatggcacgctcctgaagcttctctttccagtcgccctgtgccatggtattggtcacatcactagcaatgtgtccttcgctgctgttgcagtctcatttgcccacactatcaaagctctggagcccttcttcagcgcagctgctactcagtttatccttggacagcaagttcccttctctctgtggctttctcttgcccctgttgtcatcggtgtttcaatggcatcccttactgagctctcattcaactggactggcttcatcaatgccatgatatcaaacatctcattcacctacaggagcatttattccaagaaagccatgactgacatggatagcaccaacgtgtatgcttacatttcaataattgctctcattgtttgcattccgcctgcagtgatctttgaagggccccggctaatgcagcatggattcagtgatgccattgcaaaagtaggcttgacaaagtttgttagtgacctattcttggttggactgttctaccatctgtacaaccagattgctacgaacaccttggagcgagtggctcctctgacacatgctgtgggcaatgtgttgaagcgtgtgtttgtcattggcttctcaatcgttgtttttggcaacaaaattagcacacaaactggaattggcacgtccattgccatagctggtgttgctatgtactcttacattaaggctaagattgaagaggagaaaaggagcgcatgatgagctgactgctgtgaatattttaccttctgcgtctgggacacaacaacaacatcgtcgacaatcaagattatgccttgttttgtagtattcgtcttgagtcgctttgtttattaccaatctattatctggtgttgaacagcagcacattgcagaacagatgatcgtcgagtgaccttcatatacgcctgtaactctctctctctccctctctctcagctcagcagtttagatcgactatactcattggacatggacctatctatatatcttctttgtaaacaggacagagtcggactcctgctgcagtattatcaactcatctattttaaactctttaagttggatttattttcaattttttttgtgcttcaataaattactagattttataagtgtacattatca

SEQ ID NO: 204823 - DNA, 1719 bp, Zea Mays
accccgcgcggcgttgcgtgtgctctatctatccgccccgcgcgcttctccgccaaccaactccccggcgcctccctcctccaccagaccaccacccacaaacccttcttattgataccatccacagtcccagcccgcgccagcctctgcctctgccccccagactaccccctgcctgcaggctcctgcaactgcaatgtcggcgctcgggacgctctccggcggggccgccggtgtctccggcctcatccgcctccgccgtcgggtggcccccgcgctcgcggcgccgtcgcaccacgccgctgggacgttgaactgcgccgccttgcccgatgccgccccgctcgtctggggacgccagctccgcccgtcgctcctcctccccgccacactgctcccgtcgtcgtcgcagggcgccaggaggcacacgccacggcggcccgccgcagccgcaggggaggccaagtctgtgggtttcctggagaagtacccggccctggtcactggcttcttcttcttcatgtggtacttcctcaacgtcatattcaacatcctcaacaagaagatctacaactacttcccctatccatactttgtgtccttgatccatctagtagtgggtgtcgtatactgcctcatcagctggagtgtcggtctccccaagcgagcgcctatcaatggcacgctcctgaagcttctctttccagtcgccctgtgccatggtattggtcacatcactagcaatgtgtccttcgctgctgttgcagtctcatttgcccacactatcaaagctctggagcccttcttcagcgcagctgctactcagtttatccttggacagcaagttcccttctctctgtggctttctcttgcccctgttgtcatcggtgtttcaatggcatcccttactgagctctcattcaactggactggcttcatcaatgccatgatatcaaacatctcattcacctacaggagcatttattccaagaaagccatgactgacatggatagcaccaacgtgtatgcttacatttcaataattgctctcattgtttgcattccgcctgcagtgatctttgaagggccccggctaatgcagcatggattcagtgatgccattgcaaaagtaggcttgacaaagtttgttagtgacctattcttggttggactgttctaccatctgtacaaccagattgctacgaacaccttggagcgagtggctcctctgacacatgctgtgggcaatgtgttgaagcgtgtgtttgtcattggcttctcaatcgttgtttttggcaacaaaattagcacacaaactggaattggcacgtccattgccatagctggtgttgctatgtactcttacattaaggctaagattgaagaggagaaaaggaaaaagagcgcatgatgagctgactgctgtgaatattttaccttctgcgtctgggacacaacaacaacatcgtcgacaatcaagattatgccttgttttgtagtattcgtcttgagtcgctttgtttattaccaatctattatctggtgttgaacagcagcacattgcagaacagatgatcgtcgagtgaccttcatatacgcctagtcggactcctgctgcagtattatcaactcatctattttaaactctttaagttggatttattttcaattttttttgtgcttcaataaattactagattttataagtgtacattatca

SEQ ID NO: 204824 - DNA, 1883 bp, Zea Mays
accacgaagagacaggatcccatcacaggctcacatagtcacaaggaagtccagtcggccatggggagaccgagagctaccaccaccgcagcctcttccaagccgaagccgaagccgaagcccaagcccaagcccaggtccagggccaagcctagggcgacgcccagccccgtctccctgctctccggcatctcctctccttacgcgtgccgcacgccgtcccctgctgccgccgacctcagcttcctctcgccctcctccccgcccgcggaacccggaaccaggaattcttcgcccctcgccgcccccactaccatgtccaccatcggagacctgaggagcctcgccgcgtcgcacctcgactccctgaagcgccgcttggacgcgctccacggcgactatgtccgcgaccttgaggcctcccactcccgcatctccaagcgcgtcaagatggagtcccatggctgcctgcagctagcagaggaagtggacaaggaacagcagaagatagccgacaagatcgccgagcgcgccgagctggtgaagacctcttacaagaagttcgtggctgaagtgcaggcgtccacatcccgtgtgtgcaaggtgactgtccctgagatgacgaagtccatggagagggctattgatggcttgcgcagtcgctacatctccgctataccatcagcttagctggtgctgttgtccacatcaattgaggtcacatgttgagtcttaaatcggcttcgcagcagggacttgcacatttgtacataatatcaccgttgcatgagtacatgagatagttcattgctacatctccatttccagatatcccgaaaagtcaataatagttccttcgatccttggaacttttttttttgcttcgtcgcatttcttgtgcatcccgtaagatgctactgtcgatgtacctttcacgctcagagcatctaatttttaatcatgtttgttctagcagtacgttagctatcgcctcaagcctgaatggtcagttgctgcatgacaattaacaaccaaaacccaggtcgtaaaaatgggtcgctcaagcgctgtcactcgccaggagaggtcacggcagcttctggcgtacctggcaggtgggccccagtacgcttgtacctattatgcccttacggtttaactccatgccgtctgttcttcttctctggacgccgagcactccttctcctcctctgtcggcggtcgtgggagacgtacacggcgattaggaggcacgtcgtccaccagtctcctcgcagggatgtcgaagagcacggaaatcgcagataaagcaatcatcttgatgcaggatcatgccaagcatatctatcgtatttgcaatgagaagctaatattgggtaaaggattgactgcatttgaggtcaaagaacttcgtgaagcacttgaattcgccgccgaaggattggaccaggactcccttttttgccaagaggaattggatgcaactgttaaggaggaacaattggagcatgacgagaaggtggcttcacagatgattgaaagcccacttcttctcctgattcggactgcttcctatcccttgaagagcacattgagaagttttggggcgttgattacaactcggaccagatgcctagctactccgactaggctcagagtttatggtgctgtgaaattctggatgtttgggtgtaatggtattttggatgtgtatgtgaactgtaattctggatgtgtggatgtaatggtgaactgactgaatggtgtcttgtgtaatggtattttggatgtctatgtgaactctagttctgggtttaatggtgaactgaaattcagtgttcattgttcagtataatttgttaactccactaattgtgttcggc

SEQ ID NO: 204825 - DNA, 1375 bp, Zea Mays
atttgattgtctttgctctctctctctctctgtctgtggtttatgttcaggtggcactgccagcagaagtgatccgttgacttcagctatgggcaacctgtgctgctgtgttcaagtcgaccagtcgactgtggccatcagggagcagtttggcaagtttgacagcgtgcttgagccaggatgccactgcatgccttggttcgccggcaagcgtgtagctgggcaactcacactcaggctgcagcaactggatgtgcgctgtgagacaaaaacaaaggacaatgttttcgtgaatgtggtggcatctattcagtaccgcgctctggctgacaaagcaagtgacgctttctacaaactgagcaacacaaggtcccagatccaagcctacgtctttgacgtgatcagagcaagcgttcccaagctccatttggacgatgctttcgagcagaaggacgagatcgcaagggcggtggaggaagagcttgagaaggccatgtcggcttatggctttgagatcgtgcagactctcatcgtggacatcgagccagacgagcatgtgaagcgcgcaatgaacgagatcaacgcagctgcgaggctcagggcggctgcaaacgagaaggcggaggcggagaagatcgtgcagatcaagcgcgcggagggggaggcagaagccaagtacctgtccgggctgggcattgcgcgccagcggcaggccatcgtggacgggctcagggacagcgtgctggggttctccgtcaacgtgccgggcaccaccgccaaggacgtcatggacatggtgctcatcacccagtacttcgacaccatgaaggagatcggcgcgtcgtccaaggcgtcctcggtgttcatcccgcatggccccggagcggtgcgcgacattgccacgcagatccgcgacggcctcctgcagggatcctctgtcgccaaacactaagctgcctgccgttgccgttgctgctgaagaacaccaccaccactattatatatataatataatgatgatcttggtaccagagtgatgcttgtctatattgttcatcactcatcgtcaccatctgctaggatggctatctttatgcttggggattggagaaaaccttatctaaccttttagggaaccggtaatatatataatgcagcatgagtttgcagtatgttcatcagaaccttttagagtctagatgcatgaatggcatcatagaatagaatacaagagttgcttccattccatcactgagttactttttcctcagcaccggttgctgctgcccgttgcaactgctagagatattaaatctgaactgatctttataaatttataataaatttatcttagcttaaaaaaatataaaactaa

SEQ ID NO: 204826 - DNA, 1368 bp, Zea Mays
cagcatctgtgaaagaatttacttgatggaggtttatgttcaggtggcactgccagcagaagtgatccgttgacttcagctatgggcaacctgtgctgctgtgttcaagtcgaccagtcgactgtggccatcagggagcagtttggcaagtttgacagcgtgcttgagccaggatgccactgcatgccttggttcgccggcaagcgtgtagctgggcaactcacactcaggctgcagcaactggatgtgcgctgtgagacaaaaacaaaggacaatgttttcgtgaatgtggtggcatctattcagtaccgcgctctggctgacaaagcaagtgacgctttctacaaactgagcaacacaaggtcccagatccaagcctacgtctttgacgtgatcagagcaagcgttcccaagctccatttggacgatgctttcgagcagaaggacgagatcgcaagggcggtggaggaagagcttgagaaggccatgtcggcttatggctttgagatcgtgcagactctcatcgtggacatcgagccagacgagcatgtgaagcgcgcaatgaacgagatcaacgcagctgcgaggctcagggcggctgcaaacgagaaggcggaggcggagaagatcgtgcagatcaagcgcgcggagggggaggcagaagccaagtacctgtccgggctgggcattgcgcgccagcggcaggccatcgtggacgggctcagggacagcgtgctggggttctccgtcaacgtgccgggcaccaccgccaaggacgtcatggacatggtgctcatcacccagtacttcgacaccatgaaggagatcggcgcgtcgtccaaggcgtcctcggtgttcatcccgcatggccccggagcggtgcgcgacattgccacgcagatccgcgacggcctcctgcagggatcctctgtcgccaaacactaagctgcctgccgttgccgttgctgctgaagaacaccaccaccactattatatatataatataatgatgatcttggtaccagagtgatgcttgtctatattgttcatcactcatcgtcaccatctgctaggatggctatctttatgcttggggattggagaaaaccttatctaaccttttagggaaccggtaatatatataatgcagcatgagtttgcagtatgttcatcagaaccttttagagtctagatgcatgaatggcatcatagaatagaatacaagagttgcttccattccatcactgagttactttttcctcagcaccggttgctgctgcccgttgcaactgctagagatattaaatctgaactgatctttataaatttataataaatttatcttagcttaaaaaaatataaaactaa

SEQ ID NO: 204827 - DNA, 529 bp, Zea Mays
tgtttataatagatacacttatggaacaacgagggcactcaaagaagagaaaattgctgctcgtagtgctatactaccgatgctccaagctgaagaggatgaaagatttgtcaaagagtggaagaagtatcttgaggaggaggcgaggattatgaaagatgttccagggtggaaggttggcgagagtgtgtacaattccgggaaatggatgcccccggccaccggtgagctccgccctgaggtgtggtaagggcctgttgtaggcattgagaatgcaatcatgtcatgagggcatgaataaggctatcagacatgggcatccttctttgttcactaaggatcagctgttcaaatacctgtatctattttactcttatgaaatctggctggttaataatatgaagccgacgctttgcctcatctatgctcgtgcattgatgtaacgtgtccttgtttgatattaagaaactactatggaatataagaaagaaaacagcctgcttcttgcatctccgtggcgtattttgtg

SEQ ID NO: 204828 - DNA, 2309 bp, Zea Mays
cgacgacggaaagaggatgatgcggggagtcggaggtccgctgctcaccatcggggatctactcagcgacctcgctgtcgacgacccactcgtcggcgtcggagatgcgtctgtcccatcatctccatcggcggcgcagcaagcggggaaggccaatccgtccgatctcagccggctctttgaggaacactatgacgatttgatgaaggctctacaagagaaggatccttcatggccctcactgatgctgaagctgtgcgcggcgctgaagactgcggataggctgatgagttgcgcggacacgaacgcggaacagctgctggagaaggtgaaggcactggagggcgtcctcgacaggagcggtcatgcggtggcagagattgtagaagctctccagaggtcaggcctagccaatgatggtcacggttccccgtcaaaatcggctagcaagtagacgttctggtctgctttttgttcgtcttctatcccatgcaaatctctgggtattgtgagtgagttgtatgtcgacctgtgcctccacggctttgcggcctgccttgttttttttttttacccctcaccgctcttggaatgcgcgtttgtgtttatcctgtcagaagtagcgggcgatactggatttgcggtgtacaagcttcttccttcttggatcattagcttggtttcttgctaagttgcaccaagtctgaaatcaactcaaaattctggagcagaaagacgctaaaaatgccagattgcgtacgctttgtgaaacgtgagaacttgaccgccttcaatgtttgaacgcagagcatcttccgaaccagtaaaaaaaagcggtttcatctcatttgtggacgagtttacatgaaacatttcgattcacataaagtctacagtctagcgtgccaggacgtctcgaatttcttccaaaatattccaaaatgggctatcagcatccgaattccgaaggcacgatgaatttgcacttcatatttgggagctggaactacagtccctcaccctgttcattcattcagaaaagtgcggtggtttctcgtgaacgagcaacccagaaaaagtacacctgtcgcgtaagcgtcctcaggcagcagctccccggtcgcggtctctgtctctctgaagggaaagctctgtttccccttcccggtgccggagtcggggaaggtcaccgcgggcgcgagccgatggacagcaacaacctcctggcggcgtggccggtcctggggccgggcgtcgccggcgccgtattcggcgcaggctggtggttttgggtcgacgccgtcgtctgcagcgccgccgccgtgccattcctccactacctcccagggttcttcgcctcgttcgccgcgctcatgttcaactgcgtcaaccgggaggacatcggcgatggctactactcaccgtacgacgactccgagtggagctctggctttttatttcgtacgtggtgtcgtttgtttcgctggccggggcagtgggtttcttggttcaagatgcgcttacggatacggggccatctgcgtggactggcagtgctggcatcctgcagtgcgtgtttgtgttagtgagtgggctgatctactggacgtgccactctgaagattgacttaagaagtataggtatatatggccaaggaggaggaggatggagactgcttttctcagaagcgattgcttttccgtagtacgtttctggaggcacctttggaccgtgctttccgaaacgggtggaataaagagccattttctagttgtttcaagagagatgtagataagctgtactactattttacacgtgtttatagtcgtgtatcatgttgcttaaaactactttgtgaggtgttgttttggagcaagaaacttataggggtgctaagtactcgctctgtttctttttagctgtcgccggatagttcaattttgcactatacagcgacaactaaaatgaaatgaatggagtagtcaggaaacatcgttacatttttccctgttggcgaatttctcgtgcaaggtttgacaactctagtctgctcctgtacctcccgaggaagtttggtgttgccaacattttgtagacgcctagtcatgttgtgtctggttggttggaggcctgccaggcaacaacacatcttggcccaatcggacgcctgggatggataggcagctttttgcagcctcccatccaaccgcctagtcatgttgtgtttgatgtttgggacctgtaatctctttgaagattgggcgtgtgactattaaggtgccatatcattcacatgacctgttcaagt

SEQ ID NO: 204829 - DNA, 2516 bp, Zea Mays
cttcagaccacacttgttgggctctatcagggttcattgaggcccataatcggttcgctgatacagaatgcagtgaggcccacgtccctctcgtctcgtacagacgacgacggaaagaggatgatgcggggagtcggaggtccgctgctcaccatcggggatctactcagcgacctcgctgtcgacgacccactcgtcggcgtcggagatgcgtctgtcccatcatctccatcggcggcgcagcaagcggggaaggccaatccgtccgatctcagccggctctttgaggcttctctggcaatcgtgtctggaagagaaggtagttgcatcgctgcagttttagtcacaagagagactttgctgctgcaattttagtcataagaggaacactatgacgatttgatgaaggctctacaagagaaggatccttcatggccctcactgatgctgaagctgtgcgcggcgctgaagactgcggataggctgatgagttgcgcggacacgaacgcggaacagctgctggagaaggtgaaggcactggagggcgtcctcgacaggagcggtcatgcggtggcagagattgtagaagctctccagaggtcaggcctagccaatgatggtcacggttccccgtcaaaatcggctagcaagtagacgttctggtctgctttttgttcgtcttctatcccatgcaaatctctgggtattgtgagtgagttgtatgtcgacctgtgcctccacggctttgcggcctgccttgttttttttttttacccctcaccgctcttggaatgcgcgtttgtgtttatcctgtcagaagtagcgggcgatactggatttgcggtgtacaagcttcttccttcttggatcattagcttggtttcttgctaagttgcaccaagtctgaaatcaactcaaaattctggagcagaaagacgctaaaaatgccagattgcgtacgctttgtgaaacgtgagaacttgaccgccttcaatgtttgaacgcagagcatcttccgaaccagtaaaaaaaagcggtttcatctcatttgtggacgagtttacatgaaacatttcgattcacataaagtctacagtctagcgtgccaggacgtctcgaatttcttccaaaatattccaaaatgggctatcagcatccgaattccgaaggcacgatgaatttgcacttcatatttgggagctggaactacagtccctcaccctgttcattcattcagaaaagtgcggtggtttctcgtgaacgagcaacccagaaaaagtacacctgtcgcgtaagcgtcctcaggcagcagctccccggtcgcggtctctgtctctctgaagggaaagctctgtttccccttcccggtgccggagtcggggaaggtcaccgcgggcgcgagccgatggacagcaacaacctcctggcggcgtggccggtcctggggccgggcgtcgccggcgccgtattcggcgcaggctggtggttttgggtcgacgccgtcgtctgcagcgccgccgccgtgccattcctccactacctcccagggttcttcgcctcgttcgccgcgctcatgttcaactgcgtcaaccgggaggacatcggcgatggctactactcaccgtacgacgactccgagtggagggtgaagctctggctttttatttcgtacgtggtgtcgtttgtttcgctggccggggcagtgggtttcttggttcaagatgcgcttacggatacggggccatctgcgtggactggcagtgctggcatcctgcagtgcgtgtttgtgttagtgagtgggctgatctactggacgtgccactctgaagattgacttaagaagtataggtatatatggccaaggaggaggaggatggagactgcttttctcagaagcgattgcttttccgtagtacgtttctggaggcacctttggaccgtgctttccgaaacgggtggaataaagagccattttctagttgtttcaagagagatgtagataagctgtactactattttacacgtgtttatagtcgtgtatcatgttgcttaaaactactttgtgaggtgttgttttggagcaagaaacttataggggtgctaagtactcgctctgtttctttttagctgtcgccggatagttcaattttgcactatacagcgacaactaaaatgaaatgaatggagtagtcaggaaacatcgttacatttttccctgttggcgaatttctcgtgcaaggtttgacaactctagtctgctcctgtacctcccgaggaagtttggtgttgccaacattttgtagacgcctagtcatgttgtgtctggttggttggaggcctgccaggcaacaacacatcttggcccaatcggacgcctgggatggataggcagctttttgcagcctcccatccaaccgcctagtcatgttgtgtttgatgtttgggacctgtaatctctttgaagattgggcgtgtgactattaaggtgccatatcattcacatgacctgttcaagt

SEQ ID NO: 204830 - DNA, 3398 bp, Zea Mays
cttagccggagccagaccttctcttcagaccacacttgttgggctctatcagggttcattgaggcccataatcggttcgctgatacagaatgcagtgaggcccacgtccctctcgtctcgtacagacgacgacggaaagaggatgatgcggggagtcggaggtccgctgctcaccatcggggatctactcagcgacctcgctgtcgacgacccactcgtcggcgtcggagatgcgtctgtcccatcatctccatcggcggcgcagcaagcggggaaggccaatccgtccgatctcagccggctctttgagtttttgcagatcccaaaatgctgctggatttcagtaccactgatcttcaacctgagcgggttctggagcgtcgtctggtgaagaaaggctctaaggctgtcccacaggtgctggtgaaatggactcaccttccagtggactcggcgacctgggaagactggtatgttctacaggccaggtttccttcgttcgttgcttgtggacaagcaaccgctgcaggggggaagctgtcgcggccggtgtgccggacgcgcctcaatgactgaagccgacgtgtctaagcctgggttagtggcctaagtatgccagatgtcatggagtctgtaatcagggcaccacctgtgggcccagtcgtcaatgcctatgtgcagagtatgtaataagcgagacttgggaacttgagagacaagaaagaaaaagaaacagaaacttgccgccggaacctttcctggcgagcacccacctctccctcgttcgtttgagtacgcacctcacgccatcggagatcctcggtggccacggggcacaacacgcatgcacggcagacggcgagcacacaactggcgaagggcagcgcctgcaacattctcaatgaaatgcccaaaagaacacagttcgctttgatttacgtagacgcaattttactgacctggctgttgcgaacttactacataaacgttcaatgtcttgccccaggcttctctggcaatcgtgtctggaagagaaggtagttgcatcgctgcagttttagtcacaagagagactttgctgctgcaattttagtcataagaggtacacttgcgacctgcgggaaaactgaatcggagttctagatttgtcgatgcagttttggtcatccgcgcctggtcaaaccacacccttggacatcatctcgattcccacccaactaaaaaaaagaatctgattgaatatgggtctgttaacgatgctaccaggaacactatgacgatttgatgaaggctctacaagagaaggatccttcatggccctcactgatgctgaagctgtgcgcggcgctgaagactgcggataggctgatgagttgcgcggacacgaacgcggaacagctgctggagaaggtgaaggcactggagggcgtcctcgacaggagcggtcatgcggtggcagagattgtagaagctctccagaggtcaggcctagccaatgatggtcacggttccccgtcaaaatcggctagcaagtagacgttctggtctgctttttgttcgtcttctatcccatgcaaatctctgggtattgtgagtgagttgtatgtcgacctgtgcctccacggctttgcggcctgccttgttttttttttttacccctcaccgctcttggaatgcgcgtttgtgtttatcctgtcagaagtagcgggcgatactggatttgcggtgtacaagcttcttccttcttggatcattagcttggtttcttgctaagttgcaccaagtctgaaatcaactcaaaattctggagcagaaagacgctaaaaatgccagattgcgtacgctttgtgaaacgtgagaacttgaccgccttcaatgtttgaacgcagagcatcttccgaaccagtaaaaaaaagcggtttcatctcatttgtggacgagtttacatgaaacatttcgattcacataaagtctacagtctagcgtgccaggacgtctcgaatttcttccaaaatattccaaaatgggctatcagcatccgaattccgaaggcacgatgaatttgcacttcatatttgggagctggaactacagtccctcaccctgttcattcattcagaaaagtgcggtggtttctcgtgaacgagcaacccagaaaaagtacacctgtcgcgtaagcgtcctcaggcagcagctccccggtcgcggtctctgtctctctgaagggaaagctctgtttccccttcccggtgccggagtcggggaaggtcaccgcgggcgcgagccgatggacagcaacaacctcctggcggcgtggccggtcctggggccgggcgtcgccggcgccgtattcggcgcaggctggtggttttgggtcgacgccgtcgtctgcagcgccgccgccgtgccattcctccactacctcccagggttcttcgcctcgttcgccgcgctcatgttcaactgcgtcaaccgggaggacatcggcgatggctactactcaccgtacgacgactccgagtggagggtgaagctctggctttttatttcgtacgtggtgtcgtttgtttcgctggccggggcagtgggtttcttggttcaagatgcgcttacggatacggggccatctgcgtggactggcagtgctggcatcctgcagtgcgtgtttgtgttagtgagtgggctgatctactggacgtgccactctgaagattgacttaagaagtataggtatatatggccaaggaggaggaggatggagactgcttttctcagaagcgattgcttttccgtagtacgtttctggaggcacctttggaccgtgctttccgaaacgggtggaataaagagccattttctagttgtttcaagagagatgtagataagctgtactactattttacacgtgtttatagtcgtgtatcatgttgcttaaaactactttgtgaggtgttgttttggagcaagaaacttataggggtgctaagtactcgctctgtttctttttagctgtcgccggatagttcaattttgcactatacagcgacaactaaaatgaaatgaatggagtagtcaggaaacatcgttacatttttccctgttggcgaatttctcgtgcaaggtttgacaactctagtctgctcctgtacctcccgaggaagtttggtgttgccaacattttgtagacgcctagtcatgttgtgtctggttggttggaggcctgccaggcaacaacacatcttggcccaatcggacgcctgggatggataggcagctttttgcagcctcccatccaaccgcctagtcatgttgtgtttgatgtttgggacctgtaatctctttgaagattgggcgtgtgactattaaggtgccatatcattcacatgacctgttcaagt

SEQ ID NO: 204831 - DNA, 2845 bp, Zea Mays
cttcattggtctcgtggatccagtcaagtcaagctatacaagatcagttgatccagtactgttttccttttaaacgtaaataaatttttttttataacacacctacattcgtttagttgttcgggaataaaattacaaacaccatctggtaggtaggtagtgacgaaaaccatacaagtgctgctaattaaagagcttctagcaaacctgtgtgcattaccaccgttggttctgcgattttcatgaacaaaccacctaccccaatccatatggattgagggggtttcaatccctagcaaatcaaaatcttctctaatccatatcaatcccctacaatatatatgaattgaaaataaccgaacaaaagccaaacggtgaaatggagcttctggacaagaatgtccttagccggagccagaccttctcttcagaccacacttgttgggctctatcagggttcattgaggcccataatcggttcgctgatacagaatgcagtgaggcccacgtccctctcgtctcgtacagacgacgacggaaagaggatgatgcggggagtcggaggtccgctgctcaccatcggggatctactcagcgacctcgctgtcgacgacccactcgtcggcgtcggagatgcgtctgtcccatcatctccatcggcggcgcagcaagcggggaaggccaatccgtccgatctcagccggctctttgaggaacactatgacgatttgatgaaggctctacaagagaaggatccttcatggccctcactgatgctgaagctgtgcgcggcgctgaagactgcggataggctgatgagttgcgcggacacgaacgcggaacagctgctggagaaggtgaaggcactggagggcgtcctcgacaggagcggtcatgcggtggcagagattgtagaagctctccagaggtcaggcctagccaatgatggtcacggttccccgtcaaaatcggctagcaagtagacgttctggtctgctttttgttcgtcttctatcccatgcaaatctctgggtattgtgagtgagttgtatgtcgacctgtgcctccacggctttgcggcctgccttgttttttttttttacccctcaccgctcttggaatgcgcgtttgtgtttatcctgtcagaagtagcgggcgatactggatttgcggtgtacaagcttcttccttcttggatcattagcttggtttcttgctaagttgcaccaagtctgaaatcaactcaaaattctggagcagaaagacgctaaaaatgccagattgcgtacgctttgtgaaacgtgagaacttgaccgccttcaatgtttgaacgcagagcatcttccgaaccagtaaaaaaaagcggtttcatctcatttgtggacgagtttacatgaaacatttcgattcacataaagtctacagtctagcgtgccaggacgtctcgaatttcttccaaaatattccaaaatgggctatcagcatccgaattccgaaggcacgatgaatttgcacttcatatttgggagctggaactacagtccctcaccctgttcattcattcagaaaagtgcggtggtttctcgtgaacgagcaacccagaaaaagtacacctgtcgcgtaagcgtcctcaggcagcagctccccggtcgcggtctctgtctctctgaagggaaagctctgtttccccttcccggtgccggagtcggggaaggtcaccgcgggcgcgagccgatggacagcaacaacctcctggcggcgtggccggtcctggggccgggcgtcgccggcgccgtattcggcgcaggctggtggttttgggtcgacgccgtcgtctgcagcgccgccgccgtgccattcctccactacctcccagggttcttcgcctcgttcgccgcgctcatgttcaactgcgtcaaccgggaggacatcggcgatggctactactcaccgtacgacgactccgagtggagggtgaagctctggctttttatttcgtacgtggtgtcgtttgtttcgctggccggggcagtgggtttcttggttcaagatgcgcttacggatacggggccatctgcgtggactggcagtgctggcatcctgcagtgcgtgtttgtgttagtgagtgggctgatctactggacgtgccactctgaagattgacttaagaagtataggtatatatggccaaggaggaggaggatggagactgcttttctcagaagcgattgcttttccgtagtacgtttctggaggcacctttggaccgtgctttccgaaacgggtggaataaagagccattttctagttgtttcaagagagatgtagataagctgtactactattttacacgtgtttatagtcgtgtatcatgttgcttaaaactactttgtgaggtgttgttttggagcaagaaacttataggggtgctaagtactcgctctgtttctttttagctgtcgccggatagttcaattttgcactatacagcgacaactaaaatgaaatgaatggagtagtcaggaaacatcgttacatttttccctgttggcgaatttctcgtgcaaggtttgacaactctagtctgctcctgtacctcccgaggaagtttggtgttgccaacattttgtagacgcctagtcatgttgtgtctggttggttggaggcctgccaggcaacaacacatcttggcccaatcggacgcctgggatggataggcagctttttgcagcctcccatccaaccgcctagtcatgttgtgtttgatgtttgggacctgtaatctctttgaagattgggcgtgtgactattaaggtgccatatcattcacatgacctgttcaagt

SEQ ID NO: 204832 - DNA, 2854 bp, Zea Mays
agccaacttagagtagactgcatacgaactccaaggctctctatgagagagagagaggtaggctaagtattaaatatacaacttatctcatgtgagagttattatataaatagatttttaggtgattatatatgacacgagaatattataaggcctgctatattattaaccatttctacttgctctcaagcatacaaagcgcacatggggtctcaccttagctcggtttgggcttgggggaacaataaattaattaataaaaaagaaaaaaaatgaaaggaagataggccaggccggagttgactacggccacggcccacgaggcatgatcggcccaacagagcgcacaggcaaggcaaaccgtcagcactcagtggagccctggcgggctggcctcccctcttcttcgcctgcacctgcacgcgcccccgacctcaccctctgctgacctcgctcccctcccgtagccgccggagccctcatcggtttatcctcccgctgccacctgcaacagccccgggcggagatccatcctaactctacgtgcaggtgaccccaagtcctcaagtgggtggcgcaaccatgcccaaggttaagaatccccacgttttcatggacatatcaatcggtggaggtagcgccgagaggatcacattcgagctatttgcaaatgtagttccaaagaccgcggagaacttcagagcactatgtgaaagaggccttggagcgtctacacagaaaccactctattataagggaacatatattcatcgcatagttaaagggtttgttgctcagggtggtgatttttcaagcggagatggaaaaggtggagagagcatttatggtggaaaatttccagatgaaaacttcaagctactgcacaatcagcctggtgtcctgtccatggcaaattctggaccaggcaccaatgggtcacagttttttattacattcaaggctctacctcatcttgatggcaaacatgtggtctttgggaaggtggtcagtggaatagctttgcttaaaaatcttgaagcagctggcagtgaaactggaaatccttcttgtcaagtgaaaattgtagactgtggtgaagtttccaacacaaattctcaagatctgctaaagggagagaaagaaaaaaaactaagaacagcagatggtaactccaatgctgaagggagagccaaattaaaaaaagcatctggtgattataagcaaagaaagaagagaaaacattattcatctgattcatatagctcagatacttcagactcgtcgtcctattcttcagatagtggctctgattcagaatcacagtcatcaatgaatactagctcgtccagtgatcataggcgtaagagaagaaagggatctaagaaggataagcgcaagctcacgaagaggaagggtaagcatacaaggagtaagagaaagagtagaggatccaaaaggcgtcctagacggagctatgggagttccagtgatgattcagtaagctcaaagacagataacagcagttctgacagtgaaaatggtggtcattataccaagcgttccttgccgaaagataaagagagtaccaaaatgacaaattcagaacaaggaagaacgtttccagatgtagacaaagtcaaacaaacagttactaccatcaaccgatcacaatcacatgatggaagtaaaccctcaaacaaagatgacaatggggctgatgacagatctggaaattacagttcaaaagataggaatgatccaggtgcaagctctaggatcagtcctatacagactgatgtaaatttaacgaaaccagtaaatgtatatggcaacattggtggtgataatgcagatgctggcatgtctataactggtacagaaaggcacctgccaagcaatgaacctgtgtccaccaatggtaaagatttagctgtgggttctgcagacaatgggcagcctcagcgaatcaggaaagggcgtggttttactcagaagtatgggtttgcacgccggtacaggacaccatctcccgagcgcccccctgttcgaccccgctacgatggagggagagaggataggtggaacaatttcaataggtatggaagaactggtccttatagtagacgctctccagtaaggagataccatggctcgccaagagccaatagcccatccaggtaccaaagaagaggacggagcaggtcacgcagcccggcgacgcgtcatgaccgtggagggtatcgccgccccagcccaaggcgcagccgcagccctgcagacccgagacgtgatgcgaacgataggcctcgatcaggtcacggtggaggcggtcctgaccaccgtggccacatcccccctgccaacaacaggtccaggtcgaagagccgggatcccttgagatccaggtctcctgatgctgccccagccaagagggagagctcgagatacaaccgcaggcgcagcagcagctcgaggtccagcagccctgatgctgatggaaacaaaggcttggtctcgtactgagatgtaacgccacaacgatttacatgcgccaagaaccatctttcttgctagtttagcgttatgtacgcttttgtaatggcttctaaacttgtttttttgatgtagctgtacatttggatgtcctgttagacgtgaaatgttttttacgtcagatatttataactacttctgagtcagtataacgcgaagagtgctatgcgttcttaggtcgaggcatgaatgttcgagtgtggttttgggtaaaactgaaacgtgttggtcatctctgttcaacagactttctgttgaaaacggctgaacatggtgatatacatgtacgcacacagctgtg

SEQ ID NO: 204833 - DNA, 2128 bp, Zea Mays
cacactgctatacacaatacaaatacaaacacacactcctgtcctttctactccaagtttcattccaaaccctcccccctcgctctcgacgcctcagctcctcccccttctctctcaactcctgctagctctctctcacacacactagccggcggcgctcctcaattttcacacttcctaaccacatcaggcgcacacctacgcggccataccctcctccaccgatcacttctcggcagccggcttctcgtcctgcatcccaggagagatcgagagaatggagctgttcccagcgcacccggacttgcagctgcatatcagccctcccccagccacgaaaccaacggagctagggttctggaaaagggctctagacaccaccccgacagcaactacaacggccgcggcggccaccacggccccctccctcgccttcgcgtcctcggcgccgacagccgtggggcaccacgcggcggccggcgcgcaccacaacgaccaccaccatcaggtgccgacgacgagctcccactcccacctggtgggcctcccgttcttgcaccacacccagcccatcctcctcccggagggccgcggcggcggcctccgccgggacctggcagccgcgaggcccatccggggcatccccgtgtacaacgcctcgcagccgctcctccacttcctgcagagccacacgcattgccacgacgcgatcgtcggcgcggccgggccgaggttgtcccccaaggccgcgctccggctcgcggcgaagcggggcgcgcgcgcgccccggatgcggtggacgacgtcgctgcacgcgcggttcgtccacgccgtcgagctgctcgggggccacgagagagctacgcccaagtcagttcttgagctaatggacgtgaaggatctgaccttggcccatgtcaagtcgcacttgcagatgtatcgcaccatcaagaccaccgaccacaagccagctaattctgcttcatcctacggtatgtacggtacgggcaagcagcagccgcgaaaccggtcatcgacatccccgaccccgacgacgacagcctgttcgacctcatcaccaccagcgccgggtctgatcagtcgtcgtcgtcggctcagcactctaaccctgacggcggcggcggcaacgagcatggctccagcatgtgcgctctgtggtgcagctcctcgacaagcatcagcagggggggctggttccatgacagaccaagagacgatgatgccgccactcccggtcccggcgacgacatcaaatccttcgaggacgtgcaatcacacagccttcttgacgatgtcgccgacctcaactcgtcgccgttccaggtagtagctgggatgtttggcagcgacaagaaaccgaacctcgacttcaccctaggacggatataatccgcactgtctatctacacctcgaccatcagctgagccaaccgagatcgatcgatcggccggccatggatacgaagctagatacaggctagagctagctgcactgcatacataggttgatctgcttctaagctgccatgtttatgatctgatggagcatgtgcgtgcggtatgcatgcatggtcgtagcgagggaacaatgaagaagaaccaaaacgcttgaagaaatgaaaaaagaaggcgcgctaggagtaaagaataggagatatggcaaccgtggattggatccaggaacaaattaaagctagcgcgcgcaaaattaaaggaggcgggggagacattggtgcgtgcgtgttagtagatatagacagctcgataggctttatccaaggcatgtggtgtacacatgcatgagggatcggatagagagatcgatcagaggtgcatgacgcatgaggcacctagttgtagctaggggccggttggctggccaagatttgacaaaaaaggtttgcttcatatatatcctttattatgttatatgcttatgccacacaaagtgtactgcaaagagagctaggtagctagcgcatattatatatatatatgtcatatatatgcctgcatgtattgtttggaccatggaagagtattattattcttgcgctctgttagctcccaatgcaaccgagaggcaataataagttcttgcccaggg

SEQ ID NO: 204834 - DNA, 1605 bp, Zea Mays
ttaacaaagccacggaaaaaccatccacgcacccaacagtcgacccaagctccaactccgactccgatcataccgatggcgtcagaaggggctcccacgccggcggcggagcgaattagggtggtcggcaagtgggccggcgccttggaggtggacctaggctcttggacggtgtcgatgctgcgggcggaggtggcgcggcgggttggggacggcgtggagcccgagtgtgttggcctcatcttcggcggccgcgtgctcaaggatgatccacccgcctcgttgcgggaggctggacttaaggccaacgccaaggtgctatcctccctcacctcccctgatcgcgctaaagaaatcgatgctcaggccgccaaagcgaaggctgaagaggagcacgctgcaaagcttgtcagactgtgggaagctgcaaaagcgttgtctcaaaggcacacggatggctcctaccttgcggaagaagactacaacttagatcttgaggatcaaagtggccaaaaagtgatgtttggatctgtagatgataaaaattatgtaaggctggagcttttggaaggagtggtggcataccataatggtcatgttgaaaaggcgcgtgaatctctcacttctgcccatgctaaatacctgcagctccaagtgccagacgaagctatatcaatgttaatggatatgggctatgaagcacggtctgcaaaaagggcattgaagatgactggctatgatattcaatcatcagtcgaactgttatgtgaggagcgtgaaaagaaacttcgtagaagagaggaggatcgagtgagacaaagagagattttgaaacaaatggcatatggtaaaactcccatgaacaaggcagttgacatgcagaagctgaaaggcttgactgctatcggatttgagaagtatcttgctgcagaagcactgcgcataaatgaaaatgatgctgacaaagcattagaccttttgacaaatcctgaacaaaactgtatcctacaaagtaaaattcaggcaaggagaagccgggcatcttgtgggtttggtgcaggatcctcgcgttccagggcagctgttgccagggctgctccagcaatcaacaattctcagactcttgataatgctcctccacatcctgctgatggagatgcccctccacatgctgccgatggaggtgctcctccacatgctgcagatggagatgctcctccaatgaacaatgaagaaattgcaaaccaagatgaaattatgattggtgaagtagctgtagatgatgaagatgaagacgcaaactctcatccagttccagccagggatgcgtcgatggaaagtgagcttgccaatgaactgaagggggatgccttggatgactacgatattgatgtcagtaacgaaggacaggctatcgcagagtacttgagcttactggaggctgctcctagcagttcttagattgcaaagatctacagtgctcgataggtatctccgactttagaaggataaaatacaggtggtttcaatcgatttgtacataaataatgctacccttatggattatatatatgatgcttagaaatttcttaacgttgtgtcgaa

SEQ ID NO: 204835 - DNA, 3379 bp, Zea Mays
cgacccgttttgggcccgtgggtttcattcacggtctcgcttgccccccgcgcgctccacgtgctcccacggtcgcgaccgctcctagcgcggcgcgcagcccaacgccaacgacgacgcacctaaaaataataaggactcaaaattccatccaaatccatccgcctcaccgcctgaggcctgagctcaatcgcacccaacccaatacatcccgtcgatccgcgtaggctttgctcctgatttgatagattctcagacctcgcgtcgtcggccgatctgccgcgccgtgttcctgccgccgtgtcctggccatgacggcggtggagctcaggatcgggccgctagagtgggcgatggatgacgagagcccaggtgtgggcgacgaggatggcaaggacgaggactgggctctcgatatggagaggaagggaaggggaaagcggaagaggtccgctcctcggagacgctcgggacccaagcggcgccgcgccgctgcggcgatggcgcccgcgcccgcgcgatcacagtcagagccgtgcccggggacagccgagccttcgccagaacatggcttcaatgctgctgctgcggcggcgggagttaaggaggaaaacggggtgaggaaggaggaaggggagaacgtggctccgagcaccagtggcagaggaggaggcggcgggaggaagccgggggctaggaggtcgtgccaccagtgcaagagggtcaagcgtctgaaggagatggtcaggtgccagtgctgtgacgagaggatctactgcgacctctgcatcaggaacaggtacgcgatgatgtcaccggatgctgttagagagcagtgccccttctgccgtggactctgcaattgtacgcgatgccttaacaaggatagggataagcagcttggacccgagaacttggttttgaggaaatgcaatagcaatgaatcatctaaaagggaaaagaggcccacttctgcaggtgtgatatcaccccaggctcatagtgcagcaccatgtactaaagaaattggactctcctttgtgactacaaataggatgaataatgtgtctgccatgtgggccaaagtggatacatcagatgtgagggctgaggaggttgaccctgaaacaaaacgcaaatacgcaagctacctattgcactacctgttgccttgtttgacacaactcaacaaggaccagatggaagaaagagaagcagaagccaaaattcgaggattgcaattgtcggaattgattgttgagaaagctgtctcctggaatgatgagagggtgttctgtaacaattgcaaaacgtcaatatttgatctgcatagaagctgctcaaactgctcgtacgagttgtgcatcagttgttgtaaggagctccgtggaaattttcttaagatcaattgtcaaaagggactggtacctgagcataagagtagaggaattgactatatgcatggtggtgattgtaagccacctaatctagaaaatgacagagaaacagataggttaattaagcttgaaatggaagcattgcggctgagcaaccagatagaaccttctgatatttccagtatagatatatgtgaatgctcatgttcagctaataatgtaagttcaaggaaagctgccaccagagagaactccacagataacaacatatactgtccaatatcagataatggtgggccagatgatctcaagcacttccaaaagcactgggtgaaaggagagcctgtaatagtgcaaggggtgctcagtgaaatgtctgatttgagatgggagcctgaaaaaatgtgggctgaagtacatgacgccaatactagttctgagatgaaaagtgtgaaaaccactgattgtatgtcttgttgtgaggttgagataagtgccaaggactttttcaatgggtattatcatggtcggatgtatcataatctttggcctgaaatgcttaaattgaaggattggcctacttcagaccattttgagaatattttgccttcccatggaaagacgtacatcaattctttgccttttcaaccatacacaaatttgaaatctggtttactaaatgtctctgcattgcttcctggtgacgtcttaaagcttgacatgggcccaaaatcatatatagcttatggctatgcagaggaactcattagaggagattctgttacaaagcttcattgtgatttgtctgatgcagttaatgttttaatgcatactgccaaagttgtgccttctgaagaacaaaaagaggggataagagatttgaaaataaggcatgcagaacaagataaaaaggaatgcttggggaattcatcaatagatggaaataaaacaagcatggagcatgctcatatatcatcagtttcctgcgaggatggtggaggtgcactatgggatatttttaggagggaggatgttggaaagctgaaagagtacctcacaaaacattccaaagaatttcgccatatgtactgttgtccagttgaaaagatatttaaccctgtacatgatgaaacattttatctgaccaacaaacacaagagaaagctcaaggaggagtatggaatcgagccatggacctttgtgcaaagacttggagatgcggttttcatacctgctgggtgtcctcatcaagtacggaatctaaagtcttgcaccaagatagctctggattttgtatcaccagagaacattcagcaatgtctcagcttaaccgaggatttccggagacttccagtgggccacagggcaaaagaagataaactagaggtgaagaagatgatcgtctatgccgttgagcatgctttggcgattctgaaagagccttgcacaccccgcgagtccgcctgaacaagctggcatcatatctgggtttctgctagtcaacgagggaaactagagaacatgatgcgatgttgtgcgacagtagacgtggggtagcgctagttgctttgcttgtcggcacaaataataatcttggaaatattactaataagggctcggttaggaagggattggaggagattaaattttttttttttattttaactgaatagaaagagatttgatgagatccctatacaatcgaaaaaggcctaaaatggtagattttgctgatggtgtgcatcactgaagagctgggcatgctgaaaaaaatagatgtcatactgtaaatctacaaaatgtggcttcgtttccaaaaggccttgcccctgttatctataactgtctacagtctatacgagtaacatatgctttcggcgttattattaccgaataccgtagaaactgcatcgtaatgcgaacaagaagaaatttgcctaaaaatctcttattcgccaatgcactacagcgcagtttttttg

SEQ ID NO: 204836 - DNA, 2879 bp, Zea Mays
cacgtgctcccacggtcgcgaccgctcctagcgcggcgcgcagcccaacgccaacgacgacgcacctaaaaataataaggactcaaaattccatccaaatccatccgcctcaccgcctgaggcctgagctcaatcgcacccaacccaatacatcccgtcgatccgcgtaggctttgctcctgatttgatagattctcagacctcgcgtcgtcggccgatctgccgcgccgtgttcctgccgccgtgtcctggccatgacggcggtggagctcaggatcgggccgctagagtgggcgatggatgacgagagcccaggtgtgggcgacgaggatggcaaggacgaggactgggctctcgatatggagaggaagggaaggggaaagcggaagaggtccgctcctcggagacgctcgggacccaagcggcgccgcgccgctgcggcgatggcgcccgcgcccgcgcgatcacagtcagagccgtgcccggggacagccgagccttcgccagaacatggcttcaatgctgctgctgcggcggcgggagttaaggaggaaaacggggtgaggaaggaggaaggggagaacgtggctccgagcaccagtggcagaggaggaggcggcgggaggaagccgggggctaggaggtcgtgccaccagtgcaagagggtcaagcgtctgaaggagatggtcaggtgccagtgctgtgacgagaggatctactgcgacctctgcatcaggaacaggtacgcgatgatgtcaccggatgctgttagagagcagtgccccttctgccgtggactctgcaattgtacgcgatgccttaacaaggatagggataagcagcttggacccgagaacttggttttgaggaaatgcaatagcaatgaatcatctaaaagggaaaagaggcccacttctgcaggtgtgatatcaccccaggctcatagtgcagcaccatgtactaaagaaattggactctcctttgtgactacaaataggatgaataatgtgtctgccatgtgggccaaagtggatacatcagatgtgagggctgaggaggttgaccctgaaacaaaacgcaaatacgcaagctacctattgcactacctgttgccttgtttgacacaactcaacaaggaccagatggaagaaagagaagcagaagccaaaattcgaggattgcaattgtcggaattgattgttgagaaagctgtctcctggaatgatgagagggtgttctgtaacaattgcaaaacgtcaatatttgatctgcatagaagctgctcaaactgctcgtacgagttgtgcatcagttgttgtaaggagctccgtggaaattttcttaagatcaattgtcaaaagggactggtacctgagcataagagtagaggaattgactatatgcatggtggtgattgtaagccacctaatctagaaaatgacagagaaacaggtttgtctagttaccaatctaagtctatcaagtgggaagctgatcctggtgggaccatttattgccctccatctgaactagatgggtgtggtaaccatgttcttgagttgaaacaaatttttgaaacagataggttaattaagcttgaaatggaagcattgcggctgagcaaccagatagaaccttctgatatttccagtatagatatatgtgaatgctcatgttcagctaataatgtaagttcaaggaaagctgccaccagagagaactccacagataacaacatatactgtccaatatcagataatggtgggccagatgatctcaagcacttccaaaagcactgggtgaaaggagagcctgtaatagtgcaaggggtgctcagtgaaatgtctgatttgagatgggagcctgaaaaaatgtgggctgaagtacatgacgccaatactagttctgagatgaaaagtgtgaaaaccactgattgtatgtcttgttgtgaggttgagataagtgccaaggactttttcaatgggtattatcatggtcggatgtatcataatctttggcctgaaatgcttaaattgaaggattggcctacttcagaccattttgagaatattttgccttcccatggaaagacgtacatcaattctttgccttttcaaccatacacaaatttgaaatctggtttactaaatgtctctgcattgcttcctggtgacgtcttaaagcttgacatgggcccaaaatcatatatagcttatggctatgcagaggaactcattagaggagattctgttacaaagcttcattgtgatttgtctgatgcagttaatgttttaatgcatactgccaaagttgtgccttctgaagaacaaaaagaggggataagagatttgaaaataaggcatgcagaacaagataaaaaggaatgcttggggaattcatcaatagatggaaataaaacaagcatggagcatgctcatatatcatcagtttcctgcgaggatggtggaggtgcactatgggatatttttaggagggaggatgttggaaagctgaaagagtacctcacaaaacattccaaagaatttcgccatatgtactgttgtccagttgaaaagatatttaaccctgtacatgatgaaacattttatctgaccaacaaacacaagagaaagctcaaggaggagtatggaatcgagccatggacctttgtgcaaagacttggagatgcggttttcatacctgctgggtgtcctcatcaagtacggaatctaaagtcttgcaccaagatagctctggattttgtatcaccagagaacattcagcaatgtctcagcttaaccgaggatttccggagacttccagtgggccacagggcaaaagaagataaactagagtttctgcaggagctccgcatggtc

SEQ ID NO: 204837 - DNA, 1059 bp, Zea Mays
aaaacagcaaaatgagttccatgttatggtgtataacttgttactacgaatggtacctgcattgagagattgaccttggtgcatgtctagcatttgacagtatgaacatccccataatgtgaaaaagaagggtcccttgtagagctggcacatgcacaactcctattcaagtaacatcatctcagttggtctcaaatgatatattcccagcagctgttgtgaaggccatgctctaccctggagctaccgtgagcagcctaactaaaagcaagacatttccgagttggaatgacctgtttgacatgtacaacctgacagaagcaaaaaatgcttctgcagtagttgatctccagcgtctagagatacttgccggaagctacttctgtgttgctggagcgctcattggcatcataaatcctgggaggatgactttgtttggtacccttttgattatctggggtatggtgaaagaagcactatttgggaagccagtgaacagtgatctgactcaatcaactcatgtctacccaaccattttgattgcacttatctgtgcattcatgtcaataacttacaacgtaaagaagacagcaagaagtagtactcctgtttctatcgctaagccactgataagttctgccaagtcaaaactgaagtagacttacaagtttaatcctcgtaactcttttgagatatttatttatgtgaaaaaaaacaggtttgaggatgacctgaggatgcttttggtgtatatctgactctttcaatactgtaacattcagtttcctttattgtattaacaattcgcaagggcacaccgtctgtaatgtttacaaaaaaaaccagctaaatcttggttttcccccaatgtttctgctatctaggcaggtttaattcagtttcatattgtatccaataagattgtagtctattttaccacaaggatggaaagttgtaattcctgacaggttctgggtcagttgttattcttctgtgtttggattttcatttggggggtcatggtatttggagttattaaagaaattgttcagaactgac

SEQ ID NO: 204838 - DNA, 954 bp, Zea Mays
ggacagcacaaggcgtcaaaataagggtcccttgtagagctggcacatgcacaactcctattcaagtaacatcatctcagttggtctcaaatgatatattcccagcagctgttgtgaaggccatgctctaccctggagctaccgtgagcagcctaactaaaagcaagacatttccgagttggaatgacctgtttgacatgtacaacctgacagaagcaaaaaatgcttctgcagtagttgatctccagcgtctagagatacttgccggaagctacttctgtgttgctggagcgctcattggcatcataaatcctgggaggatgactttgtttggtacccttttgattatctggggtatggtgaaagaagcactatttgggaagccagtgaacagtgatctgactcaatcaactcatgtctacccaaccattttgattgcacttatctgtgcattcatgtcaataacttacaacgtaaagaagacagcaagaagtagtactcctgtttctatcgctaagccactgataagttctgccaagtcaaaactgaagtagacttacaagtttaatcctcgtaactcttttgagatatttatttatgtgaaaaaaaacaggtttgaggatgacctgaggatgcttttggtgtatatctgactctttcaatactgtaacattcagtttcctttattgtattaacaattcgcaagggcacaccgtctgtaatgtttacaaaaaaaaccagctaaatcttggttttcccccaatgtttctgctatctaggcaggtttaattcagtttcatattgtatccaataagattgtagtctattttaccacaaggatggaaagttgtaattcctgacaggttctgggtcagttgttattcttctgtgtttggattttcatttggggggtcatggtatttggagttattaaagaaattgttcagaactgac

SEQ ID NO: 204839 - DNA, 1009 bp, Zea Mays
ggaaagctgcagaatgtttcaatcaaatgctaccggttacgggcttcaagtatcagcttcgattgcaaaattagcaacggggtcccttgtagagctggcacatgcacaactcctattcaagtaacatcatctcagttggtctcaaatgatatattcccagcagctgttgtgaaggccatgctctaccctggagctaccgtgagcagcctaactaaaagcaagacatttccgagttggaatgacctgtttgacatgtacaacctgacagaagcaaaaaatgcttctgcagtagttgatctccagcgtctagagatacttgccggaagctacttctgtgttgctggagcgctcattggcatcataaatcctgggaggatgactttgtttggtacccttttgattatctggggtatggtgaaagaagcactatttgggaagccagtgaacagtgatctgactcaatcaactcatgtctacccaaccattttgattgcacttatctgtgcattcatgtcaataacttacaacgtaaagaagacagcaagaagtagtactcctgtttctatcgctaagccactgataagttctgccaagtcaaaactgaagtagacttacaagtttaatcctcgtaactcttttgagatatttatttatgtgaaaaaaaacaggtttgaggatgacctgaggatgcttttggtgtatatctgactctttcaatactgtaacattcagtttcctttattgtattaacaattcgcaagggcacaccgtctgtaatgtttacaaaaaaaaccagctaaatcttggttttcccccaatgtttctgctatctaggcaggtttaattcagtttcatattgtatccaataagattgtagtctattttaccacaaggatggaaagttgtaattcctgacaggttctgggtcagttgttattcttctgtgtttggattttcatttggggggtcatggtatttggagttattaaagaaattgttcagaactgac

SEQ ID NO: 204840 - DNA, 2992 bp, Zea Mays
cccctgccgcctgcaacccactcagccagcctcggctagttgccctgcagacttctcagtttctcttataacaggacccaatccccaagcctcaagatacagcagtgatggacattgagcgatgcaggatatggtggccacgccaggagctgcagttcaagcagaaacccttctcaccgaggctcatcctgtttggatggttcttcagcagtgctggttctatcgacatcgtcatctctgcagctgtgccccaagttcacatcctgcactcttttgccacactggacaccctccagaccatcatcctttcctcaaataaaaggatgccagtaagcctgcaagaatctgctgcatttaccattcttggggattgtgtccgacacccccctaaagagttagaaggatactgctttaataaattggagcagctgcccttggatgcaaactttgttcagaaagaacattttggcacgagaagaaacaatgtcatgattggatcagttgggaatggggatcagggtccaagttatgatcataggagatggggatgcgattgttgtgtgttggatggttttctggaagtttgcagaaagtctgcagtcaaagagggcagttgggtgcacttgtattggaagtttggagagaactttaagagcaacctgaatcaagttccagttcttcaccatttgtatcttgatggccaacagattgaaaacaatcgttgccatgtcatactgtatgaggttccgaccattggcagaaaccatttctcactgggtttggatgcaccccgtacgttgaatgtttctttcaaaaagccaaattggataaatgatctacaaaagcaaccatcatttcttgatttggattcaattgttttggcgcttaattgttcaaatgcagctagactgccggacactcaggaatgttctactacatgctcaggggcttatttcatctttgcatctgtatacgatgtcttagttcaagtaacatggcattgcgtggggatatttttggcttcatcatcaactattctctacatcatgattctaatgtcccggaaatgtttaagccatatgccccagtacttgatgctaaataaggttttcagacattcatggaacaacattcatcttcgcagctgtcaaattctctactggccaattgtcttccaagatgcttccttaagctccactgtgaatgttgaatatgcacacaaagctgcaattcggaagcatgctttgtggtcaagtatcattgtggatctcctgatgggttttgtccttggagcagcattcttattaaatacagagactatttgtatttggactattgctctcgtccaccacatgacagaagcaatcttgagatccggttgtgtgtggctgatgggtgttccagctggatttaagctgaatacagagttagcagagctcttaggcatgatttctcttaatgcagttcaaatttactctaccctttggtttttcgttggaggctacctgagacatataattcaaggcattgcagtctctggaattattttaggacttacagctccagtttcattctttattgacattatccagcttgctacgttgcatgttaccatccttcactggttaatctcatcgttatattcaagacaaattcagacagtagcatcattgtggcgtcttttcagagggcgcaaatggaatcctcttaggcagaggttagatagttatgactacacagttgaacagcacgtggttggttccctgttgtttacaccaatcctacttcttatacctacaacttctgtattctatgtattcttctctatcttgacaacaacggttatctgggtgtgtgtgatgctggaaattgtcattgctctaatccaatccactccttatgctgagttaactctatgggtgatgaggaggcacagatttcctgctggattatttttctttcatctgccatcaaatgggcatacttttgaagatgacgacctatcatcccattcagtcggatgttgcaatgaaacaagaaaggaggatctaatcgacaaactatcagaatcattagtttcagaacttcattgcagctatgcgacttttgttcaagtaatcagatcaaattacgagagagttttcaacaggactggttactccttttgcaaacaattggcatacgggatccttagcggtgaaagggtgccttcatcgcttcatctgcagacgtctccctcatttccctggatgaacatcggtattacggagtattggatgcactgctatgtttgtgtccttcagtgtgcaccaaagagagatacatgatgattgcatttgaacgaaccttggttcttttcggcggttttggtttcaaatagaggttttctatagtggtggttgattattctggaggcaagggaaggtcatctgtacactcatggagccttttccctcgtaacaatagcgatgcgagttttttaagtcagctgtaattttatagttatatgggatttgcacgattatggtgcttctacttgagtacttgacactcgtgtgctagctgtgttttcatgaaagaaactgaatatcagctagactgacgggtgagagaaaaggactcatgctccgctgcaaagatgaacctcattgttgcttcacgataatagcttcttctgcacgtggcaaatagctggcatgtagcaggatattttcttttcaaatatttggggtacctgaccttgcttacccaaaaagccgagtagatttagcttactatgcattggtgatatttttggcaatgaacacgaatcgagaagtcgtagcgttatagcgagctgggccaatgtaagtcagtgttgcacgggatattgtctacatcacatgcagatttttttttcccacgcgaacgatgcagtgaacatgcatttaggttaaactcttaggctcatttggaatgcaacaagtttatagagattgtatttgaattttac

SEQ ID NO: 204841 - DNA, 2935 bp, Zea Mays
ctcagccagcctcggctagttgccctgcagacttctcagtttctcttataacaggacccaatccccaagcctcaagatacagcagtgatggacattgagcgatgcaggatatggtggccacgccaggagctgcagttcaagcagaaacccttctcaccgaggctcatcctgtttggatggttcttcagcagtgctggttctatcgacatcgtcatctctgcagctgtgccccaagttcacatcctgcactcttttgccacactggacaccctccagaccatcatcctttcctcaaataaaaggatgccagtaagcctgcaagaatctgctgcatttaccattcttggggattgtgtccgacacccccctaaagagttagaaggatactgctttaataaattggagcagctgcccttggatgcaaactttgttcagaaagaacattttggcacgagaagaaacaatgtcatgattggatcagttgggaatggggatcagggtccaagttatgatcataggagatggggatgcgattgttgtgtgttggatggttttctggaagtttgcagaaagtctgcagtcaaagagggcagttgggtgcacttgtattggaagtttggagagaactttaagagcaacctgaatcaagttccagttcttcaccatttgtatcttgatggccaacagattgaaaacaatcgttgccatgtcatactgtatgaggttccgaccattggcagaaaccatttctcactgggtttggatgcaccccgtacgttgaatgtttctttcaaaaagccaaattggataaatgatctacaaaagcaaccatcatttcttgatttgctagactgccggacactcaggaatgttctactacatgctcaggggcttatttcatctttgcatctgtatacgatgtcttagttcaagtaacatggcattgcgtggggatatttttggcttcatcatcaactattctctacatcatgattctaatgtcccggaaatgtttaagccatatgccccagtacttgatgctaaataaggttttcagacattcatggaacaacattcatcttcgcagctgtcaaattctctactggccaattgtcttccaagatgcttccttaagctccactgtgaatgttgaatatgcacacaaagctgcaattcggaagcatgctttgtggtcaagtatcattgtggatctcctgatgggttttgtccttggagcagcattcttattaaatacagagactatttgtatttggactattgctctcgtccaccacatgacagaagcaatcttgagatccggttgtgtgtggctgatgggtgttccagctggatttaagctgaatacagagttagcagagctcttaggcatgatttctcttaatgcagttcaaatttactctaccctttggtttttcgttggaggctacctgagacatataattcaaggcattgcagtctctggaattattttaggacttacagctccagtttcattctttattgacattatccagcttgctacgttgcatgttaccatccttcactggttaatctcatcgttatattcaagacaaattcagacagtagcatcattgtggcgtcttttcagagggcgcaaatggaatcctcttaggcagaggttagatagttatgactacacagttgaacagcacgtggttggttccctgttgtttacaccaatcctacttcttatacctacaacttctgtattctatgtattcttctctatcttgacaacaacggttatctgggtgtgtgtgatgctggaaattgtcattgctctaatccaatccactccttatgctgagttaactctatgggtgatgaggaggcacagatttcctgctggattatttttctttcatctgccatcaaatgggcatacttttgaagatgacgacctatcatcccattcagtcggatgttgcaatgaaacaagaaaggaggatctaatcgacaaactatcagaatcattagtttcagaacttcattgcagctatgcgacttttgttcaagtaatcagatcaaattacgagagagttttcaacaggactggttactccttttgcaaacaattggcatacgggatccttagcggtgaaagggtgccttcatcgcttcatctgcagacgtctccctcatttccctggatgaacatcggtattacggagtattggatgcactgctatgtttgtgtccttcagtgtgcaccaaagagagatacatgatgattgcatttgaacgaaccttggttcttttcggcggttttggtttcaaatagaggttttctatagtggtggttgattattctggaggcaagggaaggtcatctgtacactcatggagccttttccctcgtaacaatagcgatgcgagttttttaagtcagctgtaattttatagttatatgggatttgcacgattatggtgcttctacttgagtacttgacactcgtgtgctagctgtgttttcatgaaagaaactgaatatcagctagactgacgggtgagagaaaaggactcatgctccgctgcaaagatgaacctcattgttgcttcacgataatagcttcttctgcacgtggcaaatagctggcatgtagcaggatattttcttttcaaatatttggggtacctgaccttgcttacccaaaaagccgagtagatttagcttactatgcattggtgatatttttggcaatgaacacgaatcgagaagtcgtagcgttatagcgagctgggccaatgtaagtcagtgttgcacgggatattgtctacatcacatgcagatttttttttcccacgcgaacgatgcagtgaacatgcatttaggttaaactcttaggctcatttggaatgcaacaagtttatagagattgtatttgaattttac

SEQ ID NO: 204842 - DNA, 2914 bp, Zea Mays
cccaatccccaagcctcaagatacagcagtgatggacattgagcgatgcaggatatggtggccacgccaggagctgcagttcaagcagaaacccttctcaccgaggctcatcctgtttggatggttcttcagcagtgctggttctatcgacatcgtcatctctgcagctgtgccccaagttcacatcctgcactcttttgccacactggacaccctccagaccatcatcctttcctcaaataaaaggatgccagtaagcctgcaagaatctgctgcatttaccattcttggggattgtgtccgacacccccctaaagagttagaaggatactgctttaataaattggagcagctgcccttggatgcaaactttgttcagaaagaacattttggcacgagaagaaacaatgtcatgattggatcagttgggaatggggatcagggtccaagttatgatcataggagatggggatgcgattgttgtgtgttggatggttttctggaagtttgcagaaagtctgcagtcaaagagggcagttgggtgcacttgtattggaagtttggagagaactttaagagcaacctgaatcaagttccagttcttcaccatttgtatcttgatggccaacagattgaaaacaatcgttgccatgtcatactgtatgaggttccgaccattggcagaaaccatttctcactgggtttggatgcaccccgtacgttgaatgtttctttcaaaaagccaaattggataaatgatctacaaaagcaaccatcatttcttgatttggattcaattgttttggcgcttaattgttcaaatgcagctagactgccggacactcaggaatgttctactacatgctcaggggcttatttcatctttgcatctgtatacgatgtcttagttcaagtaacatggcattgcgtggggatatttttggcttcatcatcaactattctctacatcatgattctaatgtcccggaaatgtttaagccatatgccccagtacttgatgctaaataaggttttcagacattcatggaacaacattcatcttcgcagctgtcaaattctctactggccaattgtcttccaagatgcttccttaagctccactgtgaatgttgaatatgcacacaaagctgcaattcggaagcatgctttgtggtcaagtatcattgtggatctcctgatgggttttgtccttggagcagcattcttattaaatacagagactatttgtatttggactattgctctcgtccaccacatgacagaagcaatcttgagatccggttgtgtgtggctgatgggtgttccagctggatttaagctgaatacagagttagcagagctcttaggcatgatttctcttaatgcagttcaaatttactctaccctttggtttttcgttggaggctacctgagacatataattcaaggcattgcagtctctggaattattttaggacttacagctccagtttcattctttattgacattatccagcttgctacgttgcatgttaccatccttcactggttaatctcatcgttatattcaagacaaattcagacagtagcatcattgtggcgtcttttcagagggcgcaaatggaatcctcttaggcagaggttagatagttatgactacacagttgaacagcacgtggttggttccctgttgtttacaccaatcctacttcttatacctacaacttctgtattctatgtattcttctctatcttgacaacaacggttatctgggtgtgtgtgatgctggaaattgtcattgctctaatccaatccactccttatgctgagttaactctatgggtgatgaggaggcacagatttcctgctggattatttttctttcatctgccatcaaatgggcatacttttgaagatgacgacctatcatcccattcagtcggatgttgcaatgaaacaagaaaggaggatctaatcgacaaactatcagaatcattagtttcagaacttcattgcagctatgcgacttttgttcaagtaatcagatcaaattacgagagagttttcaacaggactggttactccttttgcaaacaattggcatacgggatccttagcggtgaaagggtgccttcatcgcttcatctgcagacgtctccctcatttccctggatgaacatcggtattacggagtattggatgcactgctatgtttgtgtccttcagtgtgcaccaaagagatacatgatgattgcatttgaacgaaccttggttcttttcggcggttttggtttcaaatagaggttttctatagtggtggttgattattctggaggcaagggaaggtcatctgtacactcatggagccttttccctcgtaacaatagcgatgcgagttttttaagtcagctgtaattttatagttatatgggatttgcacgattatggtgcttctacttgagtacttgacactcgtgtgctagctgtgttttcatgaaagaaactgaatatcagctagactgacgggtgagagaaaaggactcatgctccgctgcaaagatgaacctcattgttgcttcacgataatagcttcttctgcacgtggcaaatagctggcatgtagcaggatattttcttttcaaatatttggggtacctgaccttgcttacccaaaaagccgagtagatttagcttactatgcattggtgatatttttggcaatgaacacgaatcgagaagtcgtagcgttatagcgagctgggccaatgtaagtcagtgttgcacgggatattgtctacatcacatgcagatttttttttcccacgcgaacgatgcagtgaacatgcatttaggttaaactcttaggctcatttggaatgcaacaagtttatagagattgtatttgaattttac

SEQ ID NO: 204843 - DNA, 2574 bp, Zea Mays
atttgaagctgtaaactcatgtcagctactagatcacctttggatgtgtaagaagttgacataagagtaaagtggaatgattcaggagtttttccgagtgtgagaggacatttggtgtgttgacaaagcttgatttaatggacaagggaacaaatgcacttgacgttcttgaaggaagagcttacagactgcagcatccctgggttggaattgtgaaccgttcacaagcagatatcaacaagaatgttgacatgattattgctaggcgaaaagagcaggagttcttcgattctagtcctgaatattctcatcttgccagcaggatgggttcagaatatcttgctaaacttctttcacagcatctagaggccgcgatcagatcacgcattccgagcataacctctctgataaacaaaactattgatgagcttgaatctgagatggatcacctcggtagacctattgcttctgatgctggggctcagttgtacctcatcttggagctttgccgtgcatttgacaaaatatttaaagaacatcttgatggcggccgacctggcggtgatagaatttatggggtctttgataaccaactcccttctgctctgcggaagctcccatttgatcgtcatctctccgtgcaaaatgtgaagcgggttgtttcacaggcagatggttatcagcctcatttaattgctcctgagcaagggtaccgtcggctgattgaatcttctctcaattattttagaggaccagcggaagcctctgtagatgctgtgcattctgttttgaaagagctggtgaggatatccattggggagacacaggagttaaaacgatttccatctctacaaacggagctagctgctgcatgctataaggcccttgagagattccgcgaagatggcaggaaaactactctacggctggttgatatggagtctgcatatttgactgtggagttcttccgcaagctcccacaggaagttgataagactggaactggaaatcccagaaatgccaatcctcctgctccttcggatgatcgttacgctgatgcacatttcaggaggattgcttctaacgtgtcctcatacattggcatggtatctgaaacgctgaagaatactatccccaagtctgttgttcactgtcaggtccgcgaagctaagcggtccctgcttaaccatttctatactcaagtgggcgggaaagatgctaagcaacttgcagtactccttgacgaggatcctgccctcatggaacgcaggctgcaatgctttaagaggcttgagctgtacaagtctgctcgggacgagattgatgccgtgtcgtggacaagatgaaggtaacgcatgccatgcttgttaatatattcgctttctccattagacacattgtaattctactagtgcagaattagcagctagccattgtgcacactgattgtcaagtatagcagaccgagcacctgtctcgtatcttagcctgttaatatcagtagttgtgtgcttgactgcttgtgttgtatctatgtctcaactcccaactgttatcaggtgcaaatttctgtccttagtaacccatgtgcaaacttgtatgcacgaacgatacctggattctgtaggatgcacatgccgatcttcttcccatgctgtagttaggtgtagactgcagaactgggacttctaatgtgaaaataatgttttatgcaacttgtcattagtcaatcacattatcacactgtagaataattttttgttggctgcgagcattaccatgcgatttgggggtggtccacactaacatgtacgcattgcatgagaccctttcaataaacaatactggcactgcgtctgaacattcttggcctgctggacctgcaagacacgtctgccatctatcttagttcaatttgttagcgttattgcttgacattttccacatccgggatgaatgacgcgtgctgcgtgcggtgcagaatccgaaacaggtcagtcaactcccgcatgatccttggtcaatttcacgatacttatttgccctgctcgcgttcttttctggtcagttgcgcgctctgttgatgtgacccttttggtccgtccgggaaatcgtcgcctgctggccatggattcacgctttctagaggacgtgtgttgcccgccgtgcgcccttccatgagttccccgcatagaacaggtcgtcttctggaacagaaaggcgaagcgcgtggcgagctgtcctgattttgacgagtccatgcatcttcagcagattggactggtcgccataagaacacgaaactgtgattaggaggcatacacgtcatctgctagtgtttccggtgaagtcagttgccaccatgacctgctaggcagaaataaatatgcccctattaatcgggccttgatctgtcgtcctcattgctgaaaacctcacccaaattgcatcttatagcacattcgtcgccatggatatggtcattggctgtgccggctgtgagctgtcaacattttgtacagtactacatttccaaaatctaaaccgggcatcactgcgaatccgtaatagcag

SEQ ID NO: 204844 - DNA, 3298 bp, Zea Mays
cagtctatcttctcggctcgcacacctcagacacagccaggcagcggagcgctcccccctcgattccttcgcttccttctagaaccttccgctccctccgttgcaacagtagcacagagcttcctcctcccccacccccgaagatgacgaccatggagaacgtgatcgtgctcgtgaaccgcatccagcgtgcctgcaccgtcctcggcgaccacggcggcggggacgccgccgcctccctccctaccctctgggaagcgctcccgacggtcgccgtcgtcggcggtcagagttcggggaaatcatcggtgctcgagagcatcgtggggcgagacttcctgcctcgaggatcagggatcgtgacgcgtaggccactcgtcctgcagctgcacaagacagaggccggggtgcaggagtatgccgagttccttcacatgcctaagcgccgcttcactgatttctctattgtgcggaaggaaatccaggatgaaactgacaggttgactggaaagacaaagcagatatctccagttccaattcatctcagcatatactctccacatgtggtcaacttaacattgattgatctgccgggcctaaccaaagttgcagttgaggggcagcctgaaagcattgttcaagatatcgaaagcatggtgcgttcatatgttgataagccgaattgtattatattggctatatctcctgccaatcaagatatagcgacatcagatgcaatcaagcttgcccgggaagtggatccaactgggaaggagacacaagtagtgttcaaactcttggcttgctgtatcttagtttcacggtgagaggacatttggtgtgttgacaaagcttgatttaatggacaagggaacaaatgcacttgacgttcttgaaggaagagcttacagactgcagcatccctgggttggaattgtgaaccgttcacaagcagatatcaacaagaatgttgacatgattattgctaggcgaaaagagcaggagttcttcgattctagtcctgaatattctcatcttgccagcaggatgggttcagaatatcttgctaaacttctttcacagcatctagaggccgcgatcagatcacgcattccgagcataacctctctgataaacaaaactattgatgagcttgaatctgagatggatcacctcggtagacctattgcttctgatgctggggctcagttgtacctcatcttggagctttgccgtgcatttgacaaaatatttaaagaacatcttgatggcggccgacctggcggtgatagaatttatggggtctttgataaccaactcccttctgctctgcggaagctcccatttgatcgtcatctctccgtgcaaaatgtgaagcgggttgtttcacaggcagatggttatcagcctcatttaattgctcctgagcaagggtaccgtcggctgattgaatcttctctcaattattttagaggaccagcggaagcctctgtagatgctgtgcattctgttttgaaagagctggtgaggatatccattggggagacacaggagttaaaacgatttccatctctacaaacggagctagctgctgcatgctataaggcccttgagagattccgcgaagatggcaggaaaactactctacggctggttgatatggagtctgcatatttgactgtggagttcttccgcaagctcccacaggaagttgataagactggaactggaaatcccagaaatgccaatcctcctgctccttcggatgatcgttacgctgatgcacatttcaggaggattgcttctaacgtgtcctcatacattggcatggtatctgaaacgctgaagaatactatccccaagtctgttgttcactgtcaggtccgcgaagctaagcggtccctgcttaaccatttctatactcaagtgggcgggaaagatgctaagcaacttgcagtactccttgacgaggatcctgccctcatggaacgcaggctgcaatgctttaagaggcttgagctgtacaagtctgctcgggacgagattgatgccgtgtcgtggacaagatgaaggtaacgcatgccatgcttgttaatatattcgctttctccattagacacattgtaattctactagtgcagaattagcagctagccattgtgcacactgattgtcaagtatagcagaccgagcacctgtctcgtatcttagcctgttaatatcagtagttgtgtgcttgactgcttgtgttgtatctatgtctcaactcccaactgttatcaggtgcaaatttctgtccttagtaacccatgtgcaaacttgtatgcacgaacgatacctggattctgtaggatgcacatgccgatcttcttcccatgctgtagttaggtgtagactgcagaactgggacttctaatgtgaaaataatgttttatgcaacttgtcattagtcaatcacattatcacactgtagaataattttttgttggctgcgagcattaccatgcgatttgggggtggtccacactaacatgtacgcattgcatgagaccctttcaataaacaatactggcactgcgtctgaacattcttggcctgctggacctgcaagacacgtctgccatctatcttagttcaatttgttagcgttattgcttgacattttccacatccgggatgaatgacgcgtgctgcgtgcggtgcagaatccgaaacaggtcagtcaactcccgcatgatccttggtcaatttcacgatacttatttgccctgctcgcgttcttttctggtcagttgcgcgctctgttgatgtgacccttttggtccgtccgggaaatcgtcgcctgctggccatggattcacgctttctagaggacgtgtgttgcccgccgtgcgcccttccatgagttccccgcatagaacaggtcgtcttctggaacagaaaggcgaagcgcgtggcgagctgtcctgattttgacgagtccatgcatcttcagcagattggactggtcgccataagaacacgaaactgtgattaggaggcatacacgtcatctgctagtgtttccggtgaagtcagttgccaccatgacctgctaggcagaaataaatatgcccctattaatcgggccttgatctgtcgtcctcattgctgaaaacctcacccaaattgcatcttatagcacattcgtcgccatggatatggtcattggctgtgccggctgtgagctgtcaacattttgtacagtactacatttccaaaatctaaaccgggcatcactgcgaatccgtaatagcag

SEQ ID NO: 204845 - DNA, 3208 bp, Zea Mays
gtcagtctatcttctcggctcgcacacctcagacacagccaggcagcggagcgctcccccctcgattccttcgcttccttctagaaccttccgctccctccgttgcaacagtagcacagagcttcctcctcccccacccccgaagatgacgaccatggagaacgtgatcgtgctcgtgaaccgcatccagcgtgcctgcaccgtcctcggcgaccacggcggcggggacgccgccgcctccctccctaccctctgggaagcgctcccgacggtcgccgtcgtcggcggtcagagttcggggaaatcatcggtgctcgagagcatcgtggggcgagacttcctgcctcgaggatcagggatcgtgacgcgtaggccactcgtcctgcagctgcacaagacagaggccggggtgcaggagtatgccgagttccttcacatgcctaagcgccgcttcactgatttctctattgtgcggaaggaaatccaggatgaaactgacaggttgactggaaagacaaagcagatatctccagttccaattcatctcagcatatactctccacatgtggtcaacttaacattgattgatctgccgggcctaaccaaagttgcagttgaggggcagcctgaaagcattgttcaagatatcgaaagcatggtgcgttcatatgttgataagccgaattgtattatattggctatatctcctgccaatcaagatatagcgacatcagatgcaatcaagcttgcccgggaagtggatccaactggtgagaggacatttggtgtgttgacaaagcttgatttaatggacaagggaacaaatgcacttgacgttcttgaaggaagagcttacagactgcagcatccctgggttggaattgtgaaccgttcacaagcagatatcaacaagaatgttgacatgattattgctaggcgaaaagagcaggagttcttcgattctagtcctgaatattctcatcttgccagcaggatgggttcagaatatcttgctaaacttctttcacagcatctagaggccgcgatcagatcacgcattccgagcataacctctctgataaacaaaactattgatgagcttgaatctgagatggatcacctcggtagacctattgcttctgatgctggggctcagttgtacctcatcttggagctttgccgtgcatttgacaaaatatttaaagaacatcttgatggcggccgacctggcggtgatagaatttatggggtctttgataaccaactcccttctgctctgcggaagctcccatttgatcgtcatctctccgtgcaaaatgtgaagcgggttgtttcacaggcagatggttatcagcctcatttaattgctcctgagcaagggtaccgtcggctgattgaatcttctctcaattattttagaggaccagcggaagcctctgtagatgctgtgcattctgttttgaaagagctggtgaggatatccattggggagacacagctgctgcatgctataaggcccttgagagattccgcgaagatggcaggaaaactactctacggctggttgatatggagtctgcatatttgactgtggagttcttccgcaagctcccacaggaagttgataagactggaactggaaatcccagaaatgccaatcctcctgctccttcggatgatcgttacgctgatgcacatttcaggaggattgcttctaacgtgtcctcatacattggcatggtatctgaaacgctgaagaatactatccccaagtctgttgttcactgtcaggtccgcgaagctaagcggtccctgcttaaccatttctatactcaagtgggcgggaaagatgctaagcaacttgcagtactccttgacgaggatcctgccctcatggaacgcaggctgcaatgctttaagaggcttgagctgtacaagtctgctcgggacgagattgatgccgtgtcgtggacaagatgaaggtaacgcatgccatgcttgttaatatattcgctttctccattagacacattgtaattctactagtgcagaattagcagctagccattgtgcacactgattgtcaagtatagcagaccgagcacctgtctcgtatcttagcctgttaatatcagtagttgtgtgcttgactgcttgtgttgtatctatgtctcaactcccaactgttatcaggtgcaaatttctgtccttagtaacccatgtgcaaacttgtatgcacgaacgatacctggattctgtaggatgcacatgccgatcttcttcccatgctgtagttaggtgtagactgcagaactgggacttctaatgtgaaaataatgttttatgcaacttgtcattagtcaatcacattatcacactgtagaataattttttgttggctgcgagcattaccatgcgatttgggggtggtccacactaacatgtacgcattgcatgagaccctttcaataaacaatactggcactgcgtctgaacattcttggcctgctggacctgcaagacacgtctgccatctatcttagttcaatttgttagcgttattgcttgacattttccacatccgggatgaatgacgcgtgctgcgtgcggtgcagaatccgaaacaggtcagtcaactcccgcatgatccttggtcaatttcacgatacttatttgccctgctcgcgttcttttctggtcagttgcgcgctctgttgatgtgacccttttggtccgtccgggaaatcgtcgcctgctggccatggattcacgctttctagaggacgtgtgttgcccgccgtgcgcccttccatgagttccccgcatagaacaggtcgtcttctggaacagaaaggcgaagcgcgtggcgagctgtcctgattttgacgagtccatgcatcttcagcagattggactggtcgccataagaacacgaaactgtgattaggaggcatacacgtcatctgctagtgtttccggtgaagtcagttgccaccatgacctgctaggcagaaataaatatgcccctattaatcgggccttgatctgtcgtcctcattgctgaaaacctcacccaaattgcatcttatagcacattcgtcgccatggatatggtcattggctgtgccggctgtgagctgtcaacattttgtacagtactacatttccaaaatctaaaccgggcatcactgcgaatccgtaatagcag

SEQ ID NO: 204846 - DNA, 2529 bp, Zea Mays
ctctgtcagtctatcttctcggctcgcacacctcagacacagccaggcagcggagcgctcccccctcgattccttcgcttccttctagaaccttccgctccctccgttgcaacagtagcacagagcttcctcctcccccacccccgaagatgacgaccatggagaacgtgatcgtgctcgtgaaccgcatccagcgtgcctgcaccgtcctcggcgaccacggcggcggggacgccgccgcctccctccctaccctctgggaagcgctcccgacggtcgccgtcgtcggcggtcagagttcggggaaatcatcggtgctcgagagcatcgtggggcgagacttcctgcctcgaggatcagggatcgtgacgcgtaggccactcgtcctgcagctgcacaagacagaggccggggtgcaggagtatgccgagttccttcacatgcctaagcgccgcttcactgatttctctattgtgcggaaggaaatccaggatgaaactgacaggttgactggaaagacaaagcagatatctccagttccaattcatctcagcatatactctccacatgtggtcaacttaacattgattgatctgccgggcctaaccaaagttgcagttgaggggcagcctgaaagcattgttcaagatatcgaaagcatggtgcgttcatatgttgataagccgaattgtattatattggctatatctcctgccaatcaagatatagcgacatcagatgcaatcaagcttgcccgggaagtggatccaactggtgagaggacatttggtgtgttgacaaagcttgatttaatggacaagggaacaaatgcacttgacgttcttgaaggaagagcttacagactgcagcatccctgggttggaattgtgaaccgttcacaagcagatatcaacaagaatgttgacatgattattgctaggcgaaaagagcaggagttcttcgattctagtcctgaatattctcatcttgccagcaggatgggttcagaatatcttgctaaacttctttcacagcatctagaggccgcgatcagatcacgcattccgagcataacctctctgataaacaaaactattgatgagcttgaatctgagatggatcacctcggtagacctattgcttctgatgctggggctcagttgtacctcatcttggagctttgccgtgcatttgacaaaatatttaaagaacatcttgatggcggccgacctggcggtgatagaatttatggggtctttgataaccaactcccttctgctctgcggaagctcccatttgatcgtcatctctccgtgcaaaatgtgaagcgggttgtttcacaggcagatggttatcagcctcatttaattgctcctgagcaagggtaccgtcggctgattgaatcttctctcaattattttagaggaccagcggaagcctctgtagatgctgtgcattctgttttgaaagagctggtgaggatatccattggggagacacaggagttaaaacgatttccatctctacaaacggagctagctgctgcatgctataaggcccttgagagattccgcgaagatggcaggaaaactactctacggctggttgatatggagtctgcatatttgactgtggagttcttccgcaagctcccacaggaagttgataagactggaactggaaatcccagaaatgccaatcctcctgctccttcggatgatcgttacgctgatgcacatttcaggaggattgcttctaacgtgtcctcatacattggcatggtatctgaaacgctgaagaatactatccccaagtctgttgttcactgtcaggtccgcgaagctaagcggtccctgcttaaccatttctatactcaagtgggcgggaaagatgctaagcaacttgcagtactccttgacgaggatcctgccctcatggaacgcaggctgcaatgctttaagaggcttgagctgtacaagtctgctcgggacgagattgatgccgtgtcgtggacaagatgaagttgcgcgctctgttgatgtgacccttttggtccgtccgggaaatcgtcgcctgctggccatggattcacgctttctagaggacgtgtgttgcccgccgtgcgcccttccatgagttccccgcatagaacaggtcgtcttctggaacagaaaggcgaagcgcgtggcgagctgtcctgattttgacgagtccatgcatcttcagcagattggactggtcgccataagaacacgaaactgtgattaggaggcatacacgtcatctgctagtgtttccggtgaagtcagttgccaccatgacctgctaggcagaaataaatatgcccctattaatcgggccttgatctgtcgtcctcattgctgaaaacctcacccaaattgcatcttatagcacattcgtcgccatggatatggtcattggctgtgccggctgtgagctgtcaacattttgtacagtactacatttccaaaatctaaaccgggcatcactgcgaatccgtaatagcag

SEQ ID NO: 204847 - DNA, 3175 bp, Zea Mays
cctctgtcagtctatcttctcggctcgcacacctcagacacagccaggcagcggagcgctcccccctcgattccttcgcttccttctagaaccttccgctccctccgttgcaacagtagcacagagcttcctcctcccccacccccgaagatgacgaccatggagaacgtgatcgtgctcgtgaaccgcatccagcgtgcctgcaccgtcctcggcgaccacggcggcggggacgccgccgcctccctccctaccctctgggaagcgctcccgacggtcgccgtcgtcggcggtcagagttcggggaaatcatcggtgctcgagagcatcgtggggcgagacttcctgcctcgaggatcagggatcgtgacgcgtaggccactcgtcctgcagctgcacaagacagaggccggggtgcaggagtatgccgagttccttcacatgcctaagcgccgcttcactgatttctctattgtgcggaaggaaatccaggatgaaactgacaggttgactggaaagacaaagcagatatctccagttccaattcatctcagcatatactctccacatgtggtcaacttaacattgattgatctgccgggcctaaccaaagttgcagttgaggggcagcctgaaagcattgttcaagatatcgaaagcatggtgcgttcatatgttgataagccgaattgtattatattggctatatctcctgccaatcaagatatagcgacatcagatgcaatcaagcttgcccgggaagtggatccaactggtgagaggacatttggtgtgttgacaaagcttgatttaatggacaagggaacaaatgcacttgacgttcttgaaggaagagcttacagactgcagcatccctgggttggaattgtgaaccgttcacaagcagatatcaacaagaatgttgacatgattattgctaggcgaaaagagcaggagttcttcgattctagtcctgaatattctcatcttgccagcaggatgggttcagaatatcttgctaaacttctttcacagcatctagaggccgcgatcagatcacgcattccgagcataacctctctgataaacaaaactattgatgagcttgaatctgagatggatcacctcggtagacctattgcttctgatgctggggctcagttgtacctcatcttggagctttgccgtgcatttgacaaaatatttaaagaacatcttgatggcggccgacctggcggtgatagaatttatggggtctttgataaccaactcccttctgctctgcggaagctcccatttgatcgtcatctctccgtgcaaaatgtgaagcgggttgtttcacaggcagatggttatcagcctcatttaattgctcctgagcaagggtaccgtcggctgattgaatcttctctcaattattttagaggaccagcggaagcctctgtagatgctgtgcattctgttttgaaagagctggtgaggatatccattggggagacacaggagttaaaacgatttccatctctacaaacggagctagctgctgcatgctataaggcccttgagagattccgcgaagatggcaggaaaactactctacggctggttgatatggagtctgcatatttgactgtggagttcttccgcaagctcccacaggaagttgataagactggaactggaaatcccagaaatgccaatcctcctgctccttcggatgatcgttacgctgatgcacatttcaggaggattgcttctaacgtgtcctcatacattggcatggtatctgaaacgctgaagaatactatccccaagtctgttgttcactgtcaggtccgcgaagctaagcggtccctgcttaaccatttctatactcaagtgggcgggaaagatgctaagcaacttgcagtactccttgacgaggatcctgccctcatggaacgcaggctgcaatgctttaagaggcttgagctgtacaagtctgctcgggacgagattgatgccgtgtcgtggacaagatgaaggtaacgcatgccatgcttgttaatatattcgctttctccattagacacattgtaattctactagtgcagaattagcagctagccattgtgcacactgattgtcaagtatagcagaccgagcacctgtctcgtatcttagcctgttaatatcagtagttgtgtgcttgactgcttgtgttgtatctatgtctcaactcccaactgttatcaggtgcaaatttctgtccttagtaacccatgtgcaaacttgtatgcacgaacgatacctggattctgtaggatgcacatgccgatcttcttcccatgctgtagttaggtgtagactgcagaactgggacttctaatgtgaaaataatgttttatgcaacttgtcattagtcaatcacattatcacactgtagaataattttttgttggctgcgagcattaccatgcgatttgggggtggtccacactaacatgtacgcattgcatgagaccctttcaataaacaatactggcactgcgtctgaacattcttggcctgctggacctgcaagacacgtctgccatctatcttagttcaatttgttagcgttattgcttgacattttccacatccgggatgaatgacgcgtgctgcgtgcggtgcagaatccgaaacagttgcgcgctctgttgatgtgacccttttggtccgtccgggaaatcgtcgcctgctggccatggattcacgctttctagaggacgtgtgttgcccgccgtgcgcccttccatgagttccccgcatagaacaggtcgtcttctggaacagaaaggcgaagcgcgtggcgagctgtcctgattttgacgagtccatgcatcttcagcagattggactggtcgccataagaacacgaaactgtgattaggaggcatacacgtcatctgctagtgtttccggtgaagtcagttgccaccatgacctgctaggcagaaataaatatgcccctattaatcgggccttgatctgtcgtcctcattgctgaaaacctcacccaaattgcatcttatagcacattcgtcgccatggatatggtcattggctgtgccggctgtgagctgtcaacattttgtacagtactacatttccaaaatctaaaccgggcatcactgcgaatccgtaatagcag

SEQ ID NO: 204848 - DNA, 6110 bp, Zea Mays
cacaagaatagtctagaacctgacgtcgctcttcttcccaccacgccgctcttcttcccaccgcgttcaggctccgcccgacgcccgacaccaacgaagccctccacaaaaaacggcacgcaactgtctccatctccatcggtgccaccgtccgtcctccgcgtgtctgacgacccgagcttggtgtttgacaaaatgtccatgtcgtctatcatggtcgtgtcatgcccagcgttcggagatcgtgctcacctactgcagctaatcgtataaagcgactttagctttcgtctgggaacaatttgttttttagttctcaatgtcaaatggtaggatgttggcgggctagaggatgtgaaaaggattcttctagatactattctggtaaattggacttggtttagcagtaaatatcagcaacaccaatacgacgctcaattatagctccctttgacgtataatcgcatgatttcttctaaattgcgcaagcgattaggtgtctgggtatatggacctccgggaacagggaagaaacagaaaagaatgtttaggatattttgaaaaggctggagtccaaggagattttttccaatgcgtttttggcacaaaagtccaagtgaaattactttgctaagaatagcaaaatcattgaatatgtttacttggaaatagtcatttgccgagaacagttaccagggcgagaagcacgccacgcgcgcatgggcgcgcgacaggtactagtttatataaggttttgtattcttaggtttgtctctcctttgttctagagaattgatttaaatttcaccatttacgcactctataataaattattatgcattttttaaggcaaatacatcacctcaatatttgctctagtttcaccattgtcggctactacattgtcgcactagatctcacatcagatacctcgagatcaagaattgctaatgcctggttttaatgggatgaacacgtccggtggatgcaccgaagtgttcaaagagtacgcaagtttttttgccttacttccaacgttagattagacatagagactacaaatatcagttcaaccaactattcaagaagtgtgggaactaagaaacataaatagtatgttaagacttaagaccccattcatacaactctagatactaggtgctcaaagatcactcgatgattagtgaatatacttttataaagtgtttaggatagtaaactgatgtattagtgctttctatagactatgcatagtgattcagagtatgattagacaccctcaaacccaggggcgaagccagcctccagaattgttggtgtcgatttatttctaactcgtgtcatcaatactgtaaccaatgtttaaacagtattctacactgatttttcaaaaatcgttggaatctcaagctctagctccacccttgcgcaaaacgttcacgtttgtgtgtgtcattgtaactatgtcgcgccttaccctaccttgcctaggtcacgtcaagaccttgtatagacctcttgcaaagacaaatagagacgattcaatctcataggattatttaactgtcttaatattacatcaatatagtattattctaatattacgttactaggacaatgaaacctatatgtcacatgttttggattgacacatgtcatgtatgagatttatcggtccgaaattattctttgttggacaacctccgagtgaccaaccatattcgagtgtctatgtggagggatggaggcaggggcgaagccaggatttaagtttaggagggacaaataagattaggaggggttgctagaaggtattttacactatttacatgatggtcggctaagaaaattaatagctcctaacctcctgtagaattaggggagtattatggggacattgcctatgtgccctccctgtattcgccactggctggaggccagtccaaaattatcccttttcgaatagcctccaaggtacaacatggtatttatgacgaacctataaggttcaaacaaaatttcaacgcttacctacactattcttcattgtatcatattcagatgtgcaggtgtagaacaacagagttatgttgtcaaattttcatttgaactctatagattcattaagtgctcatcaataatttgtagaaggcactgaaggtgcaaaacaagcaacttcaatgctggtgtcaacacccgaagaatagcataccttcgattgtacacgtttaaggatcctcgccaaaggagttagacgtaggcttatgatggaatggtcaccacacttgagactttatggctagaaggccactgaccacgagaagcgaaagatttcagcactaatctccgacaaacttcctatcacatcttctatttttgaaagggaattaggcttacaccttttttctaattgattttggtggttgaattgtccaacacagatgattggactaactagtttgctctagattatatgttctatatgtgccaaaggttcatctacaactatactaaatcgactatctggaataccgtagattattccaaacaggataagctttctagaaaatcaggccaagcgcggaccgtccgggcccttgcggcggaccgtccgcgacaccactttgacttcgaccaggaactataaatcatggatagtccgactaaaccgcggaccgtccagctacaacgcgcggaccgtccggctataattcacggacagtccgcaggtgaagacctggttcagcccgaaggtgacaagttgagcaaaaggaattatatagctggcgcggaccgtccggaaccaagggcggaccgtccgcgtggtgtcaccgaggcagatagccgttgatctgtcagaagtatccgttgaagatgtcagaatcgaccgttggagggtcacggaccgtccgggccctagccgcggaccgtccgccagtgcaatttcgggcagatgcgccccaacgactatatgggtggttgagggctataaataccacccccaccggccacttcaatgtgtgggagcccaagcaacattccaagtcacatagttgacatactcaagccctcccaaccacatatattcattgatacatcctatacacaagatctagaccactacaaccgacacaagtgccacaaaagagagagcaggaaattgagagctactcaattgagtttagccctagtgccttgtgagattcattgagagatagtgtgtgctacatctttgtgttcatttgtgcgtggagttttgactcccattgaacttcctccaaagttttggaggcttgtaaaagctatcaagagacaccaaagagtgtggtggtccttgcgggatcgagagtgatccttgagaagaagaagagctcgccgatccttgagtgatcggtggagagagggaaagggttgaaaaagacccgtcctttagtggactcctcaacggggactaggccttcgagggccgaacctcggtaaaacaaatcacccgtgtctcgtgtgcttattgcttgtgatttgtttgtgctttctctttctaagtttgtcgtgcactactctttgctaattctatttggtgttgctttaagttaaactctcatttggtgaagcaacacattgcaagagagaacttgtgttattgctcttcttgcctaagccttcttgctttaaatctcatagacttattagtagtattgatttatcaattccacattatttgaaagcaatactctttacaagcaaggacttagtttttatactcctataattatatatatcttgttctaaccactaatcaagggatctagttgggggaaaaagtttttaatttcaggtttcgcctatccaccccccctctaggcgactttcaattggtatcagagctaggcacttcatcttgagtctaacaactcgaagtgatggctcgtagaagatcccaaaagaacaagaagactcctccatcgaacgtaactcaaaaggaggtaactcttgaaatattatttgatgattgttctaattatgactcatggtctactagtgtgataaatgcttttagaaccatagatccacgattagaacaaattatagacaagagtattttttcctctaatttcaatgaaaaaattaattccaaggaggatcaaagatgttatcgcttaaactatctagcttttgacatcttaactaattctcttagcaatgaagattatcgtgccttcatatcaaaatatgatgaacctattcatgatgcacatgatatttggactagaattaaaagcaaatttgatgagtccaaacatgatagttcattttatgcttctacttcctttggtatttgtgatactaacccttgcaaggaaaaggaagagaatgaacgatggagaccaaacgatgaatccacctctccaaaaggtttgccttcccatttcgattcccacatatgttgtgtggctaatgaaaatgatagggaaagcatcaatgaggatgaggaggaagaaagaagcttcttgcaactctacgctcgcctaagccaagaagataaggcggtcatgctcaaacttctagaaagagctagagagcaaagtgaagctcgtcaaaggctagaagatattctctccataaaaatgctacactttgacgagttgactaaagaacatgaggagctaaagtgctctcatgttgacttggtccaaaggtatgaaactatttcaattgagcaagataacgctttacattgtatcgctcaattagtaaataggaataccttgcttaaggaccaggtagaaaagctaaaagttgaaaatctagcttttcaagaaaaatatgatatgctcctatgctctcatgaaaatcttatggatgatcatatcatattagatattgctcatgaggttgtgatagaaaacttaaaatcccaacaacctcacttttacacatgtattcaaattgaaactatattaccatgtgttaatgcttgttgtccgtcgacaagcaaatcttcctttgagctagaatttgcaggaacaaacgatgatacatatcaaaagctcaaagaagaaaatgagaggctaaaaatgagcttgactcaactaaaagggaaatgcattgctcaaccttctcaagataaccgtgatcacatggtgaagaagcttgagacgggaacaaccgaggcatgcactaaatcccttgaagaaaatgtcaaggacttgaggattgccaagaggaggaatcaaaagaagaaaatcaatacctcttctaaaagcctcaaccatgcctccataaaaggtaacatccaaggtaataatcaagttacacttcatacaaatagaatcaagaagtgtagtgaatgctttgaagaggggcacttgattagatcatgtccctatattaaaaatggcttgattattaacaaggatgataaactttgttttaaatgttcaaggaagggacactttattaaatcttgtccccatttaaaacaaaagggcatagggttagaaaagaaagtttttactaaccatgtagcaagcaacaaacaaggaaagaagaaatcttcaaaacttggaaaacgcctatggtacacatgccgagaaaagggatatcaatgcaagggttgtcccattggtaactcctccactcatagcttgtcatttgattcatatataactaggcaacccaaaattgcaacttgtgctagaaaggcaatgaatttgccaagcgctagcacaaaggacatttgggttcctagatctttgttgactaaccataatggattcatcaagcgatgggtaccaaaacatacttgacaagctttgcaggagaaggagatgatatgaaactttgggtgcttgagagagtcaagtcaattcacattaactcaagctatcaatctacaatgatctacatatccaagattgacccaaggttatttcaaattattatgtctaaaactcatatcatctcgggaaaatattgatgttgtaggaaacaaagaactaatcccaagtcgaaaagtcaagacctacaacatggaggaaagccaaaggatggtaacaattatgcttttaagtgcaaacactacaccaaaatcatacacttcctacggtttt

SEQ ID NO: 204849 - DNA, 6259 bp, Zea Mays
cacaagaatagtctagaacctgacgtcgctcttcttcccaccacgccgctcttcttcccaccgcgttcaggctccgcccgacgcccgacaccaacgaagccctccacaaaaaacggcacgcaactgtctccatctccatcggtgccaccgtccgtcctccgcgtgtctgacgacccgagcttggtgtttgacaaaatgtccatgtcgtctatcatggtcgtgtcatgcccagcgttcggagatcgtgctcacctactgcagctaatcgtataaagcgactttagctttcgtctgggaacaatttgttttttagttctcaatgtcaaatggtaggatgttggcgggctagaggatgtgaaaaggattcttctagatactattctggtaaattggacttggtttagcagtaaatatcagcaacaccaatacgacgctcaattatagctccctttgacgtataatcgcatgatttcttctaaattgcgcaagcgattaggtgtctgggtatatggacctccgggaacagggaaggagacatccgataacaagtgcatcctaaagacatggaatcgctaaaatgaatgtccgttggacttctaggttttacttgcgaaagcctgaatactcactgaactttcgtagcgtcaaaggtccagaactgataaacatgtatgttgcagaaacagaaaagaatgtttaggatattttgaaaaggctggagtccaaggagattttttccaatgcgtttttggcacaaaagtccaagtgaaattactttgctaagaatagcaaaatcattgaatatgtttacttggaaatagtcatttgccgagaacagttaccagggcgagaagcacgccacgcgcgcatgggcgcgcgacaggtactagtttatataaggttttgtattcttaggtttgtctctcctttgttctagagaattgatttaaatttcaccatttacgcactctataataaattattatgcattttttaaggcaaatacatcacctcaatatttgctctagtttcaccattgtcggctactacattgtcgcactagatctcacatcagatacctcgagatcaagaattgctaatgcctggttttaatgggatgaacacgtccggtggatgcaccgaagtgttcaaagagtacgcaagtttttttgccttacttccaacgttagattagacatagagactacaaatatcagttcaaccaactattcaagaagtgtgggaactaagaaacataaatagtatgttaagacttaagaccccattcatacaactctagatactaggtgctcaaagatcactcgatgattagtgaatatacttttataaagtgtttaggatagtaaactgatgtattagtgctttctatagactatgcatagtgattcagagtatgattagacaccctcaaacccaggggcgaagccagcctccagaattgttggtgtcgatttatttctaactcgtgtcatcaatactgtaaccaatgtttaaacagtattctacactgatttttcaaaaatcgttggaatctcaagctctagctccacccttgcgcaaaacgttcacgtttgtgtgtgtcattgtaactatgtcgcgccttaccctaccttgcctaggtcacgtcaagaccttgtatagacctcttgcaaagacaaatagagacgattcaatctcataggattatttaactgtcttaatattacatcaatatagtattattctaatattacgttactaggacaatgaaacctatatgtcacatgttttggattgacacatgtcatgtatgagatttatcggtccgaaattattctttgttggacaacctccgagtgaccaaccatattcgagtgtctatgtggagggatggaggcaggggcgaagccaggatttaagtttaggagggacaaataagattaggaggggttgctagaaggtattttacactatttacatgatggtcggctaagaaaattaatagctcctaacctcctgtagaattaggggagtattatggggacattgcctatgtgccctccctgtattcgccactggctggaggccagtccaaaattatcccttttcgaatagcctccaaggtacaacatggtatttatgacgaacctataaggttcaaacaaaatttcaacgcttacctacactattcttcattgtatcatattcagatgtgcaggtgtagaacaacagagttatgttgtcaaattttcatttgaactctatagattcattaagtgctcatcaataatttgtagaaggcactgaaggtgcaaaacaagcaacttcaatgctggtgtcaacacccgaagaatagcataccttcgattgtacacgtttaaggatcctcgccaaaggagttagacgtaggcttatgatggaatggtcaccacacttgagactttatggctagaaggccactgaccacgagaagcgaaagatttcagcactaatctccgacaaacttcctatcacatcttctatttttgaaagggaattaggcttacaccttttttctaattgattttggtggttgaattgtccaacacagatgattggactaactagtttgctctagattatatgttctatatgtgccaaaggttcatctacaactatactaaatcgactatctggaataccgtagattattccaaacaggataagctttctagaaaatcaggccaagcgcggaccgtccgggcccttgcggcggaccgtccgcgacaccactttgacttcgaccaggaactataaatcatggatagtccgactaaaccgcggaccgtccagctacaacgcgcggaccgtccggctataattcacggacagtccgcaggtgaagacctggttcagcccgaaggtgacaagttgagcaaaaggaattatatagctggcgcggaccgtccggaaccaagggcggaccgtccgcgtggtgtcaccgaggcagatagccgttgatctgtcagaagtatccgttgaagatgtcagaatcgaccgttggagggtcacggaccgtccgggccctagccgcggaccgtccgccagtgcaatttcgggcagatgcgccccaacgactatatgggtggttgagggctataaataccacccccaccggccacttcaatgtgtgggagcccaagcaacattccaagtcacatagttgacatactcaagccctcccaaccacatatattcattgatacatcctatacacaagatctagaccactacaaccgacacaagtgccacaaaagagagagcaggaaattgagagctactcaattgagtttagccctagtgccttgtgagattcattgagagatagtgtgtgctacatctttgtgttcatttgtgcgtggagttttgactcccattgaacttcctccaaagttttggaggcttgtaaaagctatcaagagacaccaaagagtgtggtggtccttgcgggatcgagagtgatccttgagaagaagaagagctcgccgatccttgagtgatcggtggagagagggaaagggttgaaaaagacccgtcctttagtggactcctcaacggggactaggccttcgagggccgaacctcggtaaaacaaatcacccgtgtctcgtgtgcttattgcttgtgatttgtttgtgctttctctttctaagtttgtcgtgcactactctttgctaattctatttggtgttgctttaagttaaactctcatttggtgaagcaacacattgcaagagagaacttgtgttattgctcttcttgcctaagccttcttgctttaaatctcatagacttattagtagtattgatttatcaattccacattatttgaaagcaatactctttacaagcaaggacttagtttttatactcctataattatatatatcttgttctaaccactaatcaagggatctagttgggggaaaaagtttttaatttcaggtttcgcctatccaccccccctctaggcgactttcaattggtatcagagctaggcacttcatcttgagtctaacaactcgaagtgatggctcgtagaagatcccaaaagaacaagaagactcctccatcgaacgtaactcaaaaggaggtaactcttgaaatattatttgatgattgttctaattatgactcatggtctactagtgtgataaatgcttttagaaccatagatccacgattagaacaaattatagacaagagtattttttcctctaatttcaatgaaaaaattaattccaaggaggatcaaagatgttatcgcttaaactatctagcttttgacatcttaactaattctcttagcaatgaagattatcgtgccttcatatcaaaatatgatgaacctattcatgatgcacatgatatttggactagaattaaaagcaaatttgatgagtccaaacatgatagttcattttatgcttctacttcctttggtatttgtgatactaacccttgcaaggaaaaggaagagaatgaacgatggagaccaaacgatgaatccacctctccaaaaggtttgccttcccatttcgattcccacatatgttgtgtggctaatgaaaatgatagggaaagcatcaatgaggatgaggaggaagaaagaagcttcttgcaactctacgctcgcctaagccaagaagataaggcggtcatgctcaaacttctagaaagagctagagagcaaagtgaagctcgtcaaaggctagaagatattctctccataaaaatgctacactttgacgagttgactaaagaacatgaggagctaaagtgctctcatgttgacttggtccaaaggtatgaaactatttcaattgagcaagataacgctttacattgtatcgctcaattagtaaataggaataccttgcttaaggaccaggtagaaaagctaaaagttgaaaatctagcttttcaagaaaaatatgatatgctcctatgctctcatgaaaatcttatggatgatcatatcatattagatattgctcatgaggttgtgatagaaaacttaaaatcccaacaacctcacttttacacatgtattcaaattgaaactatattaccatgtgttaatgcttgttgtccgtcgacaagcaaatcttcctttgagctagaatttgcaggaacaaacgatgatacatatcaaaagctcaaagaagaaaatgagaggctaaaaatgagcttgactcaactaaaagggaaatgcattgctcaaccttctcaagataaccgtgatcacatggtgaagaagcttgagacgggaacaaccgaggcatgcactaaatcccttgaagaaaatgtcaaggacttgaggattgccaagaggaggaatcaaaagaagaaaatcaatacctcttctaaaagcctcaaccatgcctccataaaaggtaacatccaaggtaataatcaagttacacttcatacaaatagaatcaagaagtgtagtgaatgctttgaagaggggcacttgattagatcatgtccctatattaaaaatggcttgattattaacaaggatgataaactttgttttaaatgttcaaggaagggacactttattaaatcttgtccccatttaaaacaaaagggcatagggttagaaaagaaagtttttactaaccatgtagcaagcaacaaacaaggaaagaagaaatcttcaaaacttggaaaacgcctatggtacacatgccgagaaaagggatatcaatgcaagggttgtcccattggtaactcctccactcatagcttgtcatttgattcatatataactaggcaacccaaaattgcaacttgtgctagaaaggcaatgaatttgccaagcgctagcacaaaggacatttgggttcctagatctttgttgactaaccataatggattcatcaagcgatgggtaccaaaacatacttgacaagctttgcaggagaaggagatgatatgaaactttgggtgcttgagagagtcaagtcaattcacattaactcaagctatcaatctacaatgatctacatatccaagattgacccaaggttatttcaaattattatgtctaaaactcatatcatctcgggaaaatattgatgttgtaggaaacaaagaactaatcccaagtcgaaaagtcaagacctacaacatggaggaaagccaaaggatggtaacaattatgcttttaagtgcaaacactacaccaaaatcatacacttcctacggtttt

SEQ ID NO: 204850 - DNA, 1173 bp, Zea Mays
tttgattcttaatttatttaagctggattatataatgtaaacgtaaacaaagagccactgattgctgctccacggtctaccgtgatctgataataacaaaacctgtactcctgtaggctgtagcccaacgagaggaatcaaattggacaaccctgtcgccctctcggtctccctcgagcttttcttgtgcgcagccgcagccgcagccgctgcttttcgttcgtcttcatcctacgcgagggcgaaacccacaaaccctctccctcccgtactccggcctacacatccaggggcgatgacgctgggtagctccggcgccggatcgagcgtcgtcgttccccgaaacttcaggctattagaggagctcgagcgtggagagaagggcattggtgatggaacagtgagctatggaatggatgatgccgatgacatctacatgcggtcatggactggtaccatcattggccctcacaatactgtacatgagggtcgcatctaccagctgaagttgttttgtgacaaggactatccggagaagccaccatctgtcagattccactcaagaatcaacatgacatgcgttaatcacgagacaggaatggttgatccaaggaagtttggtttgctagcgaactggcagcgggactacacgatggagaacatcctcacccagctcaagaaagagatggctgcctcgcagaatcgaaagttagtgcagcctccagaagggacatcctaacccagctcaagaaagagatggctgcctcgcagaatcgaaagttagtgcagcctccagaagggacattcttctaacgaagtgttcacttggcccgtcatgggatccaacagtaattgaaacttttatgggctaaaaaacagcgtctacatctggtgcccctgcctgtctttgtgattttttatgacttttatgttcttgtatcgtgaaccgcagtgaacaacggttgttgcaagttccagggatatctttggaagtggtaaacaaatgcgtcttatttctatgtaatattagaccccgtgcgtgtgtggtttcaaggtacagctccctctcaactgttgccgtgcattccgtcgatttgcttgacgtctttcgtccacatgtgcccagcagtattctctatgctcttgctttcctgtcatacttccaactggcac

SEQ ID NO: 204851 - DNA, 1963 bp, Zea Mays
cgcaccgtcgaattccccgtccgaccccactggtcccggcctctgcagggtggcccacccatgacccatcccgcgaccgcgacccgaccgctcccaccttccccgcctcgtcgtccccctgcataaccaccaccccaccaggccaccattccttcctcccctggtcgcccccgcctccatggccctcgcgtgcgcgcccataccgctcccgagtccctaggacgcggcacgcacccttctcgcgggcgcgggcgcgggcgcggggcgcgggagcaggcatggcgtcgcaggtcgctgggtcaaccccggcggtggcggcgcttgggttccttctcccgaccttctgggagatcgaggtcacgtgcgccgccgcgatgatcctcgtggcgctttacgttgcctacgagctcctcaacccgcgctcctcgcaggcggcagcggcgggcgacgccgacgagctcctcgtgcgggggctggacggcgccgacaagttcaaggggggtgtgagcggcccctctgcctatgtagtgaagctcgaattgttggctgcaaaaaatttgatggcggcgaacttaaatgggacatctgacccatatgcattgatcacttgtggtgcagagaagcgtttcagctccatggtccctggctcaagaaacccaatgtggggagaggaattcaatttttttgttgatagtcttcctgtaaagataaatgtcacgatatatgactgggacattgtatggaaaagcacaatccttggctcttttactgttactgttgaatctgaggtaccgagtggaccaatttggcatacacttgacagcacatcaggccaggtgtgtcttcatattaaagtaatcaaggttcatgaaagttcctccagggcaataaatagctcagctgaggctggtgctcgtagaaggatttccttggataagcaaggtcctactgtagttcatcaaaagccaggtcctttgcagacaatttttgaactgcctccagatgaggttgttgaccacagttattcatgtgcacttgaaaggtcatttctgtaccatggacgcatgtatgtctcttcatggcatatttgctttcattcaaatgtcttttcaaagcaaatcaaggttgtgattcctttgagagatattgatgagataaggagaagtcagcatgcagttattaatccagctattacaatttttcttcgaatgggagctggaggatttggtgttcctccgttaggatgtccagatggaagagtcaggtacaaatttgcatcgttttggaacagaaaccatacatttagagcattgcatcgagctatgaagaacttcgtaatgatgatagacgctgagaaacaggaacgtgctcagtctgcattacgtgcacacagtagttcaagaaaaaatagcaagaaggagataaatgtaccagaagattgtgctgcattaacagggaagttacaaccttttgtcaaagaagaagttttggtccctgtattcaatggaacttttccctgtactgcagaacagttcttcagtattcttttaagtgatgattcaaattacataacagagtatcgaacggatcggaaggataaagatataaatctgggccaatggcacgttgcagatgagtatgatggccaggtgagggaacttaattgtaaatcaatatgccatagtccaatgtgtcctccttattcagcaatgacagagtggcagcatatagttctttcagctgacaaaatggatctggtatttgagacagtacagcaagtacatgatgttccatttggttccttctttgaggtgcactgtaggtggtgtgtgaaaactatcagttctaactcgtgcagtctcaacataagtgctggtgcgcatttcaagaaatggtgcatcatgcaatctaagataaagagtggtgctgtggatgagggttctagtacactaattgacatgat

SEQ ID NO: 204852 - DNA, 1963 bp, Zea Mays
cgcaccgtcgaattccccgtccgaccccactggtcccggcctctgcagggtggcccacccatgacccatcccgcgaccgcgacccgaccgctcccaccttccccgcctcgtcgtccccctgcataaccaccaccccaccaggccaccattccttcctcccctggtcgcccccgcctccatggccctcgcgtgcgcgcccataccgctcccgagtccctaggacgcggcacgcacccttctcgcgggcgcgggcgcgggcgcggggcgcgggagcaggcatggcgtcgcaggtcgctgggtcaaccccggcggtggcggcgcttgggttccttctcccgaccttctgggagatcgaggtcacgtgcgccgccgcgatgatcctcgtggcgctttacgttgcctacgagctcctcaacccgcgctcctcgcaggcggcagcggcgggcgacgccgacgagctcctcgtgcgggggctggacggcgccgacaagttcaaggggggtgtgagcggcccctctgcctatgtagtgaagctcgaattgttggctgcaaaaaatttgatggcggcgaacttaaatgggacatctgacccatatgcattgatcacttgtggtgcagagaagcgtttcagctccatggtccctggctcaagaaacccaatgtggggagaggaattcaatttttttgttgatagtcttcctgtaaagataaatgtcacgatatatgactgggacattgtatggaaaagcacaatccttggctcttttactgttactgttgaatctgaggtaccgagtggaccaatttggcatacacttgacagcacatcaggccaggtgtgtcttcatattaaagtaatcaaggttcatgaaagttcctccagggcaataaatagctcagctgaggctggtgctcgtagaaggatttccttggataagcaaggtcctactgtagttcatcaaaagccaggtcctttgcagacaatttttgaactgcctccagatgaggttgttgaccacagttattcatgtgcacttgaaaggtcatttctgtaccatggacgcatgtatgtctcttcatggcatatttgctttcattcaaatgtcttttcaaagcaaatcaaggttgtgattcctttgagagatattgatgagataaggagaagtcagcatgcagttattaatccagctattacaatttttcttcgaatgggagctggaggatttggtgttcctccgttaggatgtccagatggaagagtcaggtacaaatttgcatcgttttggaacagaaaccatacatttagagcattgcatcgagctatgaagaacttcgtaatgatgatagacgctgagaaacaggaacgtgctcagtctgcattacgtgcacacagtagttcaagaaaaaatagcaagaaggagataaatgtaccagaagattgtgctgcattaacagggaagttacaaccttttgtcaaagaagaagttttggtccctgtattcaatggaacttttccctgtactgcagaacagttcttcagtattcttttaagtgatgattcaaattacataacagagtatcgaacggatcggaaggataaagatataaatctgggccaatggcacgttgcagatgagtatgatggccaggtgagggaacttaattgtaaatcaatatgccatagtccaatgtgtcctccttattcagcaatgacagagtggcagcatatagttctttcagctgacaaaatggatctggtatttgagacagtacagcaagtacatgatgttccatttggttccttctttgaggtgcactgtaggtggtgtgtgaaaactatcagttctaactcgtgcagtctcaacataagtgctggtgcgcatttcaagaaatggtgcatcatgcaatctaagataaagagtggtgctgtggatgagatacaggtgtaaaaagaatgatctac

SEQ ID NO: 204853 - DNA, 1953 bp, Zea Mays
agtagggtaaagtgtaaatgatggatacacatgctatcctgaaactgttctgtgggaaaagcaatggtggaagctccatggtccctggctcaagaaacccaatgtggggagaggaattcaatttttttgttgatagtcttcctgtaaagataaatgtcacgatatatgactgggacattgtatggaaaagcacaatccttggctcttttactgttactgttgaatctgaggtaccgagtggaccaatttggcatacacttgacagcacatcaggccaggtgtgtcttcatattaaagtaatcaaggttcatgaaagttcctccagggcaataaatagctcagctgaggctggtgctcgtagaaggatttccttggataagcaaggtcctactgtagttcatcaaaagccaggtcctttgcagacaatttttgaactgcctccagatgaggttgttgaccacagttattcatgtgcacttgaaaggtcatttctgtaccatggacgcatgtatgtctcttcatggcatatttgctttcattcaaatgtcttttcaaagcaaatcaaggttgtgattcctttgagagatattgatgagataaggagaagtcagcatgcagttattaatccagctattacaatttttcttcgaatgggagctggaggatttggtgttcctccgttaggatgtccagatggaagagtcaggtacaaatttgcatcgttttggaacagaaaccatacatttagagcattgcatcgagctatgaagaacttcgtaatgatgatagacgctgagaaacaggaacgtgctcagtctgcattacgtgcacacagtagttcaagaaaaaatagcaagaaggagataaatgtaccagaagattgtgctgcattaacagggaagttacaaccttttgtcaaagaagaagttttggtccctgtattcaatggaacttttccctgtactgcagaacagttcttcagtattcttttaagtgatgattcaaattacataacagagtatcgaacggatcggaaggataaagatataaatctgggccaatggcacgttgcagatgagtatgatggccaggtgagggaacttaattgtaaatcaatatgccatagtccaatgtgtcctccttattcagcaatgacagagtggcagcatatagttctttcagctgacaaaatggatctggtatttgagacagtacagcaagtacatgatgttccatttggttccttctttgaggtgcactgtaggtggtgtgtgaaaactatcagttctaactcgtgcagtctcaacataagtgctggtgcgcatttcaagaaatggtgcatcatgcaatctaagataaagagtggtgctgtggatgagctgaagaaagaagtgaaggtgatgttagactttgcgcaggggtatatgctcaaagttagctctcctgaccaagagaacagtaatctcgcgcagcaagacaacacggcgccggatgcgccttctgatacagggtgacagccgccatcacatgacaacgaatcatgccattacgatgttatacacagaagggcaggtggaccagtaactagtagtccacatgaaccacatctaacatgttaagctgacttccaaaagaatgggtggaccgtgtgtagcgtgttaagttcgtttcctgccattgctctatccgtttttggcagtttggctgatgtatatatatagctgtaaacacacgcaaatataaagtggtggctgtggcaggccagtgtgttgtttgagtataaaaacaaagaaagaaacggaagagagaaatatttgccacagaaccaacgcttctcgagtcacagactcacaggggggcatatgttgtgcaaataaaagcttgatgtcctagaaacaactttgcaactgtcagtttgttaaggccttgtttaaatgcactagagtattttat

SEQ ID NO: 204854 - DNA, 1297 bp, Zea Mays
ttttatctattattttgggggtggggttggcttatcaaaggaagagtcaggtacaaatttgcatcgttttggaacagaaaccatacatttagagcattgcatcgagctatgaagaacttcgtaatgatgatagacgctgagaaacaggaacgtgctcagtctgcattacgtgcacacagtagttcaagaaaaaatagcaagaaggagataaatgtaccagaagattgtgctgcattaacagggaagttacaaccttttgtcaaagaagaagttttggtccctgtattcaatggaacttttccctgtactgcagaacagttcttcagtattcttttaagtgatgattcaaattacataacagagtatcgaacggatcggaaggataaagatataaatctgggccaatggcacgttgcagatgagtatgatggccaggtgagggaacttaattgtaaatcaatatgccatagtccaatgtgtcctccttattcagcaatgacagagtggcagcatatagttctttcagctgacaaaatggatctggtatttgagacagtacagcaagtacatgatgttccatttggttccttctttgaggtgcactgtaggtggtgtgtgaaaactatcagttctaactcgtgcagtctcaacataagtgctggtgcgcatttcaagaaatggtgcatcatgcaatctaagataaagagtggtgctgtggatgagctgaagaaagaagtgaaggtgatgttagactttgcgcaggggtatatgctcaaagttagctctcctgaccaagagaacagtaatctcgcgcagcaagacaacacggcgccggatgcgccttctgatacagggtgacagccgccatcacatgacaacgaatcatgccattacgatgttatacacagaagggcaggtggaccagtaactagtagtccacatgaaccacatctaacatgttaagctgacttccaaaagaatgggtggaccgtgtgtagcgtgttaagttcgtttcctgccattgctctatccgtttttggcagtttggctgatgtatatatatagctgtaaacacacgcaaatataaagtggtggctgtggcaggccagtgtgttgtttgagtataaaaacaaagaaagaaacggaagagagaaatatttgccacagaaccaacgcttctcgagtcacagactcacaggggggcatatgttgtgcaaataaaagcttgatgtcctagaaacaactttgcaactgtcagtttgttaaggccttgtttaaatgcactagagtattttat

SEQ ID NO: 204855 - DNA, 603 bp, Zea Mays
gagattgtcagctaggacagcttgagcaactgaagaaagaagtgaaggtgatgttagactttgcgcaggggtatatgctcaaagttagctctcctgaccaagagaacagtaatctcgcgcagcaagacaacacggcgccggatgcgccttctgatacagggtgacagccgccatcacatgacaacgaatcatgccattacgatgttatacacagaagggcaggtggaccagtaactagtagtccacatgaaccacatctaacatgttaagctgacttccaaaagaatgggtggaccgtgtgtagcgtgttaagttcgtttcctgccattgctctatccgtttttggcagtttggctgatgtatatatatagctgtaaacacacgcaaatataaagtggtggctgtggcaggccagtgtgttgtttgagtataaaaacaaagaaagaaacggaagagagaaatatttgccacagaaccaacgcttctcgagtcacagactcacaggggggcatatgttgtgcaaataaaagcttgatgtcctagaaacaactttgcaactgtcagtttgttaaggccttgtttaaatgcactagagtattttat

SEQ ID NO: 204856 - DNA, 570 bp, Zea Mays
atatatataggtgcaagctgacggggtgatagttgcaacaccaactggcagcacagcatattctactgcagcagggggatcaatggttcatccaaacgtcccatgcatgctgtttactccaatctgccctcactcactgtcatttagacctgtcatccttccggattctgcccggcttgaattaaagatgaggcaagaagcaatgcatgggtttcgtttgatggcaaaaggaggcagcaactgtcaagaggagattctgttcgtatatccatgagtcagcacccactcccaactgttaataaatctgaccaaacgggtgattggttccgcagcctgatcaggtgtctcaactggaacgagagattggaccagaaggcattataggcactagaaaattttttattgtttctgtacatatgtaaatttatacacatatagttttgtttttctgccaacatgtacaacgtgtaacatcaaagaatcttgcacgtaaggagctccgtagcttactttatccatgtattcacgtgcttcacaaatcaacttatatattatatgcccgtacgttgc

SEQ ID NO: 204857 - DNA, 3103 bp, Zea Mays
attttttttgtcgttttttcctcttgttttgggcttgatctggtggccgacccatggtggaagggatggtagtggccgtgccgaatggggtgaaggcggatggcgccgccgccaccgccgccgccgctaaggcagattctcctaaatccgttctggaggacgagaaaatttctgaatccaagaatgggaacgcctccttagccacggagccagttaagcaaggggacgagacctcggacgattttgtggatgcaatgatgtcccttcctgttgaccatgaaatcgacagtgccgatgtgccccctgctgttgaggcagtcaaggacgaagaccagcttctggagcctgccaaggaggagaaatttgatgatttcctggatgcaggtttatctatacctattgatcttgaggccaagaatggtgatgtatccctgatcacagaagcaatgaaaaaggaagaagaacagctcgaggaggcgcggattaaggcagaggaagaagaggaagccaggaagagggaggaagttgcaaaacttgcttttgatcctgagtcgcggtatagcaagttagatgagctactgacgaagacacaactattttcagagttcctacttgagaaaatggataaaatcgccgatgaagttgttgaacctcaaggtgaagagtcaccagtagagaagaagaaaagacgtggccgaaagaggaaagctaatgccacaccacaatacaatgataaaaaggccaagacagcagtggcagccatgcttacaagatctcgtgaagatcgtcttgctgatgactctactctctcggaagaagaaaggttgaaaaaagagcaagccaatcttgtgcctttaatgactggtgggaagttgaagtcgtaccagatcaagggtgtaaagtggctaatttcattgtggcagaatgggctaaatgggatacttgctgaccaaatgggccttgggaaaacaatccagacaattggatttcttgctcacctgaagggcaaaggcatgcatggtccatacttgataattgctcctctttccactctctcaaattgggtgaatgagatctcgaggtttgttccatctgtttctagtatcatttatcatggagataaagtggcccgagctgagataagaagaaaatttatgcctaaaactgctggtcctgattttcctataatagtgacttcatatgagattgctatgttagatgcaaggtttcttgctcactataggtggacgtatgttgttgtggatgagggacatcggttgaaaaattctaagtgtaaactattgagggagatgaagcgcataccaatggctaacaagctccttttgactgggacacccctccagaacaatctggcagagctgtggtcactattgaacttcattttgcctgatatattctcatccaatgaggaatttgaatcatggtttgatttttctgcgaaaggaagtgaagaaccagaagaaagtgaagaaaaaagaagggttcatgttgtttcaaagcttcatgccattttgcgcccatttcttctgagacggatgaaggaggatgtagaacaaatgcttccacggaagaaagagataatcatttatgctaacatgactgaggttcagaagcgaatcctgtatcacttagttgagaaaacctttgatgtctacttgatgattatctctttcttcctgttgcgtagacctggcatcaagacaaagctaaatagtctctttattcaattgaggaagaactgcgcccatcctgatcttttggaagctgcatttggaacaacaagcctttatccacctgttaataagcttttagagcaatgtggcaaatttcagcttctggacaggctactaacttccctacttgcacgcaagcataaggttctaatattctcacaatggacaaaagttttggacattcttgagtattacctagattcaaaaggccttggggtttgcagaattgatggtagtgttaatttggaagagaggcggcggcagatagcagagtttaatgatttgaatagcagtctgaatgtctttattctgagcacacgggctggcggacttggtatcaaccttacttctgctgatacatgtatcctttatgacagtgactggaatcctcagatggatcagcaggccatggatcgatgccaccggattggtcaaacacgcccagtgcatgtatataggctggctacctcatattctgttgaggagcggatcatcaagaaagcttttgggaagttaaagctagagcatgtggtgataggcaagggacagtttgaacaagaaagagcaaagcctaacgctttagaggagggggagctgctggcgctgcttagggacgagcaggacgaggaagatcggatgatccagaccgacatcagcgacgaagacctcttgaagctgatggaccggagcgacctgtccggaccacctggtgctgccgatgccgctccactgatcccgctgaaaggccctggctgggaggtcgtggtcccaaccaagagcggtggcggtatgctctcgtcgctcaccagctgagcgatgccggcaccatgtttggggtgcccattttgctagtcactcatcatgtggacgatggggcgcttgttggccggtcgccgatcaggcggatattttgcatgtatgcccccctacaaactgttgatctgggtgttgagcctgcaacagtagggttaggttatttcctcccgtgtccgtgccagtgacacgcaagtcggattgagttatgctgtgaacttctgatgagtcgctgcaagctgcctttctgacttgagctttttgctgcttctgttgctgcgttctatgatgtagtaacagtagctgatggtttacaccaaagcggagatggatgccctctatgatgtagtccttgctatataacttgaacactgatgtgattttctgtagtgtcaactgccatgctttatcggttttagtgtccttgtcggcagaagcgttgcaccatttttgtgatttgtgtccgcgtgtatggtgccaccttgtggacgtctcttctgatgaaatagaaactgttgtgcgagaatgaatccagg

SEQ ID NO: 204858 - DNA, 3152 bp, Zea Mays
cctgttttatcgcacactcccaatttgtgttgctagtttggcactatttctggtttagggttctagtctcgtcgtgtgagggcttgatctggtggccgacccatggtggaagggatggtagtggccgtgccgaatggggtgaaggcggatggcgccgccgccaccgccgccgccgctaaggcagattctcctaaatccgttctggaggacgagaaaatttctgaatccaagaatgggaacgcctccttagccacggagccagttaagcaaggggacgagacctcggacgattttgtggatgcaatgatgtcccttcctgttgaccatgaaatcgacagtgccgatgtgccccctgctgttgaggcagtcaaggacgaagaccagcttctggagcctgccaaggaggagaaatttgatgatttcctggatgcaggtttatctatacctattgatcttgaggccaagaatggtgatgtatccctgatcacagaagcaatgaaaaaggaagaagaacagctcgaggaggcgcggattaaggcagaggaagaagaggaagccaggaagagggaggaagttgcaaaacttgcttttgatcctgagtcgcggtatagcaagttagatgagctactgacgaagacacaactattttcagagttcctacttgagaaaatggataaaatcgccgatgaagttgttgaacctcaaggtgaagagtcaccagtagagaagaagaaaagacgtggccgaaagaggaaagctaatgccacaccacaatacaatgataaaaaggccaagacagcagtggcagccatgcttacaagatctcgtgaagatcgtcttgctgatgactctactctctcggaagaagaaaggttgaaaaaagagcaagccaatcttgtgcctttaatgactggtgggaagttgaagtcgtaccagatcaagggtgtaaagtggctaatttcattgtggcagaatgggctaaatgggatacttgctgaccaaatgggccttgggaaaacaatccagacaattggatttcttgctcacctgaagggcaaaggcatgcatggtccatacttgataattgctcctctttccactctctcaaattgggtgaatgagatctcgaggtttgttccatctgtttctagtatcatttatcatggagataaagtggcccgagctgagataagaagaaaatttatgcctaaaactgctggtcctgattttcctataatagtgacttcatatgagattgctatgttagatgcaaggtttcttgctcactataggtggacgtatgttgttgtggatgagggacatcggttgaaaaattctaagtgtaaactattgagggagatgaagcgcataccaatggctaacaagctccttttgactgggacacccctccagaacaatctggcagagctgtggtcactattgaacttcattttgcctgatatattctcatccaatgaggaatttgaatcatggtttgatttttctgcgaaaggaagtgaagaaccagaagaaagtgaagaaaaaagaagggttcatgttgtttcaaagcttcatgccattttgcgcccatttcttctgagacggatgaaggaggatgtagaacaaatgcttccacggaagaaagagataatcatttatgctaacatgactgaggttcagaagcgaatcctgtatcacttagttgagaaaacctttgatgtctacttgatgattatctctttcttcctgttgcgtagacctggcatcaagacaaagctaaatagtctctttattcaattgaggaagaactgcgcccatcctgatcttttggaagctgcatttggaacaacaagcctttatccacctgttaataagcttttagagcaatgtggcaaatttcagcttctggacaggctactaacttccctacttgcacgcaagcataaggttctaatattctcacaatggacaaaagttttggacattcttgagtattacctagattcaaaaggccttggggtttgcagaattgatggtagtgttaatttggaagagaggcggcggcagatagcagagtttaatgatttgaatagcagtctgaatgtctttattctgagcacacgggctggcggacttggtatcaaccttacttctgctgatacatgtatcctttatgacagtgactggaatcctcagatggatcagcaggccatggatcgatgccaccggattggtcaaacacgcccagtgcatgtatataggctggctacctcatattctgttgaggagcggatcatcaagaaagcttttgggaagttaaagctagagcatgtggtgataggcaagggacagtttgaacaagaaagagcaaagcctaacgctttagaggagggggagctgctggcgctgcttagggacgagcaggacgaggaagatcggatgatccagaccgacatcagcgacgaagacctcttgaagctgatggaccggagcgacctgtccggaccacctggtgctgccgatgccgctccactgatcccgctgaaaggccctggctgggaggtcgtggtcccaaccaagagcggtggcggtatgctctcgtcgctcaccagctgagcgatgccggcaccatgtttggggtgcccattttgctagtcactcatcatgtggacgatggggcgcttgttggccggtcgccgatcaggcggatattttgcatgtatgcccccctacaaactgttgatctgggtgttgagcctgcaacagtagggttaggttatttcctcccgtgtccgtgccagtgacacgcaagtcggattgagttatgctgtgaacttctgatgagtcgctgcaagctgcctttctgacttgagctttttgctgcttctgttgctgcgttctatgatgtagtaacagtagctgatggtttacaccaaagcggagatggatgccctctatgatgtagtccttgctatataacttgaacactgatgtgattttctgtagtgtcaactgccatgctttatcggttttagtgtccttgtcggcagaagcgttgcaccatttttgtgatttgtgtccgcgtgtatggtgccaccttgtggacgtctcttctgatgaaatagaaactgttgtgcgagaatgaatccagg

SEQ ID NO: 204859 - DNA, 1897 bp, Zea Mays
ggaacatccaacaccgcaagcaatttgctgcatgttttcttttgaactctaattaagcgattttatataagaactcaagagtgctcgacctccttacctcccacaaatagaaaaaaaaaccctgggcatataacattaatcatgggtttcttaaggggccgcttccgtcgctcaactcaagcaagtacaccaacggcataacgctgtgcctcttcctgctccaccttgccgccgcggcagccgccatggggttcttcgtgttcaagaccgtccaggagatcagccagcacccaaggtcgcacgacgcgcagcgagagcgcagcctgctgcgggactggctgctgcccgtggagggcgcggtggcgctcagcatcgtgctggccttcgcgtggcagaaggccgtgcgcgcgtggccgcgcgctatggtgcgcgtcatcctctggtccagcttcggtgtgaccctggccgtgggcgcgctgctcatgtgcttctcgatgctggccactgtggggctgggcgtggcgatggtggtgttctccatcggcaccgggctgtacgcgtgctgggtgacgcggcgtgtgggcttcacggcgcgggtgttcgagcgcgcggtgcagccggtggataagttccacggtttgaatggccccgcgtacctgatggtggcggcgggcttcgcgtggatctccgtgtggtgcgtggcggtgatcggagctgtgaacttccgcttccccgggctcaccatcctggggctggtggtcagcctggcgtggaccgccgaggtgatgcggaacgtggcgaacctgacggtgagccgggtgatcgcgctctactacctgcgcggcatgcagtcgagcgtgcagttcagcttccaccgcgcgctgtcgcacaacctcggcagcgcctgcctgggctcgctcttcgtgcccaccatcgaggcgctccgcatcctggcgcgcgggctcaacctgctggagggcgaggacgagttcatgttctcctgcgcgcactgctgcctccacgtcatgaacgccatcttcagcttcggcaacagctgggcctttgtccacatcgcggcgtacgggcgagggttcgtgcaggcgtcgcggagcacgtggagccagttcgaggcgctgccggggatggcggcgctggtggactcggacatcaccagctccgtgtgcttcctgacgggcgtgacgagcggcgcgctgtgcgtggcgctggcggggtcctgggcgttcgcgacgcaccggcactacacggccaccgtgtcgctgctggccttctacgtcgggtacctgatgacccgcatcggcatggcgctgccccaggcgtgcgtcggctgctactacgtctgctacgccgagaaccccacgtcgcggctcttcgacggtaacataccgaaccagctgagcaagatgcaggaaagccgcggcccgtccgtgccgacgccgcggttcccgcaccgccagcacgtcggcgcgtgagtgagacgacggagcttcttttccctcgtgtgccaccgccgctcgtcggtgtggcttgatccggatgagggcggcggctcgtacggcggtctggagatcaaattttatttttctagttttgtaaatttatttatccattttttagctgacagaaatggtgaatccccaatattttgggtgtatgtagacagagtactattcttgcataggagttatgtgaatattttaactaactgaatcagaatcaggctttgtccatactgatttgctgagcataaagccataaacaatagctgtagctcacactttgaggctttgtattgtcagctgctgatgggcgtggatagccatgtctcagcaggatagatagatccatagaaaatcactccttgcagttcataaaacta

SEQ ID NO: 204860 - DNA, 718 bp, Zea Mays
gcgaaatggatggagtatgctataagatacaacgcagtgatggagagttggggcatgctgttgaactggggccaagacggaggaggggggcagggcattgccttgcagataagggacgtccgtgtgcgtgtgctcggtgaggtggcatgggtgaacatgaaggcgaacgtgctgttccatgtgaccaacgtctacgagctctgtaacggcaggtggtatatggtccatcaccacagctcgctcatggctgaccctcctccgcacaatatgtttgcttgatgtgctattcttgagcggagattagattatcggacgaagatttcctacctcctccccacaacccttttattcgttgtggatctgctgtttgttggtattgctctggatctccgttccgcagttttgtacagatgtgttttaggtggtaaggcttattataaattggtggcgccctggttgccgcggctgacttgatttatctggcctgcttccagacggtgcgagttgatgagtaaaatcctcatcttctagaacggtcgaagctcaatggtgtttgttctactgactggactgagtcatggtctggtagctgatgatgattccgaatctatggcattcatactatactctagttgaggtgctaattgtaattgtcgctagggaaacgcgtcttctggtgcttgaacagactagatcgagtccgtttcttacgtttgag

SEQ ID NO: 204861 - DNA, 2978 bp, Zea Mays
ccacaatctctctgtcccgggagtccgtcctttctgctctgtcgttactgaaacccagcgagcaccacttcccatctgctcgtgtcagtcagttcctcggctgtgccgtgagtggcggcggcagggagcggcgcagcgcagcgcagaagcagcggagtggcccaggcgatggcgccgagggaccccaaggaggacggcttcggcgtgggcggcgcggcggatccggaggccgacatcgaggccccgctgctggtttcctccggatcatcgttcctcctggacccggcgctcgaggacggcggcggcggcgacgaggagcagcgccgccgccgccgccggttcctccacggcagccacacgcactccaacaccacctcccaggtcgcgctcgtcggcgccgacgtctgccccatcgagagcctcgactacgagctgatcgagaacgacgtgttcaagcaggactggagggcgcggggacggggccacatcctgcgctacgtggcgctcaagtgggccctctgcttcctcgtcggtgccctcgcagccgccgccggcttcgtcgccaacctcggcgtcgagaatgtcgccggcgccaagttcgtcgtcacctccgacctcatgttggacggcagacacggctcggcgttcgcggtgttcctggcgtccaactttgcgctcaccatgttagccgcggtgctgacggtgtacgtggcgcctgcggctgccggatccggaatcccggaggtgaaggcctacttgaacggtgttgatgcccccaacatattctcactgaaaactctgatagtgaagattgtgggatgcattgcggcagtatcatcatcactgcatgtgggaaaagctgggccacttgtacacacaggcgcatgcattgcatcaatacttgggcaaggtgggtcacgtaaatatcgtatgacatgtaggtggctcaggtacttcaagaatgatagggatcggagggaccttgttacttgtggttctgctgctggtattgctgctgctttccgggcgccggttggtggagtcctttttgctctggaaacagtatcttcatggtggaggagtgctctactatggcgagcctttttcacaacagcaatggtcgctgttgtgcttagggcattgatagacttctgtcaaagtggcaagtgtggtttgtttgggaaaggggtttttggaggaatactggggagtttgtacaactttttcctggacaaggttctccgtctctacaaccttatcaacaaaggaaaagcttacaaactactactcgctgcaacagtcactgtttgtacatcatgttgtctatttggcttgccatggattgctgcttgcaaaccttgtccaactgacactagagaagcttgtccatcaataggccgttctggtaatttcaagaaattccaatgtgcaacagatgaatacaatgatttggctagcctattcttcaacacaaatgatgacactattagaaacctctacagtgctggcactgatgatgaattccacatttcgtccatccttgtgttctttattgcatcgtattttttgggcatcttcagctatggccttgctttaccatctggcctttttgtgccagttattttaactggtgcagcttacggccgtctggtaggcatgttgattgggtcacagtcaactttagatcatggtctttttgcagttctcggctctgctgctctgttaggtggatcaatgcggatgactgtttcagtttgtgttatcatcctagaactgactaataatctgcgtatgcttcctttggtaatgcttgtccttctcatatcaaaggtggtggcagatgcgttcaatgcaaacgtctatgatttgcttgttagattgaaagggtttccacaccttgaaggttatgctgaaccatacatgaggcaactgtcagtcagtgatgttgtaactggtcctctacagacattcaatggcatagagaaggtcggccatatagttcatgtcttaaagacaactggccacaacggtttccctgtggttgatgagccaccattttcagatacccctacattgtatggtctaattcttcgagaccacctgcttgttctattgaggaagaaggatttcatccgtagttgcacagcgtctacactgaatgctttaaaccatttctcacatgctgagtttgctaaacgtggatcaggaaaacatgacaggattgaggacattgaattatgtccagaagaactggaaatgtttgtagacttgcatccattcacaaacacatctccatatactgtccttgagactatgtctttggctaaggctcttatacttttccgtgaagttggattgagacatcttctggttctaccaaaatcttctaagagggcacctgttgtcggcatactaacaagacatgatttcatgcctgaacatatattgggccttcatcctttcctctttaagagtagatggaagaaggtgcgacttggcaaggtaaaagttaccaacatattttgaagcttgctggtgactggtgatttggggaggtcaccgaaggatcatccgaagctgtatacctggtgtcaaatcacgtattttgcagagaataactcaacttgaaaactagtggatcttacttcaagaaaataatttcgttgtaaatgctaagaaggggatggaacatggctgctaagtgctaacaagttattttcccacgaacaagaggaatctcactgtaaatttattatgcatactttagctaacctttgaaaacaaatgctatctgtagtgcctagatgcattccttattaggcccatcagtgcaaaagtaacttcagttccatcctccattcatataggctactcaaaatagctgctcatatcctgcatatggtgtgataaatacaatgtatttcctcagctttgttccatagcttctttttgcaatattcatgtgcttacattgtggt

SEQ ID NO: 204862 - DNA, 1525 bp, Zea Mays
gcactcggcccacgcggcgcacggcacctcaagctctgctcctccttttccactgctctgcgtctgcgtctgcgtctgcactgcttcgcgtctccctccccccgcctccgcccccgccccggcaaaaagcaaaacacggccatggaaggctacgaccgcgagttctaccagttcagcgaccagctgcgcctgcagacggccgccttctcgggcctctccctcggcgactccatctggtcccccgccggccggcgcaacaacagcaacgacgtcctcttcgccgcctccgcgtcgcccgccgacgccgccgccaagagcaacgccgtcgtcgggctcaagctcaacgacggagggcccggcctcatcggctccgggaagctggccttcggcggcggcgccggaggcggcggcaccaacaaggccgaccgctacaacaacaacaacctccccaacaccgacaacaagaccgtgtacaacaccagcagcagcagcttcatgggcaacggcagcagctacgccaagaacaacaacaacaacgccgacatgctggcgttcgacaagatggggagctacggctacaacggcggcggtaataccaacaacaacagcaacggcgtggaggtgaagagctacttcaacaagtccgccgggagggcggcgagcaacaacaacaacaacaacaacagccacgccggcggcggcaacaagaagggcggcgccggggagtacggcaggaagaagcacgccaagagcgagggcgcggcggcggccacggacaagcagcggttcaagacgctgccggcgtcggaggcgctgccgcggggccaggccatcggcgggtacatcttcgtctgcaacaacgacactatggacgagaacctcaggagggagctgttcgggctgccgtccaggtacagggactctgtgcgtgctatccgcccgggactgcccctcttcctctacaactactccacgcaccagctccacggcatcttcgaggtgcgggtggcaacgcggaagatctacgacccgctggaggaggacgccttccgccccatcctgcaccactacgacgggcccaagttccggctcgagctctccgtcaccgaggccctcgccctcctcgacatcttcgccgacaaggacgacgcctgatccccatcggatctgtcgtcgggccactcgaagctcggatgcacgaatgaatgaacaaacaataataacgaatggatgtgcatgtatatcgtcatgcgcatgtcccacgacgagacgggagtataccacggtgtagtagtattatattaatacgtaattaatatagtatgtccacctttgtttgatactactaagggctatgtattgaggcacgcgtcccattgttttgtttttataacacttgtgcgatggttgcagaggactagccctctttttttttggtaagatgtctgtattattattattattcgggttccactgacatggataaaaaccatctgtgaaatagtttgctcttgtgctgtgctac

SEQ ID NO: 204863 - DNA, 2103 bp, Zea Mays
gcactcggcccacgcggcgcacggcacctcaagctctgctcctccttttccactgctctgcgtctgcgtctgcgtctgcactgcttcgcgtctccctccccccgcctccgcccccgccccggcaaaaagcaaaacacggccatggaaggctacgaccgcgagttctaccagttcagcgaccagctgcgcctgcagacggccgccttctcgggcctctccctcggcgactccatctggtcccccgccggccggcgcaacaacagcaacgacgtcctcttcgccgcctccgcgtcgcccgccgacgccgccgccaagagcaacgccgtcgtcgggctcaagctcaacgacggagggcccggcctcatcggctccgggaagctggccttcggcggcggcgccggaggcggcggcaccaacaaggccgaccgctacaacaacaacaacctccccaacaccgacaacaagaccgtgtacaacaccagcagcagcagcttcatgggcaacggcagcagctacgccaagaacaacaacaacaacgccgacatgctggcgttcgacaagatggggagctacggctacaacggcggcggtaataccaacaacaacagcaacggcgtggaggtgaagagctacttcaacaagtccgccgggagggcggcgagcaacaacaacaacaacaacaacagccacgccggcggcggcaacaagaagggcggcgccggggagtacggcaggaagaagcacgccaagagcgagggcgcggcggcggccacggacaagcagcggttcaagacgctgccggcgtcggaggcgctgccgcggggccaggccatcggcgggtacatcttcgtctgcaacaacgacactatggacgagaacctcaggagggagctgttcgggctgccgtccaggtacagggactctgtgcgtgctatccgcccgggactgcccctcttcctctacaactactccacgcaccagctccacggcatcttcgaggccgcgagcttcggcgggaccaacatcgacccgacggcgtgggaggacaagaagtgccccggcgagtcgcgctttcctgcgcaggtaccctactgtactgtctgcttcgatccacagtctagtactctagtctagcagccatggcggcggcggcggcggcgggtgatcgatcagctcaacgtaccacacgccacactagcgaagcgtgacttgtacgcttgtttcaattgtgttcaacaccaccaaacagtacatgtacatgtatcaccgacagacgaaaggctatcaatcacatcacgtgctgcgatggcgtgtggaatcgcaaaaagatttggtcagcggaggtaggttttggttgcgaaaaagtgaccgcccgccctaccctatacggcgggaccgcgtcaggtcagcagcttggttggctcgtagctttcgtcctagctagctactgtagtgtaggttgcttggtcagtcggcagaggatctggtcgcaggctccaagtgcgaccatctagatgctgtagctgctgcatttcctcgttattgacgcatggtgcttgcgatgtgatgtgctgcaggtgcgggtggcaacgcggaagatctacgacccgctggaggaggacgccttccgccccatcctgcaccactacgacgggcccaagttccggctcgagctctccgtcaccgaggccctcgccctcctcgacatcttcgccgacaaggacgacgcctgatccccatcggatctgtcgtcgggccactcgaagctcggatgcacgaatgaatgaacaaacaataataacgaatggatgtgcatgtatatcgtcatgcgcatgtcccacgacgagacgggagtataccacggtgtagtagtattatattaatacgtaattaatatagtatgtccacctttgtttgatactactaagggctatgtattgaggcacgcgtcccattgttttgtttttataacacttgtgcgatggttgcagaggactagccctctttttttttggtaagatgtctgtattattattattattcgggttccactgacatggataaaaaccatctgtgaaatagtttgctcttgtgctgtgctac

SEQ ID NO: 204864 - DNA, 2750 bp, Zea Mays
gttcaaggtaacgcatcatcacacctctcgaccgcccccttctctttcatcaatcaaggatcacagagctgccaaagccagaggagcgttatcagagcagggaggaagaagagcgttgtgttcgacgcaggagaatttcgagggacagcgactcgactcgactcgaagctctggagagatctagcggggctccggtgcagccgatgcatggcaactcgcaagggctgagctgctcgtcactggcgtaggaaagaagccgagccgagtaacccaaggcgtgcttgtttctttccatgcctttgcatttggagatggaaatcacatgcgccgtcgcagggctggatagaattcgttttggctctgcgtctaaagaaggttcaaaagagaagggcgtctggatctttagccgtttcaaaaaaaaaaacttccgtctcgtcctttttcagctgctctgcatctttatcagcatgccatgatgtagccatgatttttagtatggagtcgtcgcctcaccgatcccctcaaaagcagcagagctcgtgcagcagcaccatagccatagacaacacacaacaggggcgtttcgccaagtttctcgatcctcacccaagcacaaatgctttcaaaaaataccgcatctgctactacacggattatatatcccttccctggcctacctatgccgtcgtcgccatggacagggacagcagctcgtcggtctcggcgtcggacgggagctcggaggcgggggagcgcggcgggtgctgctcgtcgccgccgtccacgcggagcctcgtcgacacggcgggcaacaacctcatcagccgcaccgcgtccgacgcgtccacgtccctctcggaccggtgcagcagcgtcgacgtcgaccacagcgggccgttccagcccgccgccgccgtggccaagctcatcggccggtcgtccccgccgtccgccgccgcgtcgctcagacggctcagcatcaagccccgcgccgacgtgctcgaccgccgctccaccgaggacgagatggagctggtgaaggagcgcttctctaagctcctgctgggcgaggacatgtccggcggcggcaagggcgtctgcaccgccgtcgccatctccaacgccatcaccaacctctacgcgacggtgttcgggagctgccacaagttggagccgctgccggcggggaagaaggcgatgtggacaagagagatggactgcctcctctccgtctgcgactacatcgtccagttctacccgtccacgcagaccctgcccgatgggaccaaagttgaggtcatggcgaccagaccaaggtcggacatctacatcaaccttcccgcgctcgagaagctcgacgccatgctcatcgacattctggacagcttccagaaggcggagttctggtacgcggacgccgggacgaggtcgttcggctcggtcacctcgtcctcgtcgtcgaggatgtcgtgttcgtcgtcattcaggaggtcggctcaccggaacgacgataagtggtggctgccggtgccctgcgtcccggacgccggcctcaccgacaaggcgcgcaaggacctgcagcagaggcgcgactgcgccaaccagatccacaaggccgctgtctccatcaacagcggcgtcctcggagacatggaggtgccggagtcgttcatggccgtgctccccaagagcggtcgggcaagcgtgggggactcggtgtaccgcgtcatgcttggcgccgacaagttctcgccggagttcctgctcgacacgcttgacatctcgtcggagcacgacgcgctggcgatggccgaccgggtggaggccgccatgtacgtgtggcggcgcaaggctagcggcagccacggcaagctgccgtggagcaaggtcaaggagctcgcggccgacgacgacgacaagaacgtgacgctggccaacagggccgagagcctcctgctctgcatcaagcaccgcttccctggcctgtcgcagaccaccctggacaccagcaagatccagttcaacaaggatgttgggcaagcgatcctggagagctactcgagggtgttggagagcttggctttcaacattgtttcgtggatcgatgatgtccttttcgtcgacaggtcgataaggaaactgagtgataacctcaagtcctgagttctttatcctgcactgaagcttcccagcaaaaaggttttagatgtctgttggtgaagctgcagaagaagggtgcgtgactgtagtagcggtagtagggtgattttgctgacctagagagatgcaagcctctagctttgcaagaatgcacaatgcagagtagcgtgtctgaccaacagtgaacgtgtgtgattttcgtgtcctttttatttttcagctctcgcgctcttagcttggcagcacgaagattggtgaaagggatcaaaatgtccaatagcataaatggagtcattctatttcagttttattgttgtttggttacaaagtaactagaacggagtgactccaattagagaatattctcctcaaattcgaaaccatcccactccaaaaaatcaaccggacggagtcgctccgttctcagcccgctcacacagtcacgctccgcttgcacagtctgcaaccaaaaaaaatagagccgctctgttctagcttaccaaacacagaacagagcggctccgtcctagaattagggatagaacggttccgttctacttggctccttaaccaaacactaccttaaagtc

SEQ ID NO: 204865 - DNA, 3882 bp, Zea Mays
caaaaatctcatcactgtgtactgtagttcagcggcagcaaagctcgctctgatttcgagctcgccaatggccgatgggccagtgaccgcgacctcctccatggcggtcccctccgcgcgccgtaaccgggcgctcctaccgacagtctccgtggctcgcgagccggcgcgcgcgtgggcagcggctggcgcggagggaagggcgcggagagggaaggaggctgaggtggaggacgagaaggaagcggggaggcggcggaaggaggaggtgaaccggaagatcgcgtcccggaaagcgctgtccgtcatcctccggcgcgaggccaccaaagcggttctcgacaagcgtaagcccggcaagggcacgcgccgcctcctccccggcaccgtcctcgaggccctgcacgaccgcgtcgcggccctcagatgggactccgccctcaaggtgttcgagctaatgcgggaccaggtgtggtacaagcctcacataggcatatacatcaagctcataaccatgctcggcaagtgcaagcagccggagaaggcgcaccagctcttccaggcgatgattgacgagggttgcgcgcccaacctccagtcctacaccgccctagtctccacgtatagcaggagcggccgcttccgtgaagcattcgacctgcttgaccggatgaaggacactccaggttgccagcctgatgtgcagacatactcgattctcattaagtcatgcttacatgcttatgattttgagaaggtgaagagtttgctggctgatatggcacgagcgggcattccgcctaacaccgtcacctataatacattgatcgatgcctatgggaaagcaggaaggtagctgaccgcaagagcctatgcttatgtagtccaaatatgtaatgattgatcatatatatggtgaaattttactagctctaaagggatgcaccgtgtttacctgaagcctagttaccaaataaccgtctcagagtctgaagtagtttgccattcattgaattttgtcacccaaatctttagttattcaagattaggttccatggaatatagttcattttctttttaccaaagcattctgaaaattttcttgtactctgttcttgataatgagtctgattattgttaaaataaaagaaaatctagtttagtaagaagttactgcagtttctccgtcctagtagatgcactgataataccgctgaaccttgaattttgaaaagtgcccttggctgcatttgtttagcctttcaaatctatcattatatccagttattcctgaattggattctatgaaatagagctcggctaatgatattttattttgaaggtttgctgagatggaatcaactcttctgaagatgttgtcacaaaattgcaagcctgatgtgtggacaatgaattctactctcagagcttttggcagtagtggtcagattgagacaatggaaagctgctacgagaagttccaggcctctggtattgtcccaaacattaagacctacaatatcttactcgattcctatggcaaagccaaaatgtatgagaagatgggagctgtgatggaatacatgcagaagtactactattcttggacaatagtcacatacaatgtagtgattgatgcatttggaagggccggagacctcgagcagatggaatatatatttaggctaatgaaatctgagcgtataaagcccaattgtgttacactctgttcagtggttagagcatatggaagagctggggaagttaagaaaataaagacagcgttgagaatcattgagaattctgacataacattggatattgtgttcttcaactgtttggtggatgcatatgggagggtggggtgcttggcagagatgtgggatattcttgatttgatgaaggagcatagatgcaaaccagacaaggtaacctgcactaccatgatcaaatggtttctcatcaaaggaatcgacgatcatcgtgttcagtacctacgtgatcttaaagatgggcgagcaaaagatgatacataggagtgaaaacaagaaaaactcttggagcagtgactttcgtatatatttttttaaaggaacgaatggatctttcggagcctcggtttacaattacatacatgcatcgatctcactgacttactactgaatcaaacattactcagataccatgagtcacactgctcactgacttatgtgctgcaagagctatatagggacatcttaaaaaaaagctactaatggttgataaggttgaagcaaattttggtgagtggccaataatgaacaatactggaatataaagatgatactgggaaaagggacacgttttagacgcagaagagacaagacatgctggtgaaattgatcagattctgctatctgttctgacttgatgtatcgacacagctgaacatgacttgtactgttgactagtgcaaaggctttacagcctgtttggtatcgacaccccctcactctttactttttgtatgatttgtggaatggaataagttgttccatcactatctgtaacgcataaaattctattttgggatctgtaagagtttctctaaaaagattaagatgactcttaatatggattcctcacttttgaagttactaggtgagtgtccgtgcgcaggggtggatattggggctgggccacctgtgccatggcccaggtcatagcctaaaaatatagtagagattttagcccaaatgaaaccctaacatctagttctccagcggctgccgcctgctgctgctgcgtgcgtgcctgcctccctccctggcccctgcggtcctgctggctgctcgggcgtcctgtggctcctgcgaggctgcgacctgctggctgctggcagaccgtcgtcctctgtctcctctcctccgcggccacgggtgcacggagccgggcagctggccgcgaggacaaaggaggccggactgccggagtccggacagccagacggccagagcgtggagcgcgactgcacgagggatctgggcgggcgatttgtccagcactccagcctctagtcaatcctagttactgtaactctgtaagcacttcttattttctcagttttttttgttactaatgaataacgagctaaatactatattgttaaatatttatgtgaatatgggacgatagattgacctcaaaacaagagaatgaagaggacaaaaacattgagatcattttatttttcggctcctacgcctttgatacgaaagatggatgatacaattactgtccgaggtcgctcaaggggatgtggaggtcagttagtgacttactaattactatcatcatttcaaaaatgagatctttattgttgtgtataattaagttattgtggaattaaacaattatttcactgaaagatctactcaattattgagatgcatttcttgtctagatctaagaaattcatttgtcagttatgacaaagctcatgttgtatctctcattttatacaaatatttaacttgcaatgtatagattcaaattcacgtgctaacgtggatgaagttattagaggcggagaaggaccaaatcgtctctaattaggtacttttatatttttaatcaagtttattatatttttagatgttgaattgaagtaaatactatcttagtctatgtttgttgtatatattgttttagcggtatatttagccgcacaatatattaggggctgtttaaagtaaccttcaaattttatagagtggcccggggcgttaattttatagagctctgccactgcccgtgcgtagctatgagaacatataataccacgataactatatacaaatgtgtattatgctgaaatgtgtgttatactgttaagagaaaaag

SEQ ID NO: 204866 - DNA, 1728 bp, Zea Mays
catttttattaagcgcagacctccaagttaacaagaccatacactccagatgatacaaaaataactacacaagaaagagctgcaaatggcaagccacatcgcagtttgcagctagcggacacaacagtcaggcagcagcagcagttaccactccgtgctccaccgtgttgcctccctcccaagtcccattggccgccatgggctcctgcctctcctccgagacccccgccgccagcgccggcgcggcggcgtggtggcggaaggggcgccgcgggacccgggaaggcgcggctggcggcctccccagcggcggcaagaagccgcccggacgagggggagagatgacggaggacgagctcgcgcgggtctccggcaggatgtgcggcaacggcgccagcgcggtggcgtgcctccacacgcagcaggggcggaagggtaccaaccaggacgccatggtcgtgtgggaggggaagctgagaggatacaacaatgtaaaggacgagtctttgctcttcaggatgagccagaagtcgccagagtgtggttgcccaataacgactcccctggactggcaatggcaagagctttcggcgacttctgccttaaagactatggtttgatatctgttccagagatatcgtatcgccttctcaccgagaaggatgaattcataatactagccaccgatggggtgtgggacgttctctcgaacaaggaggccgttgatattgtggcgtcagccccgtctcgggcaacggcagccagggctcttgtcgacagcgctgtcagatcgtggaggctcaagttcccaacatccaagagtgatgactgcgctgtcgtctgcttgttcttggatcgtgctggctcggctcaagagagcgagagcgaagccattgtggagacggcagagcccaccggggaggaggtctgcaggcgggatgccggtgaggtcgacgaggacatggcagtcgcagatgctggtgtacatgtagtatccagcgcggagcacagtgccgaggcgactccgttgcagcactccaccacgtcaagggagctcgacgacgagattgtaccggcggacgagcacgagcctcccgtcgtcctgaaggagcctgcgaggtgcgggtctgctcgcagcctggcagagtgcatatcgacgagcgaggaagaggagtggtccgcgctcgaaggcgtgacgcgggtgaactccctcctgaacctcccgagaataatgtccggcgacaggagatcggccagctggaggaagcgacggtgaacagcagaggaagctctccactggagttcttcgccgagttcaaatcctccctcagtctctgggaatcttccccaggttgttttgacctcaaccgcgtcagcgtgtgcgttccggatcgtttgtttgttcattcttgtgccttttttgccggtaggtgttccatgcttggggcttctctgtgtccgtttgtgcatagaaaagtttttttttttggttctgtgagaagcttctgtaaaacatgcagcacctcctggagtgctatatgtgtatcattaggtcatcgttttgttcatcttatttggtttttggtttgtagtttggattcgtgttagttgtgcgttattgcgatgagaagtcctcgaaatatgttacaaatcatgtggaaactaaaactccctcctaagatcaaaatcattctctggtatctaggtaggaagaggagtgactcttac

SEQ ID NO: 204867 - DNA, 1503 bp, Zea Mays
cttcacgcttcctcgtctcctcaaaattcagaatcgtctttattcgatctcgtcattcccactaaaggctggacctgtaagggcatgcagagctttagcaagcaactacacgcaaacatctgaaacagttgatttggactgggagaacctgggttttgggattgtgcaaactgattatatgtatattgctaagtgcgggacagacgggaatttttctgagggtgaaatggtgccttttggacctatagcgctgagtccatcttctggagtcctaaattatggacagggattgtttgagggcctaaaggcgtataagaaaactgatggatccatcctattatttcgcccagaggaaaatgctgagaggatgcggacaggtgctgagaggatgtgcatgcctgcaccctctgtcgagcagtttattgatgcagtaaaacaaaccgttcttgcaaataagagatggattcctcctactggtaaaggttctctgtatattaggcccttacttatgggaagtggggctgttcttggtcttgcacctgctcctgagtatacattcattatatttgtctctcctgttggaaactactttaaggaaggtttagcaccaataaatttgatagttgaagacaagttccatcgtgctactcctggtggtactgggggtgtgaagaccataggaaattatgcttcggtgttgatggcacagaaaattgcaaaggaaaagggttattctgatgtcctctacttggacgctgttcacaagaagtaccttgaagaagtttcttcatgcaatgtttttgttgtcaaggacaatgttatttctaccccagcaataaaaggaacaatattacctggtatcacaaggaaaagtataattgacgttgctttgagtaaaggcttccaggttgaggagcggcttgtttcagtggatgaactgcttgatgctgatgaggtattctgcacaggaactgctgttgtggtgtctcctgttgggagcattacatatcaagggaaaagagtggaatacggccaccaaggtgttggcgttgtgtcccagcagctgtacacttcactgacgagtcttcagatgggtcaaaccgaggattggatgggctggactgtgcaactgaattagttggccgtggttcgtggatcattcccaacagatgatgggttcgcaagatccaaatctggaggatcacaaccatgtgtacctcttcggttacagttttgtagtgtcttatgcgatggcgtcctgctgtatatttcttagacggtatttaaaccataaaacagtattcgtctgtacgactgtacccttcagttctgtagcatctgccggagacgagtactagttttgttattttctttcttttacaaaccaagaacagttctatagttttattgtagacactggaccatcatatgatctcaatgggtagctttttcctttttatatttaaaaataaacagaattttaattttataaattttatattt

SEQ ID NO: 204868 - DNA, 2249 bp, Zea Mays
atcgatcattatccgtgcaaccagccaatgagccaaccacccattccaccaccctgcaattccagtccgatttggacattgtcttcgtctccttcatcccctgcccacctgttctgctctgccgccgccgccgctgccgctcccgctgccgcaggaaccctagaccacgctgagcaacccccggcctacacggcgtagctttgcaggaaatggaatacggcgccgtcctcgccgccgcgccgctcgtcgcacggccgaactggctcctcctctcgccgccgccactggcgccgtctattcagattcagaatcgtctttattcgatctcgtcattcccactaaaggctggacctgtaagggcatgcagagctttagcaagcaactacaccaggcaaacatctgaaacagttgatttggactgggagaacctgggttttgggattgtgcaaactgattatatgtatattgctaagtgcgggacagacgggaatttttctgagggtgaaatggtgccttttggacctatagcgctgagtccatcttctggagtcctaaattatggacagggattgtttgagggcctaaaggcgtataagaaaactgatggatccatcctattatttcgcccagaggaaaatgctgagaggatgcggacaggtgctgagaggatgtgcatgcctgcaccctctgtcgagcagtttattgatgcagtaaaacaaaccgttcttgcaaataagagatggattcctcctactggtaaaggttctctgtatattaggcccttacttatgggaagtggggctgttcttggtcttgcacctgctcctgagtatacattcattatatttgtctctcctgttggaaactactttaaggaaggtttagcaccaataaatttgatagttgaagacaagttccatcgtgctactcctggtggtactgggggtgtgaagaccataggaaattatgcttcggtgttgatggcacagaaaattgcaaaggaaaagggttattctgatgtcctctacttggacgctgttcacaagaagtaccttgaagaagtttcttcatgcaatgtttttgttgtcaaggacaatgttatttctaccccagcaataaaaggaacaatattacctggtatcacaaggaaaagtataattgacgttgctttgagtaaaggcttccaggttgaggagcggcttgtttcagtggatgaactgcttgatgctgatgaggtattctgcacaggaactgctgttgtggtgtctcctgttgggagcattacatatcaagggaaaaggttaaacattatctttgcttgagaactcagtttttaattgaaataataaacatgcaattaaatcaactttcttttgtttcatgcataaggtaactaacagtcattatcatgcaaacatgtggcaagccatgaaccatttgaagcgctacttgcttaatgtctctcttgatcatttgtgttagtggcatttgtcgaccttgtttttctgtgcactttctgccttcattgcaaaatgtcagtttttttatctgcattgtcgtcgatgactggtaaacatggtagtgttgggggcacgctttagcacctaggcaacaaggtgtgactaagacctcttggcatcatgcggtgtcatacattttttgtacataatatggctcttacaacttattctttcaaacaaatgttattctttttggagacttatttagcaatgatatcattacatgtaagggagttcactttgcagagtggaatacggccaccaaggtgttggcgttgtgtcccagcagctgtacacttcactgacgagtcttcagatgggtcaaaccgaggattggatgggctggactgtgcaactgaattagttggccgtggttcgtggatcattcccaacagatgatgggttcgcaagatccaaatctggaggatcacaaccatgtgtacctcttcggttacagttttgtagtgtcttatgcgatggcgtcctgctgtatatttcttagacggtatttaaaccataaaacagtattcgtctgtacgactgtacccttcagttctgtagcatctgccggagacgagtactagttttgttattttctttcttttacaaaccaagaacagttctatagttttattgtagacactggaccatcatatgatctcaatgggtagctttttcctttttatatttaaaaataaacagaattttaattttataaattttatattt

SEQ ID NO: 204869 - DNA, 653 bp, Zea Mays
aaaataggaaaaaggaaacggcccatcatgttgagaagggcagaaggccctggcgggctttgttccactccaccttggccgctgttctcctcaccgcgcgtgcgctctctctctctctctctcggcgccgactcggctaccgccgccgccctacggaagcttcccagatcgtgaacctgcacacctcaacgatagatggcggggttcagaagccttgcacccaagaccaggaacctggtggtggccgggggactgtctgccttcgtgctcggggtctactactacaccatgagagcggtgggaggcacggacgagctccaggtggcgatcgacaagtttgaggagacgaagaagcaggatgccgctagaaactctagctccagcgcaggaggatcataattcataaacacgcggacacgccctggatctgctgcaggctgacatggtagtggtacgacgacagtcacgtcgctcagtaggccatgaccatgcgttctgcttgtactgtggaataaataaatgatgggttatggtactctttatctggtagagcttggcagcttgtgctttgagggatgtaatagtggccccgatgtttgtattttcctggcgagccggaaattttgtggagtatttgcttgtgtgactccctt

SEQ ID NO: 204870 - DNA, 829 bp, Zea Mays
tgggcaactgctaacacatatttgctagatatttgcttgctttgcagggagcggggtcatagtctgaagaactgtcctgacaaaagcgagggaaatttgatgaaattttgctataactgtggtgaatctggacactctctttccaagtgccccaagcccattgagaatgggggtacgaattttgcaagctgttttatctgcaatcagcaagggcatttgagcaagaactgccctgaaaacaaacatggcatctatccaaagggtggttgttgtaaggtatgtggcgaagttacccacttggccagacattgtccgaataaagggagacaagatttgatatcctccagagatgatgatgtcaacatggaagagcacagtcaggaatgtcctgcggttcaccatggtggagatgacctagaagatgatttcgttaatgaagaagaaccaaaacccgccaaatcaaagaaggcaaagcaatcaggttcaagaccagccacagggacgggaaatgacgtgaagagcgccagtgccaagacaaaagcgaaacaagctcctaaagttgtaaaattctttggttaaagaatgggaattttgttgtagcttaagatacgaatgttccatctggacaaccttgtactgtcaagcggttgtgtgtaacgctgatgacgatgagaatacgtctgccaactgcatacgcctctcgttgcccctaggtgctcttctgtcttctcattgtttggctagcattgggttatgcgagaccagtagaacaattacaatatggaattcgctcagttttcgcatccagatcacccatcaagatacgatt

SEQ ID NO: 204871 - DNA, 2789 bp, Zea Mays
ccatctaaccagtggtaatggtggttttggtcagagtgttggtcgcctgtgccaaattccgctgcccggcggcgaatttactcctctcagcctctacttctcgggttcgagctcaacccggcgggccactgctgcgacaaaggactagcaaggtttcattgcgctcaattgctatgtctaccacacaagcctcagaagcagctgctgacaaaggattgcctctggcagtggacgctaccatgattgatgagtatgcctcccagtcaaagttgctgcaagaatttgttaaaatcccaactattggcaaggcttggatcttcaattccaaggatgacgacatgtccaaagcagtggtttcgattggcaaatcagatcttttggccaataagaggagacaattccttttgaatactcacatttcaaagagtccctcaaagtctgtcgattttcagtggtcccccttccctactgaaataagtggagtgtcagcaatagttccatctccatctggagaaaaacttcttctagtacgcaattctgaagatgattcccctacaaaactagagatttggggcccatgtcagttagagaatgagatacatattgcaaaatctgttcatggatcactctatactgatgaatggtttgaagggatatcatggaaccaggaagagactttcatagcttatgttgccgaggagcctcctcaaccaaagccagtgtttaatgattatggattcaagaaggaaggtttatcagaaaaggactgcaagagctggaagggacaaggggattgggaggagacctggggagaaacctattccaagaaaaggattcctgcactgttcgtcatcaacatctccagtggtgaagttcgacctgtcaagcaaatacctagatcattaagtgttggccaagtgatttgggctccatcatcttcatatagcttggtttttgttgcatggtcatctgacaatgggttccaagggacaccaaggaagcttggtattaaatactgctacaacagaccatgtgctctgtatgctgctcctgatcctttcggacaagaagctgagaaatcattaactgagggcaataagggtgaaactacaactatgatcaaattaacagcaaacctgagcagtgcctttttcccacggttcagtccggatgggaagtatcttgtcttcatctcagcgaagagtgctgtagatagtggggcacacaatgctacaaattcattgcatagaatcgaatggtgtacagatggaaaactggatgggagccttggagttgctgacgtggtgcccattgtgctgtgccccaaagataactgttttcctgggctatactgctttggcttgcttagggatccatggcttaccgatggacaaactatgattatatcttctgtctggggaagtagggaagtaatactttctgtaaatgttgtgagctgtgaactttcaagagtgagtccccaggactcagattattcatggaatgttcttgcagttgataagaacaacattcttgcagcagccttattacactccctcagatgtactatgggattaaggtttctcagactgaaagcaattgggagtggcagggagtttcaactcctttcccaaagccatctgataagatcagctccgtactagcagagcataagttcagcatactcaaaatcccaattagcaacccttctgacgaacttgccaatggggctaagcttccttttgaggctatttttgtgtcgcataaggattctgcaagtaatccaacaatcgttgttcttcatggtggaccacactcagtttatccatcaagttattccaaatccttggcttttcttttttcgcagggatataatcttcttgttgtgaactacaggggttcattaggctttggggaagaagcactgcaatcccttcctggcaatattggttctcaggatgtcaatgatgtattgacggcattggaccttgttataaagagaggactaatagatccatccagagttgccgtagttggaggttcacatggaggtttcctgacaacacatttgattggccaggctccagacacatttgttgcagcagctgctcgaaacccagtatgtaacttatcattgatggtgggtacctctgacatccctgattggtgctttgtcgagatttatggaaaagaagggaaaaagtacttctcagagtctccttcagtagacgatctttgtcaattccaccagaagtcaccaatttcacatattgcaaaggtcaagacaccaacactctttcttcttggagcgcaagatctcagagttcctgtttctaatggcctgcagtacgcaagggctttgaaggagaggggaatcgaaacgaaaactattgtcttcccagaagatatccatggaattgacaagcctcagtctgatttcgaaagcttcctcaacataggggtttggttcaagaagcacatgggcaaataaacattagtgcttcccattacattcatgatttactttttcattgttactaaatgcctgtaaccgggtcaaagtatacatgatttgcctgtccaatctggtgtttgccaagatggaataattcttgaagacatatagaagcccgtgtttattctagtgtggattctggaataccaactgtagctagtttatataataatcttctaataaatgatgcttatgtgttaatgtgaaacggtgcgtgcttttgaattgtattcagaaaaaaaatggcccagctgaccagctcactgttgtttag

SEQ ID NO: 204872 - DNA, 1323 bp, Zea Mays
ttttaataaaaatgaataatggggcaataagggtgaaactacaactatgatcaaattaacagcaaacctgagcagtgcctttttcccacggttcagtccggatgggaagtatcttgtcttcatctcagcgaagagtgctgtagatagtggggcacacaatgctacaaattcattgcatagaatcgaatggtgtacagatggaaaactggatgggagccttggagttgctgacgtggtgcccattgtgctgtgccccaaagataactgttttcctgggctatactgctttggcttgcttagggatccatggcttaccgatggacaaactatgattatatcttctgtctggggaagtagggaagtaatactttctgtaaatgttgtgagctgtgaactttcaagagtgagtccccaggactcagattattcatggaatgttcttgcagttgataagaacaacattcttgcagtttccagcagccttattacactccctcagatgtactatgggattaaggtttctcagactgaaagcaattgggagtggcagggagtttcaactcctttcccaaagccatctgataagatcagctccgtactagcagagcataagttcagcatactcaaaatcccaattagcaacccttctgacgaacttgccaatggggctaagcttccttttgaggctatttttgtgtcgcataaggattctgcaagtaatccaacaatcgttgttcttcatggtggaccacactcagtttatccatcaagttattccaaatccttggcttttcttttttcgcagggatataatcttcttgttgtgaactacaggggttcattaggctttggggaagaagcactgcaatcccttcctggcaatattggttctcaggatgtcaatgatgtattgacggcattggaccttgttataaagagaggactaatagatccatccagagttgccgtagttggaggttcacatggaggtttcctgacaacacatttgattggccaggctccagacacatttgttgcagcagctgctcgaaacccagtatgtaacttatcattgatggtgggtacctctgacatccctgattggtgctttgtcgagatttatggaaaagaagggaaaaagtacttctcagagtctccttcagtagacgatctttgtcaattccaccagaagtcaccaatttcacatattgcaaaggtcaagacaccaacactctttcttcttggagcgcaagatctcagagttcctgtttctaatggcctgcaggcctgatgcagtgatgagagctgtctcagttgagtcac

SEQ ID NO: 204873 - DNA, 2392 bp, Zea Mays
ccatctaaccagtggtaatggtggttttggtcagagtgttggtcgcctgtgccaaattccgctgcccggcggcgaatttactcctctcagcctctacttctcgggttcgagctcaacccggcgggccactgctgcgacaaaggactagcaaggtttcattgcgctcaattgctatgtctaccacacaagcctcagaagcagctgctgacaaaggattgcctctggcagtggacgctaccatgattgatgagtatgcctcccagtcaaagttgctgcaagaatttgttaaaatcccaactattggcaaggcttggatcttcaattccaaggatgacgacatgtccaaagcagtggtttcgattggcaaatcagatcttttggccaataagaggagacaattccttttgaatactcacatttcaaagagtccctcaaagtctgtcgattttcagtggtcccccttccctactgaaataagtggagtgtcagcaatagttccatctccatctggagaaaaacttcttctagtacgcaattctgaagatgattcccctacaaaactagagatttggggcccatgtcagttagagaatgagatacatattgcaaaatctgttcatggatcactctatactgatgaatggtttgaagggatatcatggaaccaggaagagactttcatagcttatgttgccgaggagcctcctcaaccaaagccagtgtttaatgattatggattcaagaaggaaggtttatcagaaaaggactgcaagagctggaagggacaaggggattgggaggagacctggggagaaacctattccaagaaaaggattcctgcactgttcgtcatcaacatctccagtggtgaagttcgacctgtcaagcaaatacctagatcattaagtgttggccaagtgatttgggctccatcatcttcatatagcttggtttttgttgcatggtcatctgacaatgggttccaagggacaccaaggaagcttggtattaaatactgctacaacagaccatgtgctctgtatgctgctcctgatcctttcggacaagaagctgagaaatcattaactgagggcaataagggtgaaactacaactatgatcaaattaacagcaaacctgagcagtgcctttttcccacggttcagtccggatgggaagtatcttgtcttcatctcagcgaagagtgctgtagatagtggggcacacaatgctacaaattcattgcatagaatcgaatggtgtacagatggaaaactggatgggagccttggagttgctgacgtggtgcccattgtgctgtgccccaaagataactgttttcctgggctatactgctttggcttgcttagggatccatggcttaccgatggacaaactatgattatatcttctgtctggggaagtagggaagtaatactttctgtaaatgttgtgagctgtgaactttcaagagtgagtccccaggactcagattattcatggaatgttcttgcagttgataagaacaacattcttgcagtttccagcagccttattacactccctcagatgtactatgggattaaggtttctcagactgaaagcaattgggagtggcagggagtttcaactcctttcccaaagccatctgataagatcagctccgtactagcagagcataagttcagcatactcaaaatcccaattagcaacccttctgacgaacttgccaatggggctaagcttccttttgaggctatttttgtgtcgcataaggattctgcaagtaatccaacaatcgttgttcttcatggtggaccacactcagtttatccatcaagttattccaaatccttggcttttcttttttcgcagggatataatcttcttgttgtgaactacaggggttcattaggctttggggaagaagcactgcaatcccttcctggcaatattggttctcaggatgtcaatgatgtattgacggcattggaccttgttataaagagaggactaatagatccatccagagttgccgtagttggaggttcacatggaggtttcctgacaacacatttgattggccaggctccagacacatttgttgcagcagctgctcgaaacccagtatgtaacttatcattgatggtgggtacctctgacatccctgattggtgctttgtcgagatttatggaaaagaagggaaaaagtacttctcagagtctccttcagtagacgatctttgtcaattccaccagaagtcaccaatttcacatattgcaaaggtcaagacaccaacactctttcttcttggagcgcaagatctcagagttcctgtttctaatggcctgcaggcctgatgcagtgatgagagctgtctcagttgagtcac

SEQ ID NO: 204874 - DNA, 1490 bp, Zea Mays
gacggagccgatatccaaccctccatctaaccagtggtaatggtggttttggtcagagtgttggtcgcctgtgccaaattccgctgcccggcggcgaatttactcctctcagcctctacttctcgggttcgagctcaacccggcgggccactgctgcgacaaaggactagcaaggtttcattgcgctcaattgctatgtctaccacacaagcctcagaagcagctgctgacaaaggattgcctctggcagtggacgctaccatgattgatgagtatgcctcccagtcaaagttgctgcaagaatttgttaaaatcccaactattggcaaggcttggatcttcaattccaaggatggtttgaagggatatcatggaaccaggaagagactttcatagcttatgttgccgaggagcctcctcaaccaaagccagtgtttaatgattatggattcaagaaggaaggtttatcagaaaaggactgcaagagctggaagggacaaggggattgggaggagacctggggagaaacctattccaagaaaaggattcctgcactgttcgtcatcaacatctccagtggtgaagttcgacctgtcaagcaaatacctagatcattaagtgttggccaagtgatttgggctccatcatcttcatatagcttggtttttgttgcatggtcatctgacaatgggttccaagggacaccaaggaagcttggtattaaatactgctacaacagaccatgtgctctgtatgctgctcctgatcctttcggacaagaagctgagaaatcattaactgagggcaataagggtgaaactacaactatgatcaaattaacagcaaacctgagcagtgcctttttcccacggttcagtccggatgggaagtatcttgtcttcatctcagcgaagagtgctgtagatagtggggcacacaatgctacaaattcattgcatagaatcgaatggtgtacagatggaaaactggatgggagccttggagttgctgacgtggtgcccattgtgctgtgccccaaagataactgttttcctgggctatactgctttggcttgcttagggatccatggcttaccgatggacaaactatgattatatcttctgtctggggaagtagggaagtaatactttctgtaaatgttgtgagctgtgaactttcaagagtgagtccccaggactcagattattcatggaatgttcttgcagttgataagaacaacattcttgcagtttccagcagccttattacactccctcagatgtactatgggattaaggtttctcagactgaaagcaattgggagtggcagggagtttcaactcctttcccaaagccatctgataagatcagctccgtactagcagagcataagttcagcatactcaaaatcccaattagcaacccttctgacgaacttgccaatggctatgtaacttttcttgaagctagtacattgccaacattgtaa

SEQ ID NO: 204875 - DNA, 960 bp, Zea Mays
ggggatggatgccaagctgttttatatatgcaggggagaagtctataaagccagaactgatagtacaagtggagcctattgaggacccttatggcccatccataactgatgagaagttggatgccattattgtcagtaaggagacattaaatggtggactggctgtaaataggaaaagagaagagaaagggttcccactgttgaaggttgaggttgttgatctcctttccggcggtgtggagggggaaaaattgagttcttctgctttaaggaaacttgaggcagaacaagctcaacaaagtgaaacaaaatctggtagccttgaagcttcttagggaggaaattgaatactttgatctggttagctgaatgcacaaatacgggggtgatctgctccaagctcagtgtgaacaaaaaatatgatcagagctgacagtttggttacctttctagaggaataatcttcgaacactggcccatggccctgtaacagtattgctctaaccttctaaaatcaacctggcaacatagactctcccctactaaccaaatttacaaattttgtattggcaatgccatctgaatgttaaaaggaaatcttcttgggtttgtataaatatctacaattgtgacaaagctacaaacgaatatggttccccttcgcaagaacccatgcaatgtagcttgtcattataatctttgttctcttgaaacatattgtataattatgtgtatatacgcattggttgatcagagactttgggttctccattaatgtagaatcaggaaactgaagataacctgtaagggtacagcttttttttgttaggtggtcaagaaccctgttgtttcgaataattagtaaatttaacctagtgtgttaatctcttactaaatctaaaaagatacccactgtggagataattcttagcgaccactgaattttgaacaactgaaaat

SEQ ID NO: 204876 - DNA, 1270 bp, Zea Mays
acctcgggaaccatgtacaacaaaaaaaaatctgtgtgcatcgagtcattgtactgatctacagctacgacgagtaaaacaagaagccgtacctgtacggtcttctctatagagggagcaattggagagagagagaaagaacagcgaaaaatggtcgatgccggcgacataacggccggagggccgccgcgcgctcacgaggaggagcaagcgggaactccggcatacggttcggtggtcctcggcggcacttttgaccgcctccacgacggccaccgccgccttctcaagtatgcggagcttattgagcccgttgacaagcgcatcaagggtgtggaggattacatcaagtctataaagccagaactgatagtacaagtggagcctattgaggacccttatggcccatccataactgatgagaagttggatgccattattgtcagtaaggagacattaaatggtggactggctgtaaataggaaaagagaagagaaagggttcccactgttgaaggttgaggttgttgatctcctttccggcggtgtggagggggaaaaattgagttcttctgctttaaggaaacttgaggcagaacaagctcaacaaagtgaaacaaaatctggtagccttgaagcttcttagggaggaaattgaatactttgatctggttagctgaatgcacaaatacgggggtgatctgctccaagctcagtgtgaacaaaaaatatgatcagagctgacagtttggttacctttctagaggaataatcttcgaacactggcccatggccctgtaacagtattgctctaaccttctaaaatcaacctggcaacatagactctcccctactaaccaaatttacaaattttgtattggcaatgccatctgaatgttaaaaggaaatcttcttgggtttgtataaatatctacaattgtgacaaagctacaaacgaatatggttccccttcgcaagaacccatgcaatgtagcttgtcattataatctttgttctcttgaaacatattgtataattatgtgtatatacgcattggttgatcagagactttgggttctccattaatgtagaatcaggaaactgaagataacctgtaagggtacagcttttttttgttaggtggtcaagaaccctgttgtttcgaataattagtaaatttaacctagtgtgttaatctcttactaaatctaaaaagatacccactgtggagataattcttagcgaccactgaattttgaacaactgaaaat

SEQ ID NO: 204877 - DNA, 3293 bp, Zea Mays
aaaaccctcccctgttctgacttctgatgttcgtcctcacagccaccaccagcaccaccacggccacctcacttctcctccgatgccgtccactcccctcgcctaaaactgtaacacttgccacgcctcctgctatcctccccttctgcatccgctcccgcttctccgcctccgcctccgcctctgcatcctccgtctctccccaaagccgtgcgaccgcggcagccgctgcaggcaaatccagggagaagaagccgccgaccgcgagggcgaagcgggccgacgcagtacctgcagcggcggcgcctggaatgtcggcctccggtggcggctccgctgggaagcgcacggtggcggacgtgctgatggggaacgcacgggccgccgccagcaaggcgaagaaagcagcgccgtctccgaagaagccgcaggcgaagaccgacggcgcagaggtcgaaccggaggctgcagcggtggcggagaaaccgccttcgccggcgaggtccaagcgggcgtcgtccccagcgaagtcccccaaattgctgcctgatgggtctacctcgtcggctaagtccaagggtccagccgcgctcgctcaattggatgcggcgaaggagaatcccccgtcgccaaagaggtccaaaaccctagccgctaaatccgacacccagccttctggtgaaggtgttgttgggcttgggcacaccgatgggaagaaggggtcaccctccccgaccaaggctaaaggccaagcttcccaatcagaggagaagaagcgggccgcttcacccaagaaggcgaaaaccacagattccccgaagacagagaagaatatcaccctagagctaaagaagaaaggcagtgagtttgacccaatggctgttgcctattggaagcctggtgaacccgtgccattcctgtttctggctcgcgcacttgatctcatctccaacgagagtggccgtattgttattacagaaatcctatcaaatgtgtttcgtacagtgatggcaacaacaccggatgatctccttgcaactgtatacctctcagccaaccggattgcgccacctcatgaggggattgagcttgggattggggatgcatcagtcatccgtgcacttgcagaggcatatggacgcaaagaggagcatgttaagaaggacctcaaggaattgggtgatttggggcttgtggcaaaagcaagcaggtcatcacagaagatgatgtttaagccaaaaccactgacaatagctcgtgtgcttagcactttccggacaatcgcaaaggaatcaggcaaagacagtcaagataaaaaaagaaaccatatgaagggacttcttgttgctgcaactgactgtgaaccccagtacatcacacgccttcttcagtcaaagatgaggattgggctagcagagaaaactgtccaaatggcgctagggcaagctgccgtatatgctgacaaaaatcctttgccaccaaaagttcaatcacctttcgaagaggctgcaaaaataattaaacaagcatattcggttcttccgatatatgataaaattgtcccagcgatactcgaagtaggagtttggaagcttccagagacatgcaaattttccataggtgtccctgttggccctatgttagcaaaagcaacaaaatctgtctcagagatcatcgacaagtttcagggtcttgaatacacttgcgagtacaagtatgatggtgaaagggctcagatacattgcatggaggatggttcagtagagatttatagtcgcaatgctgaaagaaacaccggaaagtatccagatgttgttgatgcagtttctagattccgtaaggctacagtcaaatcatttgtcttggactgtgaaattgttgcctatgatcgtgaaaaacagaaaattttgccttttcagatacttagcacaagggctcgcaagggtgtcaccataaatgacatcaaagtttcagtctgtacttttggcttcgatattctttacataaacgggaaacctcttctccaggaacaactcaaaattcgtcgagagcatctttacaactccttcgaagaagtgccaggtgtttttaaattggctactgcaattacatcaaatgacctggaggagatacagaaatttcttgacacagctgtcaactcgagttgtgaagggttgattatcaagacattggataaagacgcaacatatgagccagcaaaacgttcaaacaattggttgaaactgaagaaggattacatggatagcattggagactctttggacttggtacctattgctgccttctacggtagaggaaaacgaacaggtgtctttggatcattcctcctcgcatgctatgatgagcagaacgaagaatatcaaacaatatgcaacatagcttgaagaacgttctgcgagccttcgaagtaaagtgatagaaaaaccaaaggcatactatagatttggcgacacaatgaaccccgatgtgtggtttgagccatcagaggtctgggaggtcaaagctgccgatctgagcataagccctgtacatcgtgctgccaatggtatagtcgatccaaataaggtctgtagttcttttttgcattgccattcctccccatctcgattgtatacttctggtatagtatgttggaaggctaatgctgaaatcgaaccagggtatctctctaagattccctcgcctattgagattacgtgacgataaaagcccagaacaagccaccacgtctgaccaagtcgctgacatgtaccggtctcaaaagatcaaccacggttataaccaggaggatgaggacgatgactgatgttgacttaattcttgttgctggatgggatggttcactgtgtaaacactagtcttcgcagtttccagcttgttctcaaccgtaacctgttgatttaccggttcctgtttctatgatcaaatgaacaggtattgaccggagattgcattttcagttgtttggttcgtcctgattcgaacggcttagggtatactccgatttgtgcatttgctttgcgcacaacttatccccacgaacccgcacgctgtctttatgaaccagcagcagaggcgatcttcatgcgttggcgcttggcggtgcgttctggggctgcttggattcggatacatctggcattttgagcgcaaacctgcaggcagggacgtcgggtctggggtttcattagcgtcattgcagagatcacaggcaccatttttctccaaagaaagatcactagctagacaacatcatcagcacagcaatgttc

SEQ ID NO: 204878 - DNA, 447 bp, Zea Mays
tctggccttaaaaacctctgctcccccgtctcggcgcgattgccatcgccatcgccatcgccatcgcgcaccgcctccccgtgtcccctccttctcgcccggcaccgtcgagctcggctgtggaaacagaacaaacccatcaaccatggcgaactcggcgtcggggatggccgtgagcgacgagtgcaagctcaagttccaggagctcaagtcgaagcgaagcttccggttcatcacgttcaagatcaacgagcagacgcagcaggtggtggtggacaggctggggcagccgggcgacacctacgacgacttcaccggctccatgcccgagagcgagtgccgctacgccgtcttcgacttcgacttcaccaccgacgagaactgccagaagagcaagatcttgttcatctcctgtgactctctttcgccgtatctcgatatcatgcc

SEQ ID NO: 204879 - DNA, 442 bp, Zea Mays
tctggccttaaaaacctctgctcccccgtctcggcgcgattgccatcgccatcgccatcgccatcgcgcaccgcctccccgtgtcccctccttctcgcccggcaccgtcgagctcggctgtggaaacagaacaaacccatcaaccatggcgaactcggcgtcggggatggccgtgagcgacgagtgcaagctcaagttccaggagctcaagtcgaagcgaagcttccggttcatcacgttcaagatcaacgagcagacgcagcaggtggtggtggacaggctggggcagccgggcgacacctacgacgacttcaccggctccatgcccgagagcgagtgccgctacgccgtcttcgacttcgacttcaccaccgacgagaactgccagaagagcaagatcttgttcatctcctgcgacggtcggtccattgaattacatctc

SEQ ID NO: 204880 - DNA, 4062 bp, Zea Mays
ggcagagcccgctgccccactcccgccccgagctgtgccgtcggccggccgcccgctcccgaactgcgccgtcggccgcacccccgctcccgagctgcgccgtcggccgcccgcccgcctccgaggatatcgtcgccccggcgttcgcggcccgtgaaaacccacaggcagcaaccctggatttgggcctagcatttttccacgagggatttgggttatcatacagcccagactccaaacccaagaaaaggcacaaactaatcgaaccctaccttcttctccactccacaccagcgctagctagttcctagcttacccacgcacggccgccgcctcctcctcacgcacgcggcagccgcggtacgttatccaggtcgtgccgacgtccgacgacaaagaaggccttgggggcgctggcgcgcatcgcgagtcccctcgccggcaagaatatttgcaagcagaccttcgagctcgtgcgtttagcctcggagggcaagttcccgaaccggggaatcaaggacgtcgtcaggagcatctgctgcgggaacgtagggaaaatgtcaacgaatcctgatgaacctaagagtcgtgcccggacagactttttgctcaacaatgaactagaggtccagaagttttgggatgagaacaaggtttttcaggctgatcctggcaatgactctccaagccctggggaaaaattctttgggaactttccatacccttacatgaatggcttgctgcatctgggtcatgccttctcattgtccaagcttgagtttggtgctgcataccacaggcttcgtggctccaatgttcttttgccctttgctttccactgcactggaatgcccatcaaggcctccgctgataagctagctagggaaatccaacaatatggatatcctccggtgtttcctgtggcagagggttctagtgctgcagtagccgatgctacccaggctgaccaggttgatgttgttgccccagataagtttaaggggaagaagtccaaggctactgcaaaggctggtgcacaaaagtaccagtgggagatcatgaagagctttggtctagatgatgaagaaattgccagatttcaagatccttatcattggttgactcacttccctccgctggcaaaggaggttctcaagaaatttggcttgggttgtgactggaggagatcattcataactactgacatgaatccatactatgatgcttttgttaagtggcagatgaggaagctgaagaaattgggcaaagttgttaaagacatgaggtacacaatctactctccgttggatggccaaccttgtgctgatcatgatagggcaacaggtgaaggtgtgcagccacaagaatacgtcttgattaaaatggaggtgatatcaccttttcctcccaagctgaagtcattggaagggaggaaggtatacttggcagctgctacactaagacccgagacaatgtatggacagacaaattgctgggtccttcctgatggaatgtatggtgcttttgagattaatgacactgatgtcttcatccttacagcaaggtctgcttttaatcttgcataccaacacctatccagggtccctgaaaaaccaacctgcttatgtgagctatctggcagtgatttgattggtttgccactgaaatctcctcttgccttcaatgaaacaatatatgctcttccaatgctcactgtcttgactgacaaaggtactggcattgtgactagtgtccctagtgattcacctgatgatttcatggcactgcaagatttagtcacaaagccagcattgagagcaaagtatggagtgaaagatgagtgggttcttccttatgagattataccaataatccacattcctgaatttggagacaagtcagcagagaaggtttgccatgatcttaagattaaaagccagaacgacaaggagaagcttgctgaagcaaaaagaatgacatatctgaagggatttactgatggaacaatgattgtaggtgagttcagtggtagaaaggttcaggaagcgaaaccgctgattaaaagtaagcttttggaagaaggcacagctgtgttgtatagtgagccggagaagaaggtcatgtctagatctggtgatgaatgtgttgttgccctcactgatcagtggtatataacttatggcgaggctgaatggaagcagaaggcagtcaaatgtttggaccacatgaatacattctcaactgaaacccgcaatggttttgaacatacgctgggctggctgaaccagtgggcttgttcacgttcatttggactcggtactcgaattccatgggatgagcagttccttgtagaatctctttctgattctaccctatacatggcttattatacagttgcacaccttttgcaaaatggtaatatgtatgggaaagaaatatcttcagtaaggccagaagaaatgacagatgaagtctgggatttcgtgttttgtgatggcccggcaccaaaaagcgagatccctgccgctctgttgaacaagatgaaacatgaatttaagtattggtatccatttgatatccgtgtgtctggtaaagaccttattcaaaaccatttgacattctgcatatacaatcatacagcacttcttcctgagcaccactggcctattggtttccgctgcaatggacatctaatgcttaactctgagaaaatgtccaagtccacagggaatttcctaactctggaagatgccataaaaaagtactcttctgatgccactagatttgcccttgctgatgctggcgatggtatggatgatgcaaattttgtcactgaaactgcaaattctgctgttatgaggcttacaaaagaaatttcatggatggaggaggttacagctgctgaatcaaaattaagaactgggccgcccactacatatgctgaccgtgtgttttcaaacgagatgaacattgcaatcaaagaaactgagaagagctacaatgctttcatgttcagagacgccctgaagtctgggttctatgacctccaattggctagagatgagtacaggctctcttgtggtgcagcaggcatgaaccgtgatctgttgtggcgatttatggatgtccagaccaggcttatcacccccatttgcccacactatgctgagcacgtgtggcagaagatcatgaagaaagaaggctttgcaataaaagctggctggccagccgcggacaccccggatcccacactgagaattgcaaataaatacctgcaggattccatagttttgatgaggaaactgcttcagaagcaagagtctggttctaagaagcctaagaagggagctgcaccggcacctccgtccgaggaaaagaagatgagcattggcctcatatatgtgaacgagcactactctggatggaaagagcagtgcttgaaggtgctgcagtccaagttcgacagccaaagccgctccttctcacccgatcaggaaatcgcagaagctctgaaggagtgccccatcgggcaggaaatgaacctgaagcaggttcagaagctgtgcatgcccttcatcaagctgaagaaggacgaggcaagggaggttggtcctcaggcgctggacttgaagcttccgttcggtgagatggatgttctccgggagaacttggagctgatcaagaggcagctgggccttgagcaagtcgaggtgctctccgcgtcggacgaagctgctcgcgctaaggctggtgaacatgcttcgctgctggagaagaacccaccatcacccggcgaccccatcgccatcttcctcagcaaacagagctgaaaactgaccttgcatatggcccttttgttatttacttcgccgcacatttgcttcttttttgtttttgtttttgtgaaaccagtttcgtgtctgtaaacatagcatgttgtcctccggtttggtgaaaccagttttttctttttctttttctgtcaacagaatatgttatccattctctgggtaaccagttcggctattgtcgacaaagtatgttttgtgtcgctttacatca

SEQ ID NO: 204881 - DNA, 3832 bp, Zea Mays
gcagagcccgctgccccactcccgccccgagctgtgccgtcggccggccgcccgctcccgaactgcgccgtcggccgcacccccgctcccgagctgcgccgtcggccgcccgcccgcctccgaggatatcgtcgccccggcgttcgcggcccgtgaaaacccacaggcagcaaccctggatttgggcctagcatttttccacgagggatttgggttatcatacagcccagactccaaacccaagaaaaggcacaaactaatcgaaccctaccttcttctccactccacaccagcgctagctagttcctagcttacccacgcacggccgccgcctcctcctcacgcacgcggcagccgcggtacgttatccaggtcgtgccgacgtccgacgacaaagaaggccttgggggcgctggcgcgcatcgcgagtcccctcgccggcaagaatatttgcaagcagaccttcgagctcgtgcgtttagcctcggagggcaagttcccgaaccggggaatcaaggacgtcgtcaggagcatctgctgcgggaacgtagggaaaatgtcaacgaatcctgatgaacctaagagtcgtgcccggacagactttttgctcaacaatgaactagaggtccagaagttttgggatgagaacaaggtttttcaggctgatcctggcaatgactctccaagccctggggaaaaattctttgggaactttccatacccttacatgaatggcttgctgcatctgggtcatgccttctcattgtccaagcttgagtttggtgctgcataccacaggctggtgcacaaaagtaccagtgggagatcatgaagagctttggtctagatgatgaagaaattgccagatttcaagatccttatcattggttgactcacttccctccgctggcaaaggaggttctcaagaaatttggcttgggttgtgactggaggagatcattcataactactgacatgaatccatactatgatgcttttgttaagtggcagatgaggaagctgaagaaattgggcaaagttgttaaagacatgaggtacacaatctactctccgttggatggccaaccttgtgctgatcatgatagggcaacaggtgaaggtgtgcagccacaagaatacgtcttgattaaaatggaggtgatatcaccttttcctcccaagctgaagtcattggaagggaggaaggtatacttggcagctgctacactaagacccgagacaatgtatggacagacaaattgctgggtccttcctgatggaatgtatggtgcttttgagattaatgacactgatgtcttcatccttacagcaaggtctgcttttaatcttgcataccaacacctatccagggtccctgaaaaaccaacctgcttatgtgagctatctggcagtgatttgattggtttgccactgaaatctcctcttgccttcaatgaaacaatatatgctcttccaatgctcactgtcttgactgacaaaggtactggcattgtgactagtgtccctagtgattcacctgatgatttcatggcactgcaagatttagtcacaaagccagcattgagagcaaagtatggagtgaaagatgagtgggttcttccttatgagattataccaataatccacattcctgaatttggagacaagtcagcagagaaggtttgccatgatcttaagattaaaagccagaacgacaaggagaagcttgctgaagcaaaaagaatgacatatctgaagggatttactgatggaacaatgattgtaggtgagttcagtggtagaaaggttcaggaagcgaaaccgctgattaaaagtaagcttttggaagaaggcacagctgtgttgtatagtgagccggagaagaaggtcatgtctagatctggtgatgaatgtgttgttgccctcactgatcagtggtatataacttatggcgaggctgaatggaagcagaaggcagtcaaatgtttggaccacatgaatacattctcaactgaaacccgcaatggttttgaacatacgctgggctggctgaaccagtgggcttgttcacgttcatttggactcggtactcgaattccatgggatgagcagttccttgtagaatctctttctgattctaccctatacatggcttattatacagttgcacaccttttgcaaaatggtaatatgtatgggaaagaaatatcttcagtaaggccagaagaaatgacagatgaagtctgggatttcgtgttttgtgatggcccggcaccaaaaagcgagatccctgccgctctgttgaacaagatgaaacatgaatttaagtattggtatccatttgatatccgtgtgtctggtaaagaccttattcaaaaccatttgacattctgcatatacaatcatacagcacttcttcctgagcaccactggcctattggtttccgctgcaatggacatctaatgcttaactctgagaaaatgtccaagtccacagggaatttcctaactctggaagatgccataaaaaagtactcttctgatgccactagatttgcccttgctgatgctggcgatggtatggatgatgcaaattttgtcactgaaactgcaaattctgctgttatgaggcttacaaaagaaatttcatggatggaggaggttacagctgctgaatcaaaattaagaactgggccgcccactacatatgctgaccgtgtgttttcaaacgagatgaacattgcaatcaaagaaactgagaagagctacaatgctttcatgttcagagacgccctgaagtctgggttctatgacctccaattggctagagatgagtacaggctctcttgtggtgcagcaggcatgaaccgtgatctgttgtggcgatttatggatgtccagaccaggcttatcacccccatttgcccacactatgctgagcacgtgtggcagaagatcatgaagaaagaaggctttgcaataaaagctggctggccagccgcggacaccccggatcccacactgagaattgcaaataaatacctgcaggattccatagttttgatgaggaaactgcttcagaagcaagagtctggttctaagaagcctaagaagggagctgcaccggcacctccgtccgaggaaaagaagatgagcattggcctcatatatgtgaacgagcactactctggatggaaagagcagtgcttgaaggtgctgcagtccaagttcgacagccaaagccgctccttctcacccgatcaggaaatcgcagaagctctgaaggagtgccccatcgggcaggaaatgaacctgaagcaggttcagaagctgtgcatgcccttcatcaagctgaagaaggacgaggcaagggaggttggtcctcaggcgctggacttgaagcttccgttcggtgagatggatgttctccgggagaacttggagctgatcaagaggcagctgggccttgagcaagtcgaggtgctctccgcgtcggacgaagctgctcgcgctaaggctggtgaacatgcttcgctgctggagaagaacccaccatcacccggcgaccccatcgccatcttcctcagcaaacagagctgaaaactgaccttgcatatggcccttttgttatttacttcgccgcacatttgcttcttttttgtttttgtttttgtgaaaccagtttcgtgtctgtaaacatagcatgttgtcctccggtttggtgaaaccagttttttctttttctttttctgtcaacagaatatgttatccattctctgggtaaccagttcggctattgtcgacaaagtatgttttgtgtcgctttacatca

SEQ ID NO: 204882 - DNA, 1699 bp, Zea Mays
cttggatgcggcgcagcaaaagcaaccagcttctcgccccgcccccggcgcggctcgtcgtcactcgtgagccgcgtccgtcgtccgcgcacgcccgtgatctccttaaattcccccctccgggaattataataacccccggccgcttgctagttctcgcaggccagcggtgaccgcggccacagggcacctccaccgcgcgacgacgacaaccatggccgtgccatcgcggctcctcctctgctccgccgtcgtcgccgtggcgctgctcgtcgcgccgggagaggtggccggcgccgcgggacacgggcacacgcacacgaggcgcctgcggcccaagaagagcgcggcggcggccgccgcgaagctgtacccggcgaacgcgacgcgggcggaggcgatcgagcggcagttcacgcggtgggtgcgcttcgtgggcggccgcctcggccacggcacctacaactacaaccggccggcgctcacgctcctgcccgcgcgcacgctcgtcgtcgacaggaggccgggcgccggggacttcacgtccatccaggccgccgtcgactcgctcccgctcatcaacctcgcccgcgtcgtcatcagggtcaacgccggcacgtacacggagaaggtgaacatctcgccgatgcgcgcgttcgtcaccgtggagggcgccggcgcagacaagacggtggtgcagtggggcgacacggcggacacggccgggtcctggggcaggcccatgggcacgttcggctccgccacgttcgccgtcaactccatgttcttcgtcgccaagaacatcaccttcaagaacacggcccctgtgccgcggcccggcgctctgggcaagcagggggtggcgctgcggatatcggcggacaacgcggcgttcgtggggtgcaacttcctgggcgcgcaggacacgctgtacgaccacctcggccgccactactaccgcgactgctacatcgagggctccgtcgacttcatcttcggcaacgcgctctccctctacgaggggtgccatgtgcacgcgatcgcgcggaactacggcgcgctgacggcgcagaaccggcagagcctgctggaggacacggggttctcgttcgtcaagtgccgggtgacggggtccggcgcgctgtacctgggccgcgcctggggaaccttctcccgcgtcgtcttcgcctacacctacatggacaacatcatcatcccgcgcggctggtacaactggggcgacccgacgcgggagatgacggtgttctacgggcagtacaagtgcacggggccgggcgcgaactacgccggcagggtgcagtggtcgcgggagctcaccgacgaggaggccaagcccttcatctcgctcgacttcatcgacggcttccagtggctccggttgtagcacgccacattgttgacacacacacacacacacaccatgcatgaccttaattagttgatgtgaatgaagagcaaacaaaaacacaaggcaaatacaaatccaattgttggcgcaactgcgtacgatgagagttggtggttggctggctgatgagtgagcgctgcagaactacgtcctgcactctttttgttcgactcctttcctgtgcatcacatcgctgcaggttttcatgaacatgggcttccttggcccaggccggaatagcgtcaggtttggtccacatgctgacacgcg

SEQ ID NO: 204883 - DNA, 2089 bp, Zea Mays
caagaaccggaagaaacggccaatatacagaacgagccagcactccattttctcatacggttggcccggaattaggcgcctcgattgcttgctagccgccagattagtctttcgctaccctaagatcggtcggaagaagaacagttcaatctcggttcatcagaagtgaaactgcttagatcagatttcgtggattccttcacttcaaagtttgcatgtcattgaactgaatgatccaatctgatttgctgactgctcctctcatcactcaaaatttgtgatggaacaggaccatcaagcctatgaagaggctgatcactacgctaagaggaaagcagccaatatttgtgcttccactggtgctagaactgtcaagagaaaactagaagcaagtaggattccacccaatgatttggttagaagaacaggcaaagaacagaaagtacccgcttatgaagttcgtcagttaaccaagaatgagttgcctctgaaggtgtctgctaggaatgccatcaatagcgatcacttccataggcctttaagtagcagatgcaatgatcttaccaagaacatttctgagataaggccagtttgcagagctcttcctttgcctgagaaacctttgtgcatcagagaagaggacgagtgctcagtggctagttgcagcgcaaattactcagagtacagtaccagtgataacaaacaatcagtcggaaccggcagttgtttcgctgacgatgttatgtattcatgccaacgcagacaggagaccaagaatgcctatggatctggtttgtttctgaatgtccatgagctggagctgcaagcataccaatcaaccgtcagagctttccatgctgcaggacccctgacatgggagcaagagtcactcctgacaaacctgcgcctctcgctcaacatctcgaatgaggagcacttgcttcagttgaggcatctcctatctctttgataattttcaaaaactaatgtgccttttttatatctgtggattacctccaacccgtagagatctttgcatgcttgtagcgtatgtttcccaccttgactgttgtatataaagaagagttcagagaaatccacttatagctgttgtacttcaccagaactttgttgctaggagtaaatgtcttgcatttttttagtgtttttacaattcaaggaaatgtgaagctatcttcgaaatatatttgtcatgctgataatcaaggttgaaatatcagttcctttaaatgaagctgaagcatcaattctagttactgatctcgctcattgtatctctttcttcgctttggtatcgttctgtatgtttgtagctgaaatgtttcgccattaataggtcctgattaagatctatctttaatactcctagttttgcattggtgctgctgatgtttaaacctcatgctgtgaacacacagatttctgtgcagtggatgaataccactttatgagaaagaggtcgctgaaacagacagtgcactgaagtctgaaaaccaggtgcttgggtgcctttcttctctcccgtcaggccatcatattgaaggcatgtctgggttttatgattcattgatcatggtgacggataagaccgggtacgccatcaaataacctagggaccttaaaatgtgttcatgccctcttgaagttcaaattctgtttatatatattagatgtccccaagggaccctattcttcattttaactgaaaagttatgtaaattttttcttttaatcaaactgcaattgtgtttgtcaattgttcagccaacatctgttcttgtaacttggaacctgtatctctgcagtaagacaccggtacaggaattcaaatgagacactgaaacttcaaagatgctggaaatttgtccgtatttgacttttgttccggaacttttgatgaggctgtattttgtactccatatagttactggtttactgtcgaacggcttaagaaagctaaacagatggaaagggaaactattgttttacggcgactagccaacttattgttttttctcgaacacgcaggagaactgcgcatcattatattgaaagagagaaatgtccg

SEQ ID NO: 204884 - DNA, 1528 bp, Zea Mays
tcgaactcccattagcaagcaaaacgaagcagatcaaaaggacatacttccggcggaacagaggattgtgtggaggagccatgaatctgcatatgccttcatgccatactatttctagaagagcaagaaccataagcgatttggttaaaatattgatccccatgtttggattaatgtccctgctacatcttgtctatctagtctttgggaagaagacttcaagaagaccacatctatcacaacgttcttttggtgagcactttgagaaagttacttacaatgatcttgccaaagcaacaagggacttctcagaatacaacctaattggaagaggaagctatggttcagtgtacagtgggaaattgaaggaagtggaagtggctgtcaaggtttttaaccttgagatgcaaggtgcagacaaaagcttcttggtagagtgtgaaacgctgagaagtattcaacatcggaatcttcttcccatcataactgcatgctcgagtatagatacaacgggaaattcttttaaggctttaatttatgagcttatgcctaatgggaacttggataaatggatacatcacaaagacaatgaggcacttccaaagcgtctaagcttagctcaaagaattgcagttgtcgtcaatgtagctgatgcattggattatttacaccacgactgtggaaggcccaccatccattgtgacttgaagccaagcaacatccttctcggtgacgatatgaatgctgtcttggcagattttggcattgcacatctttattctgattctcagtcaacttggacaagttcatttagttcgatcggtgtcaaggggtcaattggctatatccctccagagtacggaggtggtggctctgtatcgacgtccggggatgtttatagttttggtgtagtgtgcttggagattttgatcggcaaaaggccgatagatcctgtgttcatcgggggactagacatcatcagcttcgtcaagaacagttttccagatcaaatatttcacattatggattcacatcttgtggaagaatgcgagcatttaattcaggacaataaagtaacaaacgaagaaatgtaccagtgcctggtggatctgctgcaagtagcgctttcttgcacgtgctcattaccatctgaacggtcgaacatgaagcaggtagcaagcaaactgcatgcaatcaagacgtcacaaattggatataaataatccatgtaaaattaggtgtaccgtgtactcccacgactaggagcgtaaaaatgtactctagcataaaattaagtgttgttcatctactgtgtgcatgtacttcaattgtccaaaaatatagatgcacctatactgtttgtggacatcgttaatttcttttgtaagttcacgtagaatatcttatatttctagataaattggaaatgttcgaatttcttgcatttgtaaatcgaggtcgtatagaaccgcattggtatgtacaacccaactcaattcacgcaaaccaaaagtttagtattcggtcg

SEQ ID NO: 204885 - DNA, 3358 bp, Zea Mays
cgaactcccattagcaagcaaaacgaagcagatcaaaaggacatacttccggcggaacagaggtgccaattaagagcatcatgcgtaactctaagccgccgagcaaactggccatgcttatggcgttgctgtcgctgtcgtttctgttttgttatggagtcgagaaggtccattgctcgacggttcacgagaacaaccaagattttcactctctgctcgatttcaagaagggcatcaccaacgatccaaatggagccatgagcaattggaccaacaacactcatttctgccggtggaacggtgtgaagtgtaccttgacaccgccatatcgtgtcatggagctcaacctcactggcaacgacttggctggccgaatctccacctctgttggaaacctgacctaccttagtttgctagcactaccaaataatagatttagcggcccaatacctccccttaacaaactccaaaacctaagttacctttccctggacaacaactttttgaatggtgtgattcctgagtcacttacaaactgttccaacttagacacactaggtctctctaaaaataacctcacaggtgttattcctcctagcataggttctcttaccaagctaaaagttattttcctttataaaaataatttgtccggggtcatcccatcaagcctaggtaacatcaccaatttatctgtaatcgctctttcagaaaatcaactcaatggacttattcccactgagttatggcaaatgccacacatagcgtctttgtacctgttttgtaataatctatccggtgaaatcccacaaactatatctaatttatcttctcttcaagagctatccttggcagtcaatatgctgagcaacactttgccatccaacttcggccatgccctccctaatctcaaattgctatacttgggaggcaacttgtttgaaggacaaattccagattctctaggcaatgtttcaggtctagtacatttggatatgtcctacaataagttgactggcaaaatccatagcatatttggaaaacttttagggctatcttttttaaacctcgaggaaaatatgtttgaagcgagtgatagtgcaagttgggatttctttgttgacctgatagcgtgcagttccctgacggtgctttcattggctagcaataatctgcagggagctataccaaattccattgctaacctatccaccaacctcagaaatctactaatgagcgacaaccacctatccggagtagtccccccaagtattgggaaattgaatggcttaattgaacttgaacttgatggcaacaattttaccggtacaattgaggattggatgccaaagttgacaagcctacaaaagttatatctccatgacaatagctttgaaggtacaatcccaccttccattagtaaccttgctcatttgacacttttggatttttcaaataataaattcactggttcaataccacctagcatgggaaacattcaacttctgatcaatttgagccttagcaacaacaatttcagagggacaatacctgccaagtttggggaccttaaacaattagtcttccttgatgtttcatcgaacgaacttggtggggaaattcctaatagtttgggccagtgccaaaatctagccgccattaaaatggaccaaaatgttcttataggaaacatcccgacctccttcagtaatctaaaaagcttgagcttgctcaatctttcccacaacaaattatcaggccccttgccaaattatttgaatgatctaaagcttctcaataaaattgacctatcttacaataatttccatggagagataccaaaagctggtatattagataattctacacttgtttcactggatggcaattcaggattgtgtggaggagccatgaatctgcatatgccttcatgccatactatttctagaagagcaagaaccataagcgatttggttaaaatattgatccccatgtttggattaatgtccctgctacatcttgtctatctagtctttgggaagaagacttcaagaagaccacatctatcacaacgttcttttggtgagcactttgagaaagttacttacaatgatcttgccaaagcaacaagggacttctcagaatacaacctaattggaagaggaagctatggttcagtgtacagtgggaaattgaaggaagtggaagtggctgtcaaggtttttaaccttgagatgcaaggtgcagacaaaagcttcttggtagagtgtgaaacgctgagaagtattcaacatcggaatcttcttcccatcataactgcatgctcgagtatagatacaacgggaaattcttttaaggctttaatttatgagcttatgcctaatgggaacttggataaatggatacatcacaaagacaatgaggcacttccaaagcgtctaagcttagctcaaagaattgcagttgtcgtcaatgtagctgatgcattggattatttacaccacgactgtggaaggcccaccatccattgtgacttgaagccaagcaacatccttctcggtgacgatatgaatgctgtcttggcagattttggcattgcacatctttattctgattctcagtcaacttggacaagttcatttagttcgatcggtgtcaaggggtcaattggctatatccctccagagtacggaggtggtggctctgtatcgacgtccggggatgtttatagttttggtgtagtgtgcttggagattttgatcggcaaaaggccgatagatcctgtgttcatcgggggactagacatcatcagcttcgtcaagaacagttttccagatcaaatatttcacattatggattcacatcttgtggaagaatgcgagcatttaattcaggacaataaagtaacaaacgaagaaatgtaccagtgcctggtggatctgctgcaagtagcgctttcttgcacgtgctcattaccatctgaacggtcgaacatgaagcaggtagcaagcaaactgcatgcaatcaagacgtcacaaattggatataaataatccatgtaaaattaggtgtaccgtgtactcccacgactaggagcgtaaaaatgtactctagcataaaattaagtgttgttcatctactgtgtgcatgtacttcaattgtccaaaaatatagatgcacctatactgtttgtggacatcgttaatttcttttgtaagttcacgtagaatatcttatatttctagataaattggaaatgttcgaatttcttgcatttgtaaatcgaggtcgtatagaaccgcattggtatgtacaacccaactcaattcacgcaaaccaaaagtttagtattcggtcg

SEQ ID NO: 204886 - DNA, 789 bp, Zea Mays
ctgctccgatgcctttgattgcagtgggtggtgtggatcatcagaagcgcatccaaggtcaggtcaggtgtgtgggggcatggcatggcaggtatggaggagttgctgacgctgctgttcaacgcgctgctgctggtgttcgtggtgaagctcttgctggccttgttccacaccaagatcatcgtcatcctcctctacatcctcgtcctcctcttcgccatgctcctctccggcagattccccgattgtcttcgattgattgatctgttggattggattggatctgaaaggagccggaaatggggaaaaatgaggagtaagaagagaaaagggagcgccgccgcgagggaaagggccaaggaaagggaaggctcttcttttgccctcccagcgaaaccaagccccgttctggaagggaggcggagacctttcgttgcacagcacagcacagccaccgtgtaactgccggaacacggatggggatccgccgttgcattctctcttctccacaccataagcaggacaccgatgctatttccactacaccataagcagtgatggttggcgaagtaatccgattccaatgcagacatttttccagtcagcaatgggcactgcatctagtttcatctgcgctatctcctggttcttttcagtcagcagccattggtggcgaaatcaggatccgaatagcttgctgttctgtatgtattgaactgctgatcacgctaatcagtgtacgtcgtggcaagaactcaattcatagaaaaaaaagaaaaagtgtcaatc

SEQ ID NO: 204887 - DNA, 427 bp, Zea Mays
cgacaccaaccagaccaccatgcgccatacccaacggaaactaggccactgcggctacctctcgagctcgctatcgccagcgttcatggaagggctgggaaggacccccatgccatgtggatcgtgcgcgggcagctaatcaggctcggggagtcggaggtcggcgacaattcctcaccaagaaatcagcgccgccgtagatccgccgagagctgaggccagcaacctctgtgtgcaagattctcggtcaagaacaggtaccactggacgaggcacatgaaggatgctgtgatgagttcgtgagtggtctaggctgtcgtctcgcagtcaactttgggttgctggatcgttgtcttcgtatgatgtaattatttaactattttgtacagaactccattatatattaaagatgtgacattcatttctg

SEQ ID NO: 204888 - DNA, 3129 bp, Zea Mays
atcaaacagctctacacttcataaaaacagtgtgagtggtgtggctgtggggagaaggtgctggtttttgctaacagccattccaatagatcagttttataagtatattgttttacactatttaactgcgattgtttgatgtgctaccccctctcccagaagctacgcaccaattcaattcccgagaaagtgattggggttttacatcttttatgcctttgttggatctgtatgattcaagtaaaggatatgttgtgaatgataaatgtatcatagaagctgaggttgctgtgcgtaaaactcttgatttctggaactatgactccaaaaggatgactggttatgttggcctgaagaatcaaggggctacctgttacatgaactcccttcttcagactttataccacattccttactttcggaaggctgtatatcatatgcctactacagagaatgatacgccttcagggaacattccattggctttgcaaagccttttttataaacttcagcatagtgataacagtgttgctacaaaagagctcaccaaatcttttggatgggatagctatgattcgttcatgcagcatgatgttcaagaattgaatagggtcctatgtgaaaagctggagaacaagatgaagggaaccactgtggaaggagcaatacaaaaattgttcgagggtcaccatatgaattatatcgagtgtattaatgttgagtctaaatctaccaggaaagagtcattctatgatcttgcactcgatgtcaagggatgttctgatgtctatgcatcatttgataagtatgttgcagtggagaggttagaaggtgataataagtatcaatctgaggaacatggtctacaggatgccaagaaaggaatgctttttattgactttcctccagttctgcaacttcagttaaaacggtttgaatatgattttgtgcgggatacgatgctcaagataaatgaccgttatgagttcccacttcaattggatcttgatagagatgatggaaaatatctttctccagacgcggatagaagtgtgcgtaacctatatactcttcatagtgtactggttcatagtggtggagttcatggaggacactattatgcctttattcgtccgaagctgtctgatcaatggtacaagttcgaggatgaacgagtgacgaaagaagacatgaaacgagcattggaggaacaatatggtggtgaagaagagctcccgcataccaaccctgggttggatactgcaccgcttagatttaccaagcattcaaatgcttacatgcttgtttacattcgagaaagtgacaaagataacattatctgtgatttggatgatgaagatatttcagaacaccttaaggttaggttgagaaaggaacatgaagagaaggagtacaagaaaaaggagaaggctgaggctcatatgttcactgcattgaaggtggcccgagactttgatattaaagagcaaattggaagacacatgcactttgatcttgtggactttgacagagttaatagcttccgtgcacctaagaacatgtcaatcaacgaagtcaaggaggagctttctaaagaatttggcatccctgtagaatgccaacgattttgggtatgggcaaaacgacagaactgtacctacagacccagtcgtccattaacctcccaggaggaaacatctactattggggttctcaaagatgcaacagtggcgaagttaccgaattctgaagtacgattgttcttggaggttcatttcagacaggagaaccaaccaattgctccttggaataccaaagaagatatattacttttcttcaagctctatgatcctgaaaaagaagacctaagatatgtcggcaatttttttgtgaaagcatcaggcaaaccatctgatatagtagaaaggctgaatcagattgctggatttctgtctgatgaagatattgagctctatgaggaaataaagtttgaaccagttgtgatgtgcgtacccattgagagtaatgcttcgttccgttcaagccagattgacaatggtgatataatatgctaccaaaagcactgtttgccagattcaatggatcgatatcgatatcctaccgtcccttctttctttgaatatattcataatagacagattgtccatttcagattgcttgagaaaccaaaagaagaaggcttctctcttgagctttcaaaatgctccacatatgatgatgttgttgagaaggttgctaagcaactacgtatggatgacccttctaaaatccggcttactcaacacaatccatcgtctcagcaacccaaacctcacttcatcaaatacaggagtcttaattatctttcggacatgctacataatcacaatcagatgtgtgacatattatattatgacatcctggatattcctttgcctgaactagaatctatgagatctctgaaggtcgctttccaaaatgccgcaaaccatgagatgtcgtttcacattatgcggttaccaaaaagtaactctctccttgatttgattgaagacttaaagtcaaaggttgaaatttcttgtaatgatgctgaatttcggttttttggagtctaccttcacaagatatgcaaggtgtatcaacctggagataagatagattcagttaatgaccatggacccttgtatattgaagaggttcccgaggatgaaaaaaatgccgggcctcatgaccgtttggttcatgtctatcattttgaatataatcatcatattcagtattttggtgaacctttcttcttcctaattcgtgatggtgaagctttgtcggatatgaaagtacggattcagaagagacttcaagttcctgatgagcagtttctaaagtggaaatttgctcatgttacattcagtaagccagaatacctccaagattcagatattgtaatgaacagattccatagacctgtttatggaggttgggaacaacaccttggattggagcatacagccaccaccccaaaaaggtcctacttaggcaacaaccagaaccgccattcttttgagaagcctgtgaggatttacaactaaagctaggaatactttttacatgcgatgaatgctgggaatg

SEQ ID NO: 204889 - DNA, 3517 bp, Zea Mays
cagaagctacgcaccaattcaattcccgagaaagtgattggggttttacatcttttatgcctttgttggatctgtatgattcaagtaaaggatatgttgtgaatgataaatgtatcatagaagctgaggttgctgtgcgtaaaactcttgatttctggaactatgactccaaaaggatgactggttatgttggcctgaagaatcaaggggctacctgttacatgaactcccttcttcagactttataccacattccttactttcggaaggctgtatatcatatgcctactacagagaatgatacgccttcagggaacattccattggctttgcaaagccttttttataaacttcagcatagtgataacagtgttgctacaaaagagctcaccaaatcttttggatgggatagctatgattcgttcatgcagcatgatgttcaagaattgaatagggtcctatgtgaaaagctggagaacaagatgaagggaaccactgtggaaggagcaatacaaaaattgttcgagggtcaccatatgaattatatcgagtgtattaatgttgagtctaaatctaccaggaaagagtcattctatgatcttgcactcgatgtcaagggatgttctgatgtctatgcatcatttgataagtatgttgcagtggagaggttagaaggtgataataagtatcaatctgaggaacatggtctacaggatgccaagaaaggaatgctttttattgactttcctccagttctgcaacttcagttaaaacggtttgaatatgattttgtgcgggatacgatgctcaagataaatgaccgttatgagttcccacttcaattggatcttgatagagatgatggaaaatatctttctccagacgcggatagaagtgtgcgtaacctatatactcttcatagtgtactggttcatagtggtggagttcatggaggacactattatgcctttattcgtccgaagctgtctgatcaatggtacaagttcgaggatgaacgagtgacgaaagaagacatgaaacgagcattggaggaacaatatggtggtgaagaagagctcccgcataccaaccctgggttggatactgcaccgcttagatttaccaagcattcaaatgcttacatgcttgtttacattcgagaaagtgacaaagataacattatctgtgatttggatgatgaagatatttcagaacaccttaaggttaggttgagaaaggaacatgaagagaaggagtacaagaaaaaggagaaggctgaggctcatatgttcactgcattgaaggtggcccgagactttgatattaaagagcaaattggaagacacatgcactttgatcttgtggactttgacagagttaatagcttccgtgcacctaagaacatgtcaatcaacgaagtcaaggaggagctttctaaagaatttggcatccctgtagaatgccaacgattttgggtatgggcaaaacgacagaactgtacctacagacccagtcgtccattaacctcccaggaggaaacatctactattggggttctcaaagatgcaacagtggcgaagttaccgaattctgaagtacgattgttcttggaggttcatttcagacaggagaaccaaccaattgctccttggaataccaaagaagatatattacttttcttcaagctctatgatcctgaaaaagaagacctaagatatgtcggcaatttttttgtgaaagcatcaggcaaaccatctgatatagtagaaaggctgaatcagattgctggatttctgtctgatgaagatattgagctctatgaggaaataaagtttgaaccagttgtgatgtgcgtacccattgagagtaatgcttcgttccgttcaagccagattgacaatggtgatataatatgctaccaaaagcactgtttgccagattcaatggatcgatatcgatatcctaccgtcccttctttctttgaatatattcataatagacagattgtccatttcagattgcttgagaaaccaaaagaagaaggcttctctcttgagctttcaaaatgctccacatatgatgatgttgttgagaaggttgctaagcaactacgtatggatgacccttctaaaatccggcttactcaacacaatccatcgtctcagcaacccaaacctcacttcatcaaatacaggagtcttaattatctttcggacatgctacataatcacaatcagaatctatgagatctctgaaggtcgctttccaaaatgccgcaaaccatgagatgtcgtttcacattatgcggttaccaaaaagtaactctctccttgatttgattgaagacttaaagtcaaaggttgaaatttcttgtaatgatgctgaatttcggttttttggagtctaccttcacaagatatgcaaggtgtatcaacctggagataagatagattcagttaatgaccatggacccttgtatattgaagaggttcccgaggatgaaaaaaatgccgggcctcatgaccgtttggttcatgtctatcattttgaatataatcatcatattcagtattttggtgaacctttcttcttcctaattcgtgatggtgaagctttgtcggatatgaaagtacggattcagaagagacttcaagttcctgatgagcagtttctaaagtggaaatttgctcatgttacattcagtaagccagaatacctccaagattcagatattgtaatgaacagattccatgtgagataagttttccttttggcgaaagaatcctttcgcaagaacattcattgtaacattgaagtattgtataagcttttcctggtattgttttagaaacagagacctgtttatggaggttgggaacaacaccttggattggagcatacagccaccaccccaaaaaggtcctacttaggcaacaaccagaaccgccattcttttgagaagcctgtgaggatttacaactaaagctaggaatactttttacatgcgatgaatgatgaacaggatatgaagcagtcttgttccaaaagcagtcttttggtgatgtacatggagcttttgcatagagtagtttatgtggcaattatctcaagaattttcatctggtggatgtacagggtccgtatagcaacatttccttgtagaaagttgaagctgtatatcgagggtggatttacatgtgttaatcttttcgaccccaagcctctgggaggctgtgaaccatagcctcatgaaatatgcctgttgttcattcagtgtttgtgtttttctcgtttgtcattattgtgcactcgcttttaatatgctcggtctattggaccgagcaggaaaatgatgttttaccttatagtggtctaactggttcattaggcgcgcaagtgcacagttgaattactcctttggaagcttgaaacgagaaacataggaaatgtctatgacggtggacatgccaagaccccaagtcctcggtttcaaggcctcccaccgctggctttctag

SEQ ID NO: 204890 - DNA, 3882 bp, Zea Mays
cccagcaccagctgtgtattagcggccgggcggacaagaagcagttaccgcgacaacggacgacggcgacgcgagcagtcgagtaaagacgcggtggggcggcgctgcgctgggcgggtggtgagatcagaggaaggaacgggatcgctcccggttaggttgtcgtcgtgcgcgggtgctggggcgagggcgtggcggatctcatctaacgccgccacttgctgctaccacttccccttcccccgcacctctgagctctgacctcccgcccttctcccacccatcaccatctttgtccctcgcgcaattcgccgaacacaccgcgcgcgccgcgcctccctgcgacggctgcctccacggccaatgctggcggcgcgatgaacgtggatgaggaggtggagagcggggaggaagaggaggaggacctgttctacgagtcgctcgatcgcatcctctcctcctcgggctcctccacatctgcctcggacgacgacggcgccgacagcccgcgccgccgccgcggttgcgatgcgccggtcgcggccgccgcagcggccctcgacctgtggacctctcagccgtcgcccgtccaggagcggcgccgccggctgctccagctgatggggctcataggggatccttccctcgccgggtttgagactggccggtccgcctccgaagatgccgcgggcccgcccccagcctctcccgtctctcggtccagatcaggcggggccgccctcggctccgccgggaagccaccactcgggggcgtccgtctgcggtcatccttgtccgacgggcccgatcctgccgacgaggaccccaggtgcttgatcaggaaccttgacgacggcagagagtacgtggtgaaggaagaattcggtctccgcgaggtcggcacggggcgccaccttaccgttgaggagttggcccgctcacctattgttcaggagcttatgcggcgccaagcttttagtactcccaactccaactgcaactcaaattcccaaagtggcgcctccacaccgatcgaaaggtcgagctcaggttccagcaatggtgggtcgcgctccaagcggcgaagcagctggctccgcagcatccgctgcgcagctgggtccttggtcacccactcccgtgaccgcagcagcagcgacgagaaggacacgtcttcagagaaaggcgggcaccactccagctccgctacggatgacagccaggacagtgttccacgccatggcccggcccgtgtcaaggtgcggcagtatgggaagtcatataaggaactcagtggcctgtttatgacacaggagatacatgcacacaatggttccatctggagcatcaaatttagtcctgatggtcgttaccttgccagtgccggggaggattgcataattcatgtttgggaggtgttggagttcaagagggcagggaaggagagggaggtgaaggagaatggggtatgcaatccgcttgttgctatggtatacagtgagtcatcagagacgatggtggcatctggtgctccaagcgggagccattgggagaagaagctgcgatcaaaggtactgcaaggtgggggatcagtgagctcagacaggttgatggtgcctgagtatgtgtttgcactgtccgagaagcctgtgataacctttgcagggcattcagaggatgtgctggatctcagctggtccaaatctcaggtgatgtacacagatttctaatttatcttcaattctaatgtgtagatattatttttcagtgtaagtgcaaagttcaggctataataggatgtagaataccggaaagtagggtattggtagcagaaatcagatccacaaataactcatgttattaagaacacaaaaagctatgcaattacaatcatcatattagaaacatcatgatcacacaccagctaaacttatttattgttgggtttgggcgtacataacttgtatccagatctggcatagtgcaactggtgcactgtctggaaacgaaacttgaccagatgccctttatgcattttcgtttttgtgatagataaatttgattttactgctcccaagtgtacccaagcttttaccatgtgcataagaccgaggtgctctctacctgtaattaagacatggtctctacatgcttatagacttccattttactatggtttaaattttcgtctcagtgcatctagaaattttagcaggaattgcactgcacgctcctaaacttgcccgatcgtctaaactaacccctcaaacttttagagccccttaaacttgcacgtgtctcacaaaaaccgctgaacagaagcaaagtttagggagtaactgtgcaagtttaggggctaggtgtgacaactgtgcgaattgaatgagacgggaaagcaattttcaagttcaggcagctagcccactagtatttgctttcatcatcaatggataaaacagtacggttgtggcacatgtcaagcacttattgtttgaaaaccttctcacacactgactatgttcaatcctgttgatgatagatacttcattagtggttccctggatgaaaaggttcgtatctggagtattccaaagcgtgaaattgttgattgggttgatcttcatgaaatggttactgctgcctgctatactccagatggaaagggcgcgctgatcgggtcccacaagggcagttgccatttgtatgatacatctgatgacatgctttgctacaaaacacagattgacctgcaaaacaagagaagaaaatctagccagaagaaaataacaggatttcagtttgtcccaggggattcttcaatggtcataatcacatctgcagattcacgaatcagagttcttgatgattttgagctagttcataggtttaaaggattccggaacaccagcagccaaatctcagcttgtttagctggaaacggacggtatattatctcggcaagcgaggattcccgtgtatatatctggaggaacgatgatggttcgaaaccaagtaaaaagaagggcattgtttctgtcacaaatacccatgaacacttccactgcgagagtgtcacggttgctgttacctggccttttaccagcaccacaatgacttctttaatgaaccccaggaaacaagagcttgagcttgggtctgagaatggctattcaccgcaagatctgcaaaccaaacttgctaaggcacaggagatgacagatgttgagtaccggagcacaaatatcacaagttacaactcgaagcataacagtgaccggacatctccggcttggcctgaagaacttgtcacaccaccaaatcaaagtctcagcgctactacctgccatgccaacgagggagaccaagctctgaatcggtcggcctggggcctagtaattgttacagcaggccgtggaggtcaaatcagaacatttcaaaacttcggttttcctgtaagagtatagcatgagtccgaatacataagatagtcactgccattcaggagtgcagtttgtgtatagataggagatagtgggtgagtttcacactattcagggattgggtttgactgttccttggtgcacctgctagagatcagaatcttcatctaacatacactgtcagtagtccaaaacttgtgtatgccaaatttattttaccctgaaggcccaagttgtacatgaaagagaaagccctacagagagcaacactatcagctgactggagataattcatctgtcagcttcaaccctacctttcggttttagacttctattccgaaccatgacatgttcttgtaagaaaagaaaaggaaaaagatagacgtggtgaaattgtcattttggctttatgatctcatggtattggtatcctgaatctttt

SEQ ID NO: 204891 - DNA, 3896 bp, Zea Mays
cccagcaccagctgtgtattagcggccgggcggacaagaagcagttaccgcgacaacggacgacggcgacgcgagcagtcgagtaaagacgcggtggggcggcgctgcgctgggcgggtggtgagatcagaggaaggaacgggatcgctcccggttaggttgtcgtcgtgcgcgggtgctggggcgagggcgtggcggatctcatctaacgccgccacttgctgctaccacttccccttcccccgcacctctgagctctgacctcccgcccttctcccacccatcaccatctttgtccctcgcgcaattcgccgaacacaccgcgcgcgccgcgcctccctgcgacggctgcctccacggccaatgctggcggcgcgatgaacgtggatgaggaggtggagagcggggaggaagaggaggaggacctgttctacgagtcgctcgatcgcatcctctcctcctcgggctcctccacatctgcctcggacgacgacggcgccgacagcccgcgccgccgccgcggttgcgatgcgccggtcgcggccgccgcagcggccctcgacctgtggacctctcagccgtcgcccgtccaggagcggcgccgccggctgctccagctgatggggctcataggggatccttccctcgccgggtttgagactggccggtccgcctccgaagatgccgcgggcccgcccccagcctctcccgtctctcggtccagatcaggcggggccgccctcggctccgccgggaagccaccactcgggggcgtccgtctgcggtcatccttgtccgacgggcccgatcctgccgacgaggaccccaggtgcttgatcaggaaccttgacgacggcagagagtacgtggtgaaggaagaattcggtctccgcgaggtcggcacggggcgccaccttaccgttgaggagttggcccgctcacctattgttcaggagcttatgcggcgccaagcttttagtactcccaactccaactgcaactcaaattcccaaagtggcgcctccacaccgatcgaaaggtcgagctcaggttccagcaatggtgggtcgcgctccaagcggcgaagcagctggctccgcagcatccgctgcgcagctgggtccttggtcacccactcccgtgaccgcagcagcagcgacgagaaggacacgtcttcagagaaaggcgggcaccactccagctccgctacggatgacagccaggacagtgttccacgccatggcccggcccgtgtcaaggtgcggcagtatgggaagtcatataaggaactcagtggcctgtttatgacacaggagatacatgcacacaatggttccatctggagcatcaaatttagtcctgatggtcgttaccttgccagtgccggggaggattgcataattcatgtttgggaggtgttggagttcaagagggcagggaaggagagggaggtgaaggagaatggggtatgcaatccgcttgttgctatggtatacagtgagtcatcagagacgatggtggcatctggtgctccaagcgggagccattgggagaagaagctgcgatcaaaggtactgcaaggtgggggatcagtgagctcagacaggttgatggtgcctgagtatgtgtttgcactgtccgagaagcctgtgataacctttgcagggcattcagaggatgtgctggatctcagctggtccaaatctcaggtgatgtacacagatttctaatttatcttcaattctaatgtgtagatattatttttcagtgtaagtgcaaagttcaggctataataggatgtagaataccggaaagtagggtattggtagcagaaatcagatccacaaataactcatgttattaagaacacaaaaagctatgcaattacaatcatcatattagaaacatcatgatcacacaccagctaaacttatttattgttgggtttgggcgtacataacttgtatccagatctggcatagtgcaactggtgcactgtctggaaacgaaacttgaccagatgccctttatgcattttcgtttttgtgatagataaatttgattttactgctcccaagtgtacccaagcttttaccatgtgcataagaccgaggtgctctctacctgtaattaagacatggtctctacatgcttatagacttccattttactatggtttaaattttcgtctcagtgcatctagaaattttagcaggaattgcactgcacgctcctaaacttgcccgatcgtctaaactaacccctcaaacttttagagccccttaaacttgcacgtgtctcacaaaaaccgctgaacagaagcaaagtttagggagtaactgtgcaagtttaggggctaggtgtgacaactgtgcgaattgaatgagacgggaaagcaattttcaagttcaggcagctagcccactagtatttgctttcatcatcaatggataaaacagtacggttgtggcacatgtcaagcacttattgtttgaaaaccttctcacacactgactatgtgacttgcatacagttcaatcctgttgatgatagatacttcattagtggttccctggatgaaaaggttcgtatctggagtattccaaagcgtgaaattgttgattgggttgatcttcatgaaatggttactgctgcctgctatactccagatggaaagggcgcgctgatcgggtcccacaagggcagttgccatttgtatgatacatctgatgacatgctttgctacaaaacacagattgacctgcaaaacaagagaagaaaatctagccagaagaaaataacaggatttcagtttgtcccaggggattcttcaatggtcataatcacatctgcagattcacgaatcagagttcttgatgattttgagctagttcataggtttaaaggattccggaacaccagcagccaaatctcagcttgtttagctggaaacggacggtatattatctcggcaagcgaggattcccgtgtatatatctggaggaacgatgatggttcgaaaccaagtaaaaagaagggcattgtttctgtcacaaatacccatgaacacttccactgcgagagtgtcacggttgctgttacctggccttttaccagcaccacaatgacttctttaatgaaccccaggaaacaagagcttgagcttgggtctgagaatggctattcaccgcaagatctgcaaaccaaacttgctaaggcacaggagatgacagatgttgagtaccggagcacaaatatcacaagttacaactcgaagcataacagtgaccggacatctccggcttggcctgaagaacttgtcacaccaccaaatcaaagtctcagcgctactacctgccatgccaacgagggagaccaagctctgaatcggtcggcctggggcctagtaattgttacagcaggccgtggaggtcaaatcagaacatttcaaaacttcggttttcctgtaagagtatagcatgagtccgaatacataagatagtcactgccattcaggagtgcagtttgtgtatagataggagatagtgggtgagtttcacactattcagggattgggtttgactgttccttggtgcacctgctagagatcagaatcttcatctaacatacactgtcagtagtccaaaacttgtgtatgccaaatttattttaccctgaaggcccaagttgtacatgaaagagaaagccctacagagagcaacactatcagctgactggagataattcatctgtcagcttcaaccctacctttcggttttagacttctattccgaaccatgacatgttcttgtaagaaaagaaaaggaaaaagatagacgtggtgaaattgtcattttggctttatgatctcatggtattggtatcctgaatctttt

SEQ ID NO: 204892 - DNA, 1341 bp, Zea Mays
cggagcgccggcaacggctgccacaccaacacacacagactgacaggcgcaagaagaggagaggagaagaacagaggggagtggaaataatctagcagcggaaggggaagcagcacgaagggaagcggcagcggaagcggggttctggctaaagtacgttaaggtcttttttatcagcaattccagtaatgtgccttgcctcttttacgtgactatacaagacaatgaatggaactcatccctgggcctccatgtccggaggtccatgttctaaccttggatatgccagggacatgaatgttacagccaagtactagcatgaatggtgattcattgatgcgtgttcctgcgtcaccaatatcgttttcatccaataacatctctggctcttcagtcattgacggttgcatcatgcagcaaagtccaccccaagagcaggtgcagaaacagaggtcttcaagtgtaacatcacaacctgtgattgatgctggtggtgcattgcatgctcagaagaaatcaaggattgatgtttgtcagggtggtatcacggaacaacagctgattcagcaactgctccatggtcagaattctcttcattaccaggggcaacagaatccacagcttcaagctttaatgcagcatcataaactggcacaacttcagcaacggcagcagcagcatccattttctcagatgcaacaaccccaagttggtattcctcggcagcctcaacttaggccaccactggcacagactggaatgcagttaggtggtcctgttaggtctcctatcgagagtgggatttgttctcgcaggatactgcagtatttatatcacaagcgtcatcgcccagagaataaccctataacatactggaggaagcttgttgaagagtacttcgcacctcgagcaagagaaagatggtgtgtctcttcttatgaaaacagagggaattcttcagctgctgctccacagaaagctttggatacgtggcgatgtggcatttgcaatacacatggtgggaaaggatatgaagttacctatgaagtacttcctaggctctgccaaattagatttgaccatggtgttattgatgaatacttatactttgactcacccaacgaattccggttgcctaatggacaaatggtgctggagcatgcaaaagtagttcaaaaaagtgtttatgaacatctgcatgttatacacgagggacatctgagaataattttcacaccagaactgaagataatgtcttgggagttctgttcacgacgccatgaggagtacaccactcgcaagactatagcaccacaggacactatggtagtttaatcctct

SEQ ID NO: 204893 - DNA, 2635 bp, Zea Mays
cgcaagcgcggcccagcaactgctgcagccgtttccccacagctgctgcttccttctcctacactgccccgctccgctctgagatggatcccgcgccggcgaccccgcgctggaatcttgagcgaccgtaccttactggacgcttccaccaggaggcgaaggcggctgcggcggcgcagggcctcggatccaagccgttctcgcttgactccttcagccgcggcgccggcgccgggagtgtcatcggatcgtacgcagtatcagtgcaggagcttttggttatcgatgatttgctatcagctctggtgggtattgagggacggtatgtttctattaagagagttcgtggaaaggagggctatgttgtctttcagattgattcttctatggaccttgccctccaggaattgactcgccggattttccctttgtgcgaggattatgtgttggtaagccagtttgtggagtccaggtcacatttcaagaatggtttggtcaaccatgctctggctgcagctctaagagcattcttactggcaatggttgctcaactggagcaccagttccgtcttggaaggctttctgttcagggattatggttcttttgtcaaaggatgatgagttcactgaatgcactggcagttctagtggagaaggctacctccaacaatactaatggttcagcgacacttaatctacttcaaagccaggcaaaggcgatgggtggtgatagtgctgttcggtctttactggagaagatgacagaatatgcaagtgcagcatacctcaggatgctagaaaggtgggtgtatgagggagttattgacgatccttatggtgaattcttcattgctgaaaacaaatctctgcagaaggagagcctcactcaagattatgatgccaaatattggcagcaacgttacagcctaaaagaaggaattcctagtttccttacgaatgttgccgcaacgattctaacaacagggaagtatcttaatgttatgagagaatgtgggcacaatgttcaggtttccttgtcagacaattctaagcttatgagctttggctcaaaccaccaatatcttgaatgtataaaatctgcatatgattttgcaagtggtgaattgttgactctgatgaaagataagtatgatctcatcgggaaactccgatccctgaagcgctatctactccttgaccaaggtgactttttggtccattttatggatattgctcgagaggagcttacaaagaaaccagaagaaatatccgctgaaaaacttcagtctctgcttgacattgctttacggagtactgcagctgcttcagatccaagccatgaggaattaatctgctgtgtggaaaggagttccctccttaagaaactggccactctgaaggacttggatcctgcagataagcttgctgcagcagatgttgatcgatcaatgcaattaagcatcacgggtttggaaacattctgccttagcaataaggtccagtggccgttatctcttgtaatttcaaggaaggctttgacaaaataccaattgatctttcgcctattgttccactgcaagcatgttagtcgccagctgtgtgcagcatggcaaatacaacaagcattccggtctgtcaagattctagggacaccaattctgcggtcatcaattctttgtcgtagcatgctcaagtttgtaaatagccttttgcattatctaacatttgaggttcttgaaccaaattggcatctgatgcatgaccgccttcaaacagcaaggagcatagatgaggttatccagatccatgatttcttcctccagaagtgtctaaaagaatgcttgctgttgtcgcctgaactccttgtgaaagtcgagaagctgaaaggtttatgccttcagtatgccacttccatccagatcttgatgccatctatcgatgtcgctaactctgagaacacatcgaagtctaggaagtcaagatcaagaatcgataaatcacaggacagagaccagcagctgaaactagcatcagagaatgttgtcatgtcagagtcgatcctgaaatttgaagcagcgttcaattcagagctgcagagtcttgctcctacgctgagtaacagttcacaagcggagccgtacgtgactcatctcgcacagtgcattcttggcgtgcgaatcggccaatgagttatttgatgggccgtacccatacctgcctgccttcatttggacttttggcacaatgccatactctatgtgcgccgctgcagtcaaggtaggtgcatatccgtttcttgtgaatgctaatgtggagctacgacgcgtttagtgaccctagggtggtgtcgggagccttgttatcttgagctcgaaccttgctgtgtgtttatcagctgcgactcagcatttcgtgctgttgatatctgacaatagcaatgtgtggttgtgttgtgttgtgttgtgagactcagatgtaagctttgtggagttcatttccacgtgtgtgggaaaagtgtttggtttgaatcgaactgggcattggtattccacgagagttggttagcggccagtaatgtaatagtaaatatcatgctattaagctaatttaagttgatgaaatccaaataaagcaa

SEQ ID NO: 204894 - DNA, 3286 bp, Zea Mays
cccaaatggaacggacggttcggctctcatctgatcctagcacgatttaacacggcataatagagggcactattaatctgataaaaggatcgcgccactatatgagtagagagaatccaacgatagaaaaaaagtatcgaaccgcatttatgaatccagttctaggtggtgtcactcatacccatgctgacagtgtacaccgaatatatggcctagacacaaacacggtatggaacatgccagaccagaccagacccgtgccggtccagcatcggtggtgttcgagtgcgatgcgagacccctgccgcactccaaatttggtcacgccgaccgtcgtcctctccgctctacctgttcattctctcttctgttccctcctccctcccagtcccagctggcagcagcacagcagacagagagagtgagctttgccgacaccacactgcatcccattccctcggctgtcgctgatggatgatagatagagctgcggaggagcagggtgagggggaggtgctgccgcccacggtgatcatctctatggccgtgtagaggagcactgcagccggaagagattattcagacacactcacacacacacacacacacacacacacacacacagagagagagagagagagagagagagagagagagagagagagagagagagagagagagagagagagagagagagagagagagagagagagagagaagggaagcatgaagccaagaaccgcgacactggccgccggcctcctccagctcgtcgcgcttgcggcggtggcggaagccgacaccgacgccggcgacgttgccgccctggggaacctctacagctcctggaacagcccggcgcgcctcgccggctggtccgccagcggcggcgacccctgcggcgccgcgtggacgggcgtctcctgctcgggctccgccgtcacctcaatcaagctttctggtatggagctgaacggcactcttggctatcagttgtcaagcctgcaggctctgaaaacgatggacttgagcaacaactacttgcacgattcaattccttaccagctgccatcaaaccttacctatctgaacctggcgaaaaacaacttctctggtaatcttccgtactctatatccaacctggtctcgcttgagtacctcaacctcagccacaactcgttgtttcaggaaatcggagaactgtttggaagcctcagttcactctcagaactagacatatctttcaacaacctcacggggaatcttcctttctcaatgggctccctgtcaaaactttctagcctttatatgcaaaacaatcagctgtcgggcacagttgatgtcatcagcaacataagccttgcgacactagatattgcaagcaacaatttcagcggcatgataccccaagagttcagctcgatcccaaacctaatgtatgcgcaaagttgcaggaaactcatttgtcaatatgcctgcctccccgccacaagctctgacgccacctccgaatccacgtggccggccagacgatcgtcggggaccaaccagcgctccaactgtcccggagactcccattgacccggacgacaagaagatgcaaacgggacctcttgtagggatagctgttggctcaatagctgctgcctcgtgcgttcttttcgcgctggtgttgtgcctccacaacgcacggaaaaaacccgatgatgggagcagtgaagcgaaagcgtctagcagggaagtcatggacagtagccatgacaacgctgctgtggcaacttcagacctccaactgatccagcctgctggaaagatgactccggacgacagagcgcatggtccaaacggttgtaccgccaaaaggccaaagcagcaggttactgtgacgacagtgagttcctacacagttgctgctctccaagtcgctacgaacagcttctgccaagactctctcctaggcgagggctcgcttgggcgtgtttacaaggctgtttttcctaacgggaaggtacttgctgtgaagaagatagacagcgcttcgctgtctctgtacgaagaagacaactttctcgcggttgtgtcgaacgtgtcccggctcaggcatccaaacatcgtgccccttgcaggctactgcgtggagcacgggcagaggctccttgcgtacgagtacgtcgggaacggaacgctgcatgacatgctgcacttctctgacgacgacgggatgacgatgccgggcaagactactaggctcgcatggaacacccgcgcgaggatagcgctaggcaccgcgcgcgctctagagtacctgcatgaggtgtgcctgcccccggtggtgcacagggccttcaagtcatcaaacatcctgctcgacgacgagtacagcccgcgtctgtccgactgtgggctcgctgctctgtcgccgaaccctgagactgagagggaggctttcgctggagtggttggctccttcggatacagcgcccctgagttcgccatgtcagggacgtacactgccaagagtgacgtgtacagtttcggggtagtgatgctggagctgttgaccggccgcaagccgctagacagctccagggagaggtcggaacagtctcttgtgagatgggcgaccccgcagctccacgacatcgatctgctcgccaagatggtcgatcctgcactggatgggctgtaccctgccaagtccctctcccgtttcgccgacataatcgccatctgcgtccagtcggagccggagttccggccgccgatgtccgaagtcgtgcagcagctggtgcgcctgatgcagcgggcgagcatcgtgaggcgacaatcggacgaccagctgggctactcgtacagggttcccgagcgcgacggcggcggcacggtaggcggcgacgtcgtcgtcgcctgagctagctagctagctagaggccgcgacgagaccaaagctggcgtacactcctactcctacacaaagcgctgcacagtttatatatattcataaacaaaagagcgagcaaaagaaaagaaaagcagttggatatggatggatccttcacgttttgttaaaaagtcacccgtaaacgacatatatgtatagggtttgcagcgtactgggacgtttcttcgtgagctgcgagtgtcatgtatagtgtgcgctcttgccagtggtagatatataggataggagaaaaaaaaacgtgtcttcttttgttggtgtgttcagttcttcgaccatacacgccagccgcagacggtgacctctgcagccttgctttgcggcgag

SEQ ID NO: 204895 - DNA, 3041 bp, Zea Mays
gataaaaggatcgcgccactatatgagtagagagaatccaacgatagaaaaaaagtatcgaaccgcatttatgaatccagttctaggtggtgtcactcatacccatgctgacagtgtacaccgaatatatggcctagacacaaacacggtatggaacatgccagaccagaccagacccgtgccggtccagcatcggtggtgttcgagtgcgatgcgagacccctgccgcactccaaatttggtcacgccgaccgtcgtcctctccgctctacctgttcattctctcttctgttccctcctccctcccagtcccagctggcagcagcacagcagacagagagagtgagctttgccgacaccacactgcatcccattccctcggctgtcgctgatggatgatagatagagctgcggaggagcagggtgagggggaggtgctgccgcccacggtgatcatctctatggccgtgtagaggagcactgcagccggaagagattattcagagagagagagagagagagagagagagagagagagagagagagagagaagggaagcatgaagccaagaaccgcgacactggccgccggcctcctccagctcgtcgcgcttgcggcggtggcggaagccgacaccgacgccggcgacgttgccgccctggggaacctctacagctcctggaacagcccggcgcgcctcgccggctggtccgccagcggcggcgacccctgcggcgccgcgtggacgggcgtctcctgctcgggctccgccgtcacctcaatcaagctttctggtatggagctgaacggcactcttggctatcagttgtcaagcctgcaggctctgaaaacgatggacttgagcaacaactacttgcacgattcaattccttaccagctgccatcaaaccttacctatctgaacctggcgaaaaacaacttctctggtaatcttccgtactctatatccaacctggtctcgcttgagtacctcaacctcagccacaactcgttgtttcaggaaatcggagaactgtttggaagcctcagttcactctcagaactagacatatctttcaacaacctcacggggaatcttcctttctcaatgggctccctgtcaaaactttctagcctttatatgcaaaacaatcagctgtcgggcacagttgatgtcatcagcaacataagccttgcgacactagatattgcaagcaacaatttcagcggcatgataccccaagagttcagctcgatcccaaacctaatagttgcaggaaactcatttgtcaatatgcctgcctccccgccacaagctctgacgccacctccgaatccacgtggccggccagacgatcgtcggggaccaaccagcgctccaactgtcccggagactcccattgacccggacgacaagaagatgcaaacgggacctcttgtagggatagctgttggctcaatagctgctgcctcgtgcgttcttttcgcgctggtgttgtgcctccacaacgcacggaaaaaacccgatgatgggagcagtgaagcgaaagcgtctagcagggaagtcatggacagtagccatgacaacgctgctgtggcaacttcagacctccaactgatccagcctgctggaaagatgactccggacgacagagcgcatggtccaaacggttgtaccgccaaaaggccaaagcagcaggttactgtgacgacagtgagttcctacacagttgctgctctccaagtcgctacgaacagcttctgccaagactctctcctaggcgagggctcgcttgggcgtgtttacaaggctgtttttcctaacgggaaggtacttgctgtgaagaagatagacagcgcttcgctgtctctgtacgaagaagacaactttctcgcggttgtgtcgaacgtgtcccggctcaggcatccaaacatcgtgccccttgcaggctactgcgtggagcacgggcagaggctccttgcgtacgagtacgtcgggaacggaacgctgcatgacatgctgcacttctctgacgacgacgggatgacgatgccgggcaagactactaggctcgcatggaacacccgcgcgaggatagcgctaggcaccgcgcgcgctctagagtacctgcatgaggtgtgcctgcccccggtggtgcacagggccttcaagtcatcaaacatcctgctcgacgacgagtacagcccgcgtctgtccgactgtgggctcgctgctctgtcgccgaaccctgagactgagagggaggctttcgctggagtggttggctccttcggatacagcgcccctgagttcgccatgtcagggacgtacactgccaagagtgacgtgtacagtttcggggtagtgatgctggagctgttgaccggccgcaagccgctagacagggagaggtcggaacagtctcttgtgagatgggcgaccccgcagctccacgacatcgatctgctcgccaagatggtcgatcctgcactggatgggctgtaccctgccaagtccctctcccgtttcgccgacataatcgccatctgcgtccagtcggagccggagttccggccgccgatgtccgaagtcgtgcagcagctggtgcgcctgatgcagcgggcgagcatcgtgaggcgacaatcggacgaccagctgggctactcgtacagggttcccgagcgcgacggcggcgaccaaagctggcgtacactcctactcctacacaaagcgctgcacagtttatatatattcataaacaaaagagcgagcaaaagaaaagaaaagcagttggatatggatggatccttcacgttttgttaaaaagtcacccgtaaacgacatatatgtatagggtttgcagcgtactgggacgtttcttcgtgagctgcgagtgtcatgtatagtgtgcgctcttgccagtggtagatatataggataggagaaaaaaaaacgtgtcttcttttgttggtgtgttcagttcttcgaccatacacgccagccgcagacggtgacctctgcagccttgctttgcggcgag

SEQ ID NO: 204896 - DNA, 2634 bp, Zea Mays
atgactataaggacgtcggtgccggtgcttgctctctatctttttcgcccacccacttcggtcactttggatttatctgaacctttttctcgtgctgcttgcttgcttgcttgctgaaaagtttgttagtggtgcctagcatttacaagtactcaaactcaagtacatccatccactgctgctgccgccacgcttttccaccaaaaaaaattgggccgccaatgctgttatgggccaaacggctatttataataacgatcacaacactgtacagctggtcctggagataatatatgatactcacaacgcactgctttttcatgcgtgctatgatgagagcgatggccacgcattgtgttcttcagctccgcaagctttctggtatggagctgaacggcactcttggctatcagttgtcaagcctgcaggctctgaaaacgatggacttgagcaacaactacttgcacgattcaattccttaccagctgccatcaaaccttacctatctgaacctggcgaaaaacaacttctctggtaatcttccgtactctatatccaacctggtctcgcttgagtacctcaacctcagccacaactcgttgtttcaggaaatcggagaactgtttggaagcctcagttcactctcagaactagacatatctttcaacaacctcacggggaatcttcctttctcaatgggctccctgtcaaaactttctagcctttatatgcaaaacaatcagctgtcgggcacagttgatgtcatcagcaacataagccttgcgacactagatattgcaagcaacaatttcagcggcatgataccccaagagttcagctcgatcccaaacctaatagttgcaggaaactcatttgtcaatatgcctgcctccccgccacaagctctgacgccacctccgaatccacgtggccggccagacgatcgtcggggaccaaccagcgctccaactgtcccggagactcccattgacccggacgacaagaagatgcaaacgggacctcttgtagggatagctgttggctcaatagctgctgcctcgtgcgttcttttcgcgctggtgttgtgcctccacaacgcacggaaaaaacccgatgatgggagcagtgaagcgaaagcgtctagcagggaagtcatggacagtagccatgacaacgctgctgtggcaacttcagacctccaactgatccagcctgctggaaagatgactccggacgacagagcgcatggtccaaacggttgtaccgccaaaaggccaaagcagcaggttactgtgacgacagtgagttcctacacagttgctgctctccaagtcgctacgaacagcttctgccaagactctctcctaggcgagggctcgcttgggcgtgtttacaaggctgtttttcctaacgggaaggtacttgctgtgaagaagatagacagcgcttcgctgtctctgtacgaagaagacaactttctcgcggttgtgtcgaacgtgtcccggctcaggcatccaaacatcgtgccccttgcaggctactgcgtggagcacgggcagaggctccttgcgtacgagtacgtcgggaacggaacgctgcatgacatgctgcacttctctgacgacgacgggatgacgatgccgggcaagactactaggctcgcatggaacacccgcgcgaggatagcgctaggcaccgcgcgcgctctagagtacctgcatgaggtgtgcctgcccccggtggtgcacagggccttcaagtcatcaaacatcctgctcgacgacgagtacagcccgcgtctgtccgactgtgggctcgctgctctgtcgccgaaccctgagactgagagggaggctttcgctggagtggttggctccttcggatacagcgcccctgagttcgccatgtcagggacgtacactgccaagagtgacgtgtacagtttcggggtagtgatgctggagctgttgaccggccgcaagccgctagacagctccagggagaggtcggaacagtctcttgtgagatgggcgaccccgcagctccacgacatcgatctgctcgccaagatggtcgatcctgcactggatgggctgtaccctgccaagtccctctcccgtttcgccgacataatcgccatctgcgtccagtcggagccggagttccggccgccgatgtccgaagtcgtgcagcagctggtgcgcctgatgcagcgggcgagcatcgtgaggcgacaatcggacgaccagctgggctactcgtacagggttcccgagcgcgacggcggcgaccaaagctggcgtacactcctactcctacacaaagcgctgcacagtttatatatattcataaacaaaagagcgagcaaaagaaaagaaaagcagttggatatggatggatccttcacgttttgttaaaaagtcacccgtaaacgacatatatgtatagggtttgcagcgtactgggacgtttcttcgtgagctgcgagtgtcatgtatagtgtgcgctcttgccagtggtagatatataggataggagaaaaaaaaacgtgtcttcttttgttggtgtgttcagttcttcgaccatacacgccagccgcagacggtgacctctgcagccttgctttgcggcgag

SEQ ID NO: 204897 - DNA, 2292 bp, Zea Mays
cacgcattgtgttcttcagctccgcaagctttctggtatggagctgaacggcactcttggctatcagttgtcaagcctgcaggctctgaaaacgatggacttgagcaacaactacttgcacgattcaattccttaccagctgccatcaaaccttacctatctgaacctggcgaaaaacaacttctctggtaatcttccgtactctatatccaacctggtctcgcttgagtacctcaacctcagccacaactcgttgtttcaggaaatcggagaactgtttggaagcctcagttcactctcagaactagacatatctttcaacaacctcacggggaatcttcctttctcaatgggctccctgtcaaaactttctagcctttatatgcaaaacaatcagctgtcgggcacagttgatgtcatcagcaacataagccttgcgacactagatattgcaagcaacaatttcagcggcatgataccccaagagttcagctcgatcccaaacctaatagttgcaggaaactcatttgtcaatatgcctgcctccccgccacaagctctgacgccacctccgaatccacgtggccggccagacgatcgtcggggaccaaccagcgctccaactgtcccggagactcccattgacccggacgacaagaagatgcaaacgggacctcttgtagggatagctgttggctcaatagctgctgcctcgtgcgttcttttcgcgctggtgttgtgcctccacaacgcacggaaaaaacccgatgatgggagcagtgaagcgaaagcgtctagcagggaagtcatggacagtagccatgacaacgctgctgtggcaacttcagacctccaactgatccagcctgctggaaagatgactccggacgacagagcgcatggtccaaacggttgtaccgccaaaaggccaaagcagcaggttactgtgacgacagtgagttcctacacagttgctgctctccaagtcgctacgaacagcttctgccaagactctctcctaggcgagggctcgcttgggcgtgtttacaaggctgtttttcctaacgggaaggtacttgctgtgaagaagatagacagcgcttcgctgtctctgtacgaagaagacaactttctcgcggttgtgtcgaacgtgtcccggctcaggcatccaaacatcgtgccccttgcaggctactgcgtggagcacgggcagaggctccttgcgtacgagtacgtcgggaacggaacgctgcatgacatgctgcacttctctgacgacgacgggatgacgatgccgggcaagactactaggctcgcatggaacacccgcgcgaggatagcgctaggcaccgcgcgcgctctagagtacgtacctgcatgaggtgtgcctgcccccggtggtgcacagggccttcaagtcatcaaacatcctgctcgacgacgagtacagcccgcgtctgtccgactgtgggctcgctgctctgtcgccgaaccctgagactgagagggaggctttcgctggagtggttggctccttcggatacagcgcccctgagttcgccatgtcagggacgtacactgccaagagtgacgtgtacagtttcggggtagtgatgctggagctgttgaccggccgcaagccgctagacagctccagggagaggtcggaacagtctcttgtgagatgggcgaccccgcagctccacgacatcgatctgctcgccaagatggtcgatcctgcactggatgggctgtaccctgccaagtccctctcccgtttcgccgacataatcgccatctgcgtccagtcggagccggagttccggccgccgatgtccgaagtcgtgcagcagctggtgcgcctgatgcagcgggcgagcatcgtgaggcgacaatcggacgaccagctgggctactcgtacagggttcccgagcgcgacggcggcgaccaaagctggcgtacactcctactcctacacaaagcgctgcacagtttatatatattcataaacaaaagagcgagcaaaagaaaagaaaagcagttggatatggatggatccttcacgttttgttaaaaagtcacccgtaaacgacatatatgtatagggtttgcagcgtactgggacgtttcttcgtgagctgcgagtgtcatgtatagtgtgcgctcttgccagtggtagatatataggataggagaaaaaaaaacgtgtcttcttttgttggtgtgttcagttcttcgaccatacacgccagccgcagacggtgacctctgcagccttgctttgcggcgag

SEQ ID NO: 204898 - DNA, 988 bp, Zea Mays
cagcgcactcccactcccaccggttccgccctggtctacgttctgtcgttctgtggctgagctccaaagtccaaagattagtgaatccaaaaggcgaccaaacagatcccccgctcctgtgctccgctcatgttagagaaccccctgggaaaacgcagcggagaaactctggagatcgaaaccccggcacgcagctaggcgaactgcacgcaactgcaggtcgacgtctgatccatttcttgtcgcttcagcttctggtgctggtcttcttccagttgcatcctggttacctgtgtcaaggggcggttggtgtctggtgtagttggagggcagagcttcgcgggcggcgaagaagaagagcagcagagagactctgctgacactgaccgagggagatatggcgaggaagctgagagagttgctgcagaagagcggcaaccgcgtatgtgccgactgcggcgcacctgatcccaaatgggcatcggctaacattggagtattcatttgcctaaagtgttctggtgttcacagaagcctcgggacacatgtttcaaaggtgctgtcagtcacactagatcaatggacggatgatgagatcaactccatgatagaagttggtggaaactcttatgccaatgctatatatgaagcatttctgccagagggctatcagaagccgcatccagattctagccaagaagagagagctgatttcatcaggtcgaagtatgagttgcaagaattcctgaagccaagcctaaggttagtttccagcaataagggctctttagaggcgaccagctctcgaaagcatatggataattctgtgtctctttctgctagtttcagcagtgaggctggaatggttgagttcattggaatactaaaagttaaagtgataagagggactaaactagctgtaagagacctgatgagtagtgacccctatgttgtactgaccctaggacagcagcattgttctctgcag

SEQ ID NO: 204899 - DNA, 1495 bp, Zea Mays
gtttgctctacatgctgggattatcggcaatttacaagtacattgagttttacgatgttatgtctgttccaatggcaattgctttgtctggtcaaccgctgcttggacaagcagtgatggttaagccatctgaggctgaaaagaacttagttcagtcaaatgcgacatcaggtggtgcggcttcaggtggagcaagaaagttgtatgttggcaatcttcactcaaatattactgaagaccaattaagacaggtatttgaaccatttgggcaagtggagcttgtacagcttcctctagatgcaatgactggactgtgcaaaggttatggctttattcagtttgcccggcttgaagatgcaaaagctgcacagagtttgaatgggcagcttgatattgccggcagagttattaaggtttcagctgttactgatcatgtgggagtgcaagctagtggaggctccagagctgctctaatgctcaaattggacaggagtggtacagcaaccagcttaactggtggtattggtgctgctggagtggctgtaccagctacttcagttattggggcagcaggagctgcttctcttctgtcaccaacagtttctgctgttggatcagttcctggggcacctgtgcttcctattaccgctcagaatgtgatcatgtccacacctacagaattcttgttgcttaaaaacatgtttgacccatcattggagacggatcctgattttgacttggatattagagatgatgtccaagatgaatgttccaagtttggtgcagtgaagcatatttttgttgacaaaaatactgcaggcttcgtgtatctgcagttcgatagtgtaactgcagcagggaaggcccaacaagcacttcatggaagatggttcgccggaaagatgattacagcgacatttatgtccgatcaggaatacagtactaagttcccaaacttgtgagcatatgcggggaagagttggtcagacccgcatagttcgttcggagagtttgctagtgctgtatcgttggatggtagactagacgaacaccttattgattgtatgacaggatagtttcagttgcagcgctggtcgtgcgtacaatgtttgatgtactttatttacggcatcacacacagtgaccatcccttattttgtccaccgaatgaaatgccctatgatctccaggcacgttggcatatggtttatttatgtacgatctgttggcactggtacgtatttgtatactaagcaaaagcgttacataatcacaatggtacctttattagtcccctgtcgtgggatatgcggccgcattttggccagctttccaatgtgttccattttatttttgttctcatgatgtttcgacatgttttcatcagtttttcctttcaccaaggtcactatttcattccgtttcattttcatttactccactgatactgtatctagttattttatttggtttatcaagaaattataacacccca

SEQ ID NO: 204900 - DNA, 2389 bp, Zea Mays
atagtagggtttggactatacaattctcgtgtctcgccctcccccgacgcgccgtctagggtttcacagccgcaccccgatccactagagctatggagttcgacgaatacgagtacctggagaaggcggtggagccggctcccccgccggccaatggttccggctccggcgagaaggaccgcggctcgcgtcgccgcgagggcgacgagggccgcatatcgaagcgctcccgctcgggggaggaccgcgagcggggccggcaccgcagcgttcgggaacaccgggatcgggataaggatgacgggaaggagaaggagaggagccgcgatagccgcgggaaggacagagacagggaagggagagaacgggagaaggagaggggggacaggcaccggcccagagagagggaggtggaacgggagcggaggagcctgagccgttcggagcggcgccgtatcgaggaagaggagatggtgagggagctggagatggagcgcgagcgcagcgagcgacaccactatcgcgaccgtgacgtcaggcgtaggaaagatgacggggcagagccagaagttgatccagaaagggaccagaggactgtatttgctttccagctatctctgaaggcagacgaaagagatgtttatgagttcttctcaagggctgggaaggttcgtgatgttcgtcttatcatggaccgaaactcaagacgttctaaaggagttgggattacacactgaaattttatagtttgctctacatgctgggattatcggcaatttacaagttctaggcaataaagggggcacccaagaaccaagttcgaaacctctacaatttttgatcaaaatgcctgaagttttctgtgaaaaattgaaatgtacattgagttttacgatgttatgtctgttccaatggcaattgctttgtctggtcaaccgctgcttggacaagcagtgatggttaagccatctgaggctgaaaagaacttagttcagtcaaatgcgacatcaggtggtgcggcttcaggtggagcaagaaagttgtatgttggcaatcttcactcaaatattactgaagaccaattaagacaggtatttgaaccatttgggcaagtggagcttgtacagcttcctctagatgcaatgactggactgtgcaaaggttatggctttattcagtttgcccggcttgaagatgcaaaagctgcacagagtttgaatgggcagcttgatattgccggcagagttattaaggtttcagctgttactgatcatgtgggagtgcaagctagtggagctactactggagatctagatgatgatgaaggtggaggcttggcgctaaatgcaagctccagagctgctctaatgctcaaattggacaggagtggtacagcaaccagcttaactggtggtattggtgctgctggagtggctgtaccagctacttcagttattggggcagcaggagctgcttctcttctgtcaccaacagtttctgctgttggatcagttcctggggcacctgtgcttcctattaccgctcagaatgtgatcatgtccacacctacagaattcttgttgcttaaaaacatgtttgacccatcattggagacggatcctgattttgacttggatattagagatgatgtccaagatgaatgttccaagtttggtgcagtgaagcatatttttgttgacaaaaatactgcaggcttcgtgtatctgcagttcgatagtgtaactgcagcagggaaggcccaacaagcacttcatggaagatggttcgccggaaagatgattacagcgacatttatgtccgatcaggaatacagtactaagttcccaaacttgtgagcatatgcggggaagagttggtcagacccgcatagttcgttcggagagtttgctagtgctgtatcgttggatggtagactagacgaacaccttattgattgtatgacaggatagtttcagttgcagcgctggtcgtgcgtacaatgtttgatgtactttatttacggcatcacacacagtgaccatcccttattttgtccaccgaatgaaatgccctatgatctccaggcacgttggcatatggtttatttatgtacgatctgttggcactggtacgtatttgtatactaagcaaaagcgttacataatcacaatggtacctttattagtcccctgtcgtgggatatgcggccgcattttggccagctttccaatgtgttccattttatttttgttctcatgatgtttcgacatgttttcatcagtttttcctttcaccaaggtcactatttcattccgtttcattttcatttactccactgatactgtatctagttattttatttggtttatcaagaaattataacacccca

SEQ ID NO: 204901 - DNA, 2195 bp, Zea Mays
atagtagggtttggactatacaattctcgtgtctcgccctcccccgacgcgccgtctagggtttcacagccgcaccccgatccactagagctatggagttcgacgaatacgagtacctggagaaggcggtggagccggctcccccgccggccaatggttccggctccggcgagaaggaccgcggctcgcgtcgccgcgagggcgacgagggccgcatatcgaagcgctcccgctcgggggaggaccgcgagcggggccggcaccgcagcgttcgggaacaccgggatcgggataaggatgacgggaaggagaaggagaggagccgcgatagccgcgggaaggacagagacagggaagggagagaacgggagaaggagaggggggacaggcaccggcccagagagagggaggtggaacgggagcggaggagcctgagccgttcggagcggcgccgtatcgaggaagaggagatggtgagggagctggagatggagcgcgagcgcagcgagcgacaccactatcgcgaccgtgacgtcaggcgtaggaaagatgacggggcagagccagaagttgatccagaaagggaccagaggactgtatttgctttccagctatctctgaaggcagacgaaagagatgtttatgagttcttctcaagggctgggaaggttcgtgatgttcgtcttatcatggaccgaaactcaagacgttctaaaggagttgggattacacactgaaattttatagtttgctctacatgctgggattatcggcaatttacaagttctaggcaataaagggggcacccaagaaccaagtggtgcggcttcaggtggagcaagaaagttgtatgttggcaatcttcactcaaatattactgaagaccaattaagacaggtatttgaaccatttgggcaagtggagcttgtacagcttcctctagatgcaatgactggactgtgcaaaggttatggctttattcagtttgcccggcttgaagatgcaaaagctgcacagagtttgaatgggcagcttgatattgccggcagagttattaaggtttcagctgttactgatcatgtgggagtgcaagctagtggagctactactggagatctagatgatgatgaaggtggaggcttggcgctaaatgcaagctccagagctgctctaatgctcaaattggacaggagtggtacagcaaccagcttaactggtggtattggtgctgctggagtggctgtaccagctacttcagttattggggcagcaggagctgcttctcttctgtcaccaacagtttctgctgttggatcagttcctggggcacctgtgcttcctattaccgctcagaatgtgatcatgtccacacctacagaattcttgttgcttaaaaacatgtttgacccatcattggagacggatcctgattttgacttggatattagagatgatgtccaagatgaatgttccaagtttggtgcagtgaagcatatttttgttgacaaaaatactgcaggcttcgtgtatctgcagttcgatagtgtaactgcagcagggaaggcccaacaagcacttcatggaagatggttcgccggaaagatgattacagcgacatttatgtccgatcaggaatacagtactaagttcccaaacttgtgagcatatgcggggaagagttggtcagacccgcatagttcgttcggagagtttgctagtgctgtatcgttggatggtagactagacgaacaccttattgattgtatgacaggatagtttcagttgcagcgctggtcgtgcgtacaatgtttgatgtactttatttacggcatcacacacagtgaccatcccttattttgtccaccgaatgaaatgccctatgatctccaggcacgttggcatatggtttatttatgtacgatctgttggcactggtacgtatttgtatactaagcaaaagcgttacataatcacaatggtacctttattagtcccctgtcgtgggatatgcggccgcattttggccagctttccaatgtgttccattttatttttgttctcatgatgtttcgacatgttttcatcagtttttcctttcaccaaggtcactatttcattccgtttcattttcatttactccactgatactgtatctagttattttatttggtttatcaagaaattataacacccca

SEQ ID NO: 204902 - DNA, 2780 bp, Zea Mays
gtgccaccaagatcgaattaggttatggtcggcgtatagaacactgttttgcactatagagatggaattaggctatggctaattagctagtagtgctatgcatgagggtagagtttgaaatagtaagagatactggagataacctttgtacaactacaaatacttagtttttaaaaaaaaacaaaaaaaacagcgaacaaaaacctagatcaactgtcaaaaaagaaaaaccaagctcggtatcgcccaatacagaaggcggcgacgccacaaattttctagtatagtagggtttggactatacaattctcgtgtctcgccctcccccgacgcgccgtctagggtttcacagccgcaccccgatccactagagctatggagttcgacgaatacgagtacctggagaaggcggtggagccggctcccccgccggccaatggttccggctccggcgagaaggaccgcggctcgcgtcgccgcgagggcgacgagggccgcatatcgaagcgctcccgctcgggggaggaccgcgagcggggccggcaccgcagcgttcgggaacaccgggatcgggataaggatgacgggaaggagaaggagaggagccgcgatagccgcgggaaggacagagacagggaagggagagaacgggagaaggagaggggggacaggcaccggcccagagagagggaggtggaacgggagcggaggagcctgagccgttcggagcggcgccgtatcgaggaagaggagatggtgagggagctggagatggagcgcgagcgcagcgagcgacaccactatcgcgaccgtgacgtcaggcgtaggaaagatgacggggcagagccagaagttgatccagaaagggaccagaggactgtatttgctttccagctatctctgaaggcagacgaaagagatgtttatgagttcttctcaagggctgggaaggttcgtgatgttcgtcttatcatggaccgaaactcaagacgttctaaaggagttgggattacacactgaaattttatagtttgctctacatgctgggattatcggcaatttacaagttctaggcaataaagggggcacccaagaaccaagttcgaaacctctacaatttttgatcaaaatgcctgaagttttctgtgaaaaattgaaatgtcttaacatatgatgccccacttattgttcttcttttcttttttacaggaagacatcttttcttggacgcttcgatgtttgtactaaacatatatctaaatttgcaggtacattgagttttacgatgttatgtctgttccaatggcaattgctttgtctggtcaaccgctgcttggacaagcagtgatggttaagccatctgaggctgaaaagaacttagttcagtcaaatgcgacatcaggtggtgcggcttcaggtggagcaagaaagttgtatgttggcaatcttcactcaaatattactgaagaccaattaagacaggtatttgaaccatttgggcaagtggagcttgtacagcttcctctagatgcaatgactggactgtgcaaaggttatggctttattcagtttgcccggcttgaagatgcaaaagctgcacagagtttgaatgggcagcttgatattgccggcagagttattaaggtttcagctgttactgatcatgtgggagtgcaagctagtggagctactactggagatctagatgatgatgaaggtggaggcttggcgctaaatgcaagctccagagctgctctaatgctcaaattggacaggagtggtacagcaaccagcttaactggtggtattggtgctgctggagtggctgtaccagctacttcagttattggggcagcaggagctgcttctcttctgtcaccaacagtttctgctgttggatcagttcctggggcacctgtgcttcctattaccgctcagaatgtgatcatgtccacacctacagaattcttgttgcttaaaaacatgtttgacccatcattggagacggatcctgattttgacttggatattagagatgatgtccaagatgaatgttccaagtttggtgcagtgaagcatatttttgttgacaaaaatactgcaggcttcgtgtatctgcagttcgatagtgtaactgcagcagggaaggcccaacaagcacttcatggaagatggttcgccggaaagatgattacagcgacatttatgtccgatcaggaatacagtactaagttcccaaacttgtgagcatatgcggggaagagttggtcagacccgcatagttcgttcggagagtttgctagtgctgtatcgttggatggtagactagacgaacaccttattgattgtatgacaggatagtttcagttgcagcgctggtcgtgcgtacaatgtttgatgtactttatttacggcatcacacacagtgaccatcccttattttgtccaccgaatgaaatgccctatgatctccaggcacgttggcatatggtttatttatgtacgatctgttggcactggtacgtatttgtatactaagcaaaagcgttacataatcacaatggtacctttattagtcccctgtcgtgggatatgcggccgcattttggccagctttccaatgtgttccattttatttttgttctcatgatgtttcgacatgttttcatcagtttttcctttcaccaaggtcactatttcattccgtttcattttcatttactccactgatactgtatctagttattttatttggtttatcaagaaattataacacccca

SEQ ID NO: 204903 - DNA, 1626 bp, Zea Mays
gcccaatacagaaggcggcgacgccacaaattttctagtatagtagggtttggactatacaattctcgtgtctcgccctcccccgacgcgccgtctagggtttcacagccgcaccccgatccactagagctatggagttcgacgaatacgagtacctggagaaggcggtggagccggctcccccgccggccaatggttccggctccggcgagaaggaccgcggctcgcgtcgccgcgagggcgacgagggccgcatatcgaagcgctcccgctcgggggaggaccgcgagcggggccggcaccgcagcgttcgggaacaccgggatcgggataaggatgacgggaaggagaaggagaggagccgcgatagccgcgggaaggacagagacagggaagggagagaacgggagaaggagaggggggacaggcaccggcccagagagagggaggtggaacgggagcggaggagcctgagccgttcggagcggcgccgtatcgaggaagaggagatggtgagggagctggagatggagcgcgagcgcagcgagcgacaccactatcgcgaccgtgacgtcaggcgtaggaaagatgacggggcagagccagaagttgatccagaaagggaccagaggactgtatttgctttccagctatctctgaaggcagacgaaagagatgtttatgagttcttctcaagggctgggaaggttcgtgatgttcgtcttatcatggaccgaaactcaagacgttctaaaggagttgggtacattgagttttacgatgttatgtctgttccaatggcaattgctttgtctggtcaaccgctgcttggacaagcagtgatggttaagccatctgaggctgaaaagaacttagttcagtcaaatgcgacatcaggtggtgcggcttcaggtggagcaagaaagttgtatgttggcaatcttcactcaaatattactgaagaccaattaagacaggtatttgaaccatttgggcaagtggagcttgtacagcttcctctagatgcaatgactggactgtgcaaaggttatggctttattcagtttgcccggcttgaagatgcaaaagctgcacagagtttgaatgggcagcttgatattgccggcagagttattaaggtttcagctgttactgatcatgtgggagtgcaagctagtggagctactactggagatctagatgatgatgaaggtggaggcttggcgctaaatgcaagctccagagctgctctaatgctcaaattggacaggagtggtacagcaaccagcttaactggtggtattggtgctgctggagtggctgtaccagctacttcagttattggggcagcaggagctgcttctcttctgtcaccaacagtttctgctgttggatcagttcctggggcacctgtgcttcctattaccgctcagaatgtgatcatgtccacacctacagaattcttgttgcttaaaaacatgtttgacccatcattggagacggatcctgattttgacttggatattagagatgatgtccaagatgaatgttccaagtttggtgcagtgaagcatatttttgttgacaaatattgctatattttcccaaaactgagccaatgttaga

SEQ ID NO: 204904 - DNA, 2669 bp, Zea Mays
atgaccgactagcccatggtctctctccgctccgacgcgcccgacccaccaccacatccctcatggctgccctcgccgacatcgactcctcggcacttccgccgtccgagtcatccaaaggcaagggcaagatggacgaggaggaggaggacgaggcggagggcgcggagaagatgtgcggcatctgctatctcgacggccggcgggccatccgcggcgagctcgactgctgcgcccatttcttttgctttgtctgcatcatggcttggggccgcgtcgagtcccgctgtcccttctgcagggcccgcttccacaccatccgccgcccgcccgtcgccggccggttccccgacgagcgaatcgtctcgatccaagagcgcaaccaggtacaccatcctcagggcaacgggagcagcatagtgggcggagatccttacgtgaacaccatatgcaccgtttgcagcagctccagcgatgacgagctgctgctactctgcgagctctgcgactcagctgcacacacttactgtgtcgggctggggaccaccgtgccagagggggactggttctgcaaagactgcgggacgatcagagatgatcaattgagatggcaggctgagaatcagggtgaatttgagatcagcatggatgttcctggagctgagccagttccagccccctcgatttctggtgttgtggatgaggaccatgatctggaaaggccatatgcgcggagtggtggcggttcgacggatgacccggttccttccatttatgaaattgtgggtgatgattttgctaccagtgcagggatctttaggaggaggattgctgaggatattggatcccagggtacttcagctggatctcagtgtcccagatcgacccagggacgagacaatggtcttgcagcctatcatgctcacattcgtcttgaggttgagagagctagaacattacgcaattcccgcaatcttgataagcgcataagagagctgcgagagaactgggctgctctgcgtgctggttctgtggggtttgctccgcatatgcctgtcagaagaaggaaggatatggctggttctgcttctgttgctactgagcatcaacgttatgcagagcctgtaactctcagttcccgaaatggcgccgctgcagcttctgttccgctgccaatgcccttctctgaggaaactaatacctcactgggccatagtaaaaaagtcttgcaaaaggacacccgtgatgcccgtaaggcatggaaaaggttggagatggctaaatcatctggtgggaggaagacatctaagacacctgcctccattaactgctgtcccccattttccatgggtaacagatcgacttcttacagtccaattgatacaattgtgggacacaagaacgggaatctgcgtagtaagtcttgtcaacaaaattattcaatctgtggtcatgttacaaaagtggaacatacgctgcccacgaataactccagaggatgccatagcttgcctgagaacagtcgtgccttggatcatgagaggatggtttcttcccagaatcgaataaatcaggaaagctttagtggcaaagttgcatcatcgacccacattcaacatgttgaccaagcattagtatctacctttaatacacacagaccagaaaaactcgtatcagacatgctgcatccactaaagtatggttcatcatctggccagtcagctgtgacttcatccctacaattaggatctagtgttggatctgggagccaatccactatgccggtaaaccctgaggaaccttcagctgtttgtgctgaagatattgcagcaaccattgaagttacgaaaagttctagtctggaccagcatgagcgcaagagaaaacacagttcggaaagatgcagtgatcaaagatccaaaagatccaggtcaacctgtaaaattgcaaaaagttctgacagattcaaggaagttgctcggacagcaacacattccatcttggctgcctgcagatttgagcattcgccatcgcaatcccttgcactctcaagacctgtctgcaagcacagccccaaagtcaaacagctgaactcgtcagcaattactgatttttgcagagaatgcttgcataactttgttaaagaagctgtcagtttggcattgtctggcgggcagatggatcaaactggtaccccctgttagattgtagacaaatttgggattctttcttgtcttatcattgtgaatatctcaaagcacaaactagggacaagttgtacaatttatggcatgttaatgcctgtcctgtagtgtagttgccaggtctaatcagtactgtaacaactaacaaaatattctctttaatatgccacgaccatggctgaagtattggagcctaacattggccggctactgaggtgtggttggtgtacctggagcacctaatccgtctcacatcatcgtacggttgggttgtaaatgttggctattagttggtggattcaagtctcccgaaggagagctcgatgaaacttgcataattgctgatctcaactgttctgaactattggtgctgtattttgatagtttaactgaagcctttcactgataaggaaagcagacagctattatggagatatattgtagcctctccgaatccaagcattc

SEQ ID NO: 204905 - DNA, 834 bp, Zea Mays
tttaaccaataagaacaatatatgaataactatcaagaatatgtgaagctgaaagcacgagttgaggttttacaacactcgcaaaggaatcttcttggtgaagaactggctccacttagcccaagtgaacttgaccagcttgagagtcaagtagacaagaccttgaagcaaataagatcaagaaagactcaggtgttacttgatgaactttgcgacttaaagagaaaggaacaaatgctgcaagacgctaacagggttctgaaaaggaagctgcacgagtttgaggcagaggctgcttctcccccacaattggcgtggcaaggcggaggcggcatgttgtcccatgaccctccacagccagaacacttcttcgtggctctggagagcaacgcgcctctgcaacctacataccatactatggacatgaaccagcagccagagccagcgccgggcggctgctaccctcctgcgtggatggcttagccagcgctttggttccattgccttgacaagtgccgtgtccttcagagatcgctacgagtcctgctgctgcttttgcgaaccccccctttgctgcctgccatgcttaccgaactgttcaaataagaaataaccacatggtcctatataggttgctgttgtctttatcttctgttgatcacgtcctgctcagatgctttaaacgctatgcaaaatggcttagcgatgcatgctggaatgggctgaactgcttgtgttttgggagtataaatcgcttgggcgcttggcaataagtattattggcatgcctccctctgtttttataaatacaagtacagcagactattactagct

SEQ ID NO: 204906 - DNA, 891 bp, Zea Mays
catgtccttcacaggcacgctgtccttcctggggttccggccccgggacgtcgagacaagagagacggcaatcgcaggcagccgtgtcgacttccccggcaagcactgcggctcctgcgcgggcctcgggcaccaggagtctagcctccgctgcgccctcgaggaggcgatcttcctcgacaggtaatttgatgcgctgattgaggtcgctaagcggcccttggcgtctagaaatgagtgcgcggtggttaaagacggccgtgtcgattggattccaaattgcatcgaacttctagtaggcagctagaagacaggaagcatctaaacagatcggatgaaaataggggcgctgttgcatttcaagttctcaatttcaccaatccattcaatgtggaatgatgctaatgtgcaatggccccattgtgcaaggtgcttgtcatgccctgcaaagatgtgcctcagttcagtgcacaataccaaaggggtccttcaatcaagcaatgcaacttcacaacaaagttgagaaacaggtccttgtgcaatggaatctttatatgacatagacctcatatcaagaaatatgtacctgttattttggataatccacgatcttggtaccagataatatcaagaagtacaaaactcggtgaggatggcttggtggtgcatgtgcaaggggttagcagagctgaactcaaacaaaatgcaaattaccctggtgctttcctcataaaccgcacagcaagtcctcttgcttgatgaaagagataattggtgactatgatgctattcatgtcagaagaggtgacaaactgaagaacaggaaagatagattatatttgagcatttggtgttgagcgaagtcttcatcctcatgttgacagagatact

SEQ ID NO: 204907 - DNA, 1802 bp, Zea Mays
cttctctccccactcccggccagtccgaacccagcaacggtccaggtttccaaggtccaacgttccgacccacgggaagcttctagaaaccattagacgcaccggtcgcgttcctcctcatggcccccacttgtcatccgtccatcctcacgtctctgccccaccattttaccggtagccaacaaaactaggttccgtggcgtcgggtgggaccagcaagcagccgccgcagccggcccccaggcgcctctatatacggcactccgactccgatacattggcgacatcacagatcacacacactcgagaactccatttcgatctcatttgaaatcaacccatcctcgtttcctccgtctagcagcctctcaccctcatggccaagatcaagatcgggatcaatgggtttggcaggatcggaaggctggtggccagggtggccctgcagagcgacgacgtcgagctcgtcgccgtgaacgaccccttcatcagcaccgattacatgtatgacactgtgcacggacagtggaagcaccatgaggtcaaggtgaaggactccaagacccttctctttggtgagaaggaggttgctgtgtttggctgcaggaaccctgaggagatcccatggggttcggttggcgctgaatatgttgttgagtctactggtgttttcactgaccaggagaaggctgcagctcacttgaagggtggtgccaagaaggttgtcatttctgctcctagcaaggatgcccccatgttcgttgttggtgtcaacgagaaggagtacaagtctgacatcaacattgtctctaatgctagctgcacaaccaactgccttgctccgcttgctaaggtcatcaatgacaagttcggtattgttgagggtctgatgaccactgttcatgccatcactgctacccagaagactgttgatgggccctcatctaaggactggaggggtggaagggctgctagtttcaacatcattcccagcagcactggagctgctaaggctgttggcaaagtgcttcctgtcctcaatggaaaattgactggaatgtctttccgtgtcccaactgtcgatgtttctgttgttgatctgactgttaggcttgagaagtctgccacctatgatgagatcaaggctgcggtcaaggccgaggcagagggtagcctcaagggcattctgggttatgtcgaggaggaccttgtttccaccgatttccagggtgacagcaggtctagcatctttgatgcgaaggctggcattgccttgaacggcaactttgtgaagcttgtgtcctggtacgacaacgagtggggatacagcacccgagtggtcgacctgatccgccacatgaacagcaccaagtaaatgaacaaactgatgaaagcatgcaaagagtgatgaaagcatgcaaagagagttgtgtttcttccccggaagtgcttccgagaataaatttttcttatctgattgtctaaaacctataattggtgtaatggtatcgtagtggttggttgagcattgagtgactcatattttgtcaggtctatgtgttatcgttaaacttttaacggtcattctatttcaaaagttttgcattttgcaatctttgacgctccatttcacttcatagttccacgtcatttcttccttcatttggctatttggttgtcggcttctttatagttccacgtcttttcttccttcacttattaaccgttagctgctgctgtggttgagatgagattaccatcgagaagagtacagtgactggatcactggaagtgcaactcag

SEQ ID NO: 204908 - DNA, 1776 bp, Zea Mays
gcaacggtccaggtttccaaggtccaacgttccgacccacgggaagcttctagaaaccattagacgcaccggtcgcgttcctcctcatggcccccacttgtcatccgtccatcctcacgtctctgccccaccattttaccggtagccaacaaaactaggttccgtggcgtcgggtgggaccagcaagcagccgccgcagccggcccccaggcgcctctatatacggcactccgactccgatacattggcgacatcacagatcacacacactcgagaactccatttcgatctcatttgaaatcaacccatcctcgtttcctccgtctagcagcctctcaccctcatggccaagatcaagatcgggatcaatgggtttggcaggatcggaaggctggtggccagggtggccctgcagagcgacgacgtcgagctcgtcgccgtgaacgaccccttcatcagcaccgattacatgacctacatgttcaagtatgacactgtgcacggacagtggaagcaccatgaggtcaaggtgaaggactccaagacccttctctttggtgagaaggaggttgctgtgtttggctgcaggaaccctgaggagatcccatggggttcggttggcgctgaatatgttgttgagtctactggtgttttcactgaccaggagaaggctgcagctcacttgaagggtggtgccaagaaggttgtcatttctgctcctagcaaggatgcccccatgttcgttgttggtgtcaacgagaaggagtacaagtctgacatcaacattgtctctaatgctagctgcacaaccaactgccttgctccgcttgctaaggtcatcaatgacaagttcggtattgttgagggtctgatgaccactgttcatgccatcactgaagactgttgatgggccctcatctaaggactggaggggtggaagggctgctagtttcaacatcattcccagcagcactggagctgctaaggctgttggcaaagtgcttcctgtcctcaatggaaaattgactggaatgtctttccgtgtcccaactgtcgatgtttctgttgttgatctgactgttaggcttgagaagtctgccacctatgatgagatcaaggctgcggtcaaggccgaggcagagggtagcctcaagggcattctgggttatgtcgaggaggaccttgtttccaccgatttccagggtgacagcaggtctagcatctttgatgcgaaggctggcattgccttgaacggcaactttgtgaagcttgtgtcctggtacgacaacgagtggggatacagcacccgagtggtcgacctgatccgccacatgaacagcaccaagtaaatgaacaaactgatgaaagcatgcaaagagtgatgaaagcatgcaaagagagttgtgtttcttccccggaagtgcttccgagaataaatttttcttatctgattgtctaaaacctataattggtgtaatggtatcgtagtggttggttgagcattgagtgactcatattttgtcaggtctatgtgttatcgttaaacttttaacggtcattctatttcaaaagttttgcattttgcaatctttgacgctccatttcacttcatagttccacgtcatttcttccttcatttggctatttggttgtcggcttctttatagttccacgtcttttcttccttcacttattaaccgttagctgctgctgtggttgagatgagattaccatcgagaagagtacagtgactggatcactggaagtgcaactcag

SEQ ID NO: 204909 - DNA, 1343 bp, Zea Mays
atctgtattctctacagaatttaattctctgacctacatgttcaagtatgacactgtgcacggacagtggaagcaccatgaggtcaaggtgaaggactccaagacccttctctttggtgagaaggaggttgctgtgtttggctgcaggaaccctgaggagatcccatggggttcggttggcgctgaatatgttgttgagtctactggtgttttcactgaccaggagaaggctgcagctcacttgaagggtggtgccaagaaggttgtcatttctgctcctagcaaggatgcccccatgttcgttgttggtgtcaacgagaaggagtacaagtctgacatcaacattgtctctaatgctagctgcacaaccaactgccttgctccgcttgctaaggtcatcaatgacaagttcggtattgttgagggtctgatgaccactgttcatgccatcactgctacccagaagactgttgatgggccctcatctaaggactggaggggtggaagggctgctagtttcaacatcattcccagcagcactggagctgctaaggctgttggcaaagtgcttcctgtcctcaatggaaaattgactggaatgtctttccgtgtcccaactgtcgatgtttctgttgttgatctgactgttaggcttgagaagtctgccacctatgatgagatcaaggctgcggtcaaggccgaggcagagggtagcctcaagggcattctgggttatgtcgaggaggaccttgtttccaccgatttccagggtgacagcaggtctagcatctttgatgcgaaggctggcattgccttgaacggcaactttgtgaagcttgtgtcctggtacgacaacgagtggggatacagcacccgagtggtcgacctgatccgccacatgaacagcaccaagtaaatgaacaaactgatgaaagcatgcaaagagtgatgaaagcatgcaaagagagttgtgtttcttccccggaagtgcttccgagaataaatttttcttatctgattgtctaaaacctataattggtgtaatggtatcgtagtggttggttgagcattgagtgactcatattttgtcaggtctatgtgttatcgttaaacttttaacggtcattctatttcaaaagttttgcattttgcaatctttgacgctccatttcacttcatagttccacgtcatttcttccttcatttggctatttggttgtcggcttctttatagttccacgtcttttcttccttcacttattaaccgttagctgctgctgtggttgagatgagattaccatcgagaagagtacagtgactggatcactggaagtgcaactcag

SEQ ID NO: 204910 - DNA, 1405 bp, Zea Mays
  misc_feature (1404)..(1405): n is a, c, g, or t
cgttttcccagcagcggggtcagagaaccggtggacaagaaacctctccacccacccacctccgccgctgcagaatagaaattgcggcattgcctccggcttgagcagtaattgacttgacctcacttcccctgtggggaggctttaattttcttccgatcgatcatagtatccgctgcggtgtgattgcctgcccccaccccattgcgcctgcgcctgcgcctcgcttcatccggtgcgctgcccgcctcactcccgtcgtcctcttcctcgtcctcgctctcgtcgcggagcggtgtggaggcgcgcgctccttgaaggcacggggcaagagcggaggaagatcatctgggtgttggagtcatccagaggcacaagctgaggaatggggcaaaaggactccaagccttcacatggatatggctactcttcttatgattacgggagtgcttcatcgggatacacctcgagaaacactgggaattcgtcctccagttatagcgtcaggtacgcgccttcttcggagaacagtgtacagccggagacacatgccaggttgcagaggaagtattccaagatcggtgatgactaccgttctttgagccaggtgactgaagctttggcacaggcaggccttgaatcttcaaatcttattgtaggcattgattttacaaagagcaatgaatggacaggtaaaatttccttcaatcgccgctgcctgcatgatattggaaacactccaaacccatatgagcaagctatatctattattggaaggacactttcagcatttgatgaagataatttgattccctgcttcggatttggtgacgcgtcaactcatgatcaggaggtattcagcttttacccagagaaccgcccatgcaatggatttgaagaggcgctagacagatacagagaaatcgttccaactcttcgattagcaggacctacatcttttgcgccgatgattgagacagcaattggaattgttgacagcactggtggtcaatatcatgttcttctgataatcgccgatggacaggttacccgaagtgtcgatacacaatctggacagttgagtccacaggagcgggatactattgatgcaatagtaagagcaagccagttccccctgtcaattgttcttgtcggggttggtgatggaccatgggacatgatgcaccagtttgatgacaatatacctgctcggtcatttgacaatttccagtttgtgaatttcacggagattatgtcgaagagcatagcagctgacagaaaggaggcagaatttgcattgtcagcgctgatggaaatccctacacagtacaaagcaacaattgatctccaactcttaggccgtcgccaaagaataaccccaagaattgctctgccaccaccaann

SEQ ID NO: 204911 - DNA, 1120 bp, Zea Mays
tggcactttgtttgcaacacatggttatcaactttgattgtgaggttatttttgtaggttcgaatgagatggtttgatgtgaaagacaacaataatatgagacgagagttcttgcgaggaacattacaagcccctcagctgcagttagtaccccatgttggctatgtcagcctcttcccattcatgatggggactattccacctattatggccttcgatcactttctagaacaagttcaatatatatgaagcgtaatacagagcatgaccccccttattggagaggtgccatttggataaacatgaactacatggttctttcggcactacatcactatgcacataaggatggtccatatagcggcagggcaaaggaattgtatgacaagctaagatcaaaccttatccggaatatagtgcagaattacgatgcaacaggtttcttctgggaaaactatgaccagaaggacaaaggaaagggaaagggtgcacggtcatttactggatggacttcactcattgttctgatcatggcggagtcctacccaacattgcacaggtgagatatagatcgcgaacaaccacagcagaagatagctatggcaattggaatggaggggctggcagctggcgcttgtttagcccggtttgcaaccagaacactgggatagtttgattcgtagcatctgctgccttaatcatgaaaattttgacaacacctcctggtcaatctgttcagcatcatttatagagtgttagtggtcatccctgttcactctcatactgtaaactagctcctcgaagaactgattttggggggccaaaaccaccccaggaaagcatgagcatatggaaaacatgttcttgaaagctgacactacgtggagctgttacttgctattgagtgtaatctactgctactcttactatgcttggccatttgcacccccaatgatccccgaagaaacctgctggtccgagcatgtgacctatacctttgcatttacttgctagagaatcagttcaacacaatgcaagttgcaaggcacgtgttttgaaatggaaagcgggccatgtctatgctgtgaccgtctctacttcgcttgctgtgttactttgc

SEQ ID NO: 204912 - DNA, 2394 bp, Zea Mays
cttgcatgaacagcggtacggccgcgcgcggggtgctccacgcgtccagcgcgagccaggcgtccttcctttccttctccccgccgtcgtcgtgtcctcatccagccgtgcaggcagtggcggtggaccggagatctccgctccagctccgattgagcccaagagaagtcgttggtgcagacagccttggattggatgtggaatgaggcgatggcatctgacggatcatcctcctctaccttccgggggttgtacggcaacgtccacggcccggcggtgctcactggcgcggcgttcgcgctcgtggcgctcctcatctcgctctggctcatcctgcagcacctcagatcctacagcgatccagctgaacagaagtggatcatagctgtgctgttcatggtgcctgtttatgcctgcgaatcgataatctcactgtggaactcgaagctctctctggcctgtgatatattacggaattgttacgaagcctttgctctgtacgccttcggacgatacttggtggcttgccttgttctctagagggatcgaatcgctgtagtgtaatcttgtgatgatcagctacgtacatatctatgctctccccactcgccacagctctctgaattaacagctgtgtgctcacttcttgttacatgactactacacttgaggcggggaacggcaagtgttccgtctgcttgagagcaggaagagggacgagctgagccaggagttgctagacaaggcacgagctcgtaaccgcggcggagcgtacagtttcttctgtgaccctgacgctctgggagagaacctgtacacgattataaagttcggccttgttcaatacatgattctcaagacactatgcgctctcttggcgttggtcttggagccttttggagcctatggagatggcgaattcaagtggaattacgggtatccttacattgccgctgtcataaacttcagccagacatgggccttgtattgccttgtgaagttttacaacgcgacgcatgaaaagctacaggcgataaggccactagccaagttcataagctttaaggccatcgtgtttgccacttggtggcagggagtcggcattgcgatcatctgccaaactggactcctgcccaaagagggcaaagtgcagaacgcgctacaggacttcctcatctgcatcgagatggctatcgcagcggtagcgcatgcctacgtcttcaccgtggagccgtaccagcacgtccctgctctacctcctgatcacggggaagtcatgtgtcaggaaagcaaaatggaggtggaggtggatgtcgacgacgatacaggcggtacaccagcttccattgcgcagcaggagacccatgtcgaagctccaggagggacgagcatcaaggagagcgtgcaggatgtcgtcctcggcggcggccagcatgttgtcaaggatgtcgcgcttacgatctcacaagcgatcgggcccgtggaaaagggcgtcgggaagatccaggagaaattccaccacatctcgctgaagccaggggacaagaaagagcctcaagttgctgtggaggagcacgtaactgagaacgtggtggatggcaaacctgctgttgcggtcaacgcggaggttgaagtccaacagaaggcgcaggatcgtcgtggcgaggaagaaggtgtgcaactcaaaagaacagagaaggaaggacgattgtcacacctgagagtgccatggtggaagatgcaaaggaagcgggagcaggtgcaggagcaagcggagtcgaaggctgaagctgtgcgagggccggacggtgaacaggggtgattgtgttggcctgcatctaaatgggctgtaagaccaactccagcagcctccgtatacggctctccatccccttttttcactgcgcagtacactattcatcagtccagcagactccgtatccctctccctaaaaagcacgctgtgtacttatactcctcttttccacgtcttctctcctctccgtacaagtctgagaaatggtgcaattaaaagccccgatagagtgtaaatacggagtctgttggaatgcaccatgcaaaaaaaccactttatctatgatcacgtctgcttattttacggataccttattttacggatatggagccatgctggagttggtttaagtggtgtgtggatgaattgtggagtgtgtcggcccaacagggtcagttctggtgtttaaaggagttgtaacagacttaagagagaaattaagaagaaaatagagaactcaccacagaacgttgcgtcgaccctctctggcggcgaaaacgtgctcacgtcccggcgaacctccctcttgccggcggccaggggccatcacaacgatgcagcatcgatctgaaggattt

SEQ ID NO: 204913 - DNA, 2256 bp, Zea Mays
catgaacagcggtacggccgcgcgcggggtgctccacgcgtccagcgcgagccaggcgtccttcctttccttctccccgccgtcgtcgtgtcctcatccagccgtgcaggcagtggcggtggaccggagatctccgctccagctccgattgagcccaagagaagtcgttggtgcagacagccttggattggatgtggaatgaggcgatggcatctgacggatcatcctcctctaccttccgggggttgtacggcaacgtccacggcccggcggtgctcactggcgcggcgttcgcgctcgtggcgctcctcatctcgctctggctcatcctgcagcacctcagatcctacagcgatccagctgaacagaagtggatcatagctgtgctgttcatggtgcctgtttatgcctgcgaatcgataatctcactgtggaactcgaagctctctctggcctgtgatatattacggaattgttacgaagcctttgctctgtacgccttcggacgatacttggtggcttgccttggcggggaacggcaagtgttccgtctgcttgagagcaggaagagggacgagctgagccaggagttgctagacaaggcacgagctcgtaaccgcggcggagcgtacagtttcttctgtgaccctgacgctctgggagagaacctgtacacgattataaagttcggccttgttcaatacatgattctcaagacactatgcgctctcttggcgttggtcttggagccttttggagcctatggagatggcgaattcaagtggaattacgggtatccttacattgccgctgtcataaacttcagccagacatgggccttgtattgccttgtgaagttttacaacgcgacgcatgaaaagctacaggcgataaggccactagccaagttcataagctttaaggccatcgtgtttgccacttggtggcagggagtcggcattgcgatcatctgccaaactggactcctgcccaaagagggcaaagtgcagaacgcgctacaggacttcctcatctgcatcgagtgtagatggctatcgcagcggtagcgcatgcctacgtcttcaccgtggagccgtaccagcacgtccctgctctacctcctgatcacggggaagtcatgtgtcaggaaagcaaaatggaggtggaggtggatgtcgacgacgatacaggcggtacaccagcttccattgcgcagcaggagacccatgtcgaagctccaggagggacgagcatcaaggagagcgtgcaggatgtcgtcctcggcggcggccagcatgttgtcaaggatgtcgcgcttacgatctcacaagcgatcgggcccgtggaaaagggcgtcgggaagatccaggagaaattccaccacatctcgctgaagccaggggacaagaaagagcctcaagttgctgtggaggagcacgtaactgagaacgtggtggatggcaaacctgctgttgcggtcaacgcggaggttgaagtccaacagaaggcgcaggatcgtcgtggcgaggaagaaggtgtgcaactcaaaagaacagagaaggaaggacgattgtcacacctgagagtgccatggtggaagatgcaaaggaagcgggagcaggtgcaggagcaagcggagtcgaaggctgaagctgtgcgagggccggacggtgaacaggggtgattgtgttggcctgcatctaaatgggctgtaagaccaactccagcagcctccgtatacggctctccatccccttttttcactgcgcagtacactattcatcagtccagcagactccgtatccctctccctaaaaagcacgctgtgtacttatactcctcttttccacgtcttctctcctctccgtacaagtctgagaaatggtgcaattaaaagccccgatagagtgtaaatacggagtctgttggaatgcaccatgcaaaaaaaccactttatctatgatcacgtctgcttattttacggataccttattttacggatatggagccatgctggagttggtttaagtggtgtgtggatgaattgtggagtgtgtcggcccaacagggtcagttctggtgtttaaaggagttgtaacagacttaagagagaaattaagaagaaaatagagaactcaccacagaacgttgcgtcgaccctctctggcggcgaaaacgtgctcacgtcccggcgaacctccctcttgccggcggccaggggccatcacaacgatgcagcatcgatctgaaggattt

SEQ ID NO: 204914 - DNA, 702 bp, Zea Mays
gtgtcttgctttttccctcagcctggtggcaggagctcctttctcctccttactctgtcatctccgtccgttccttttcttcgttccctgatttccttgccacctgtgcaccggatccatcttgggattgctctgcctgtaaggcgagattgcgagaagatggggcagacaaggaaggaggtcgtattggcgctggactctaggttcacaagcatgatgacggaccaaagaagctcgagaactccatgctgcattgctatctcaaccaagaggacttggtggaggaaggaaaggaggaagagaagaaggagaaactgagtaacatgtttgtcctgattaccgtaaaaaacagatattgaagggttggaatcaacctaaaggcacatggaggtactgaaagggaaatgtgcccttgggccatttctaagtattttggtgattgcgtgccaacacaagtgcttaaatgtgaatctatgcccatgaatggacaaagtgcaaatcaagagcaaaggtatgtttctaagtcttagtacattggttttgtgtactaatatacttgtctaagtgttagaaacagaaagaagaagaaacgaagagagttggctgtgtacagccaagaggctgtttcggtctggggcaccggactgtccggtggtgcaccggacagtgtccggtgcgtcaggctgcctcgaccgaagtggc

SEQ ID NO: 204915 - DNA, 1419 bp, Zea Mays
tttccgcgaatcggcaccttctccttttttttaagctgaatccccatcttcgacttccgcacctcgcctgaatcgctcattcgctccccaccccaacgctccgtccccgcggcccaccaaccgccgccgccgccgccacagccatgcacggccgccggcacctcgcggcgtcccttacccgggccctgatccaggcgccatcccgctccatctcctccaccccgtctctcctccaaaccctcgacccctcagtgccgtcgcctcccgccgcgggagcagggcggctcgcggagctgcggcggcggctgcaggcggacgcgccgtcgctgggtgacttcacgtactcggtggaggtggggacgcggcagcgcccgctgcccaagcccaagtggatgaaggagaccgtgcctggcggcgccaagtacgcggccatcaaggccaagctgcgggagctgaagctgcacaccgtctgcgaggaggcccggtgccccaacctcggcgagtgctggtccggcggcgagactggcaccgccaccgccacaattatgatccttggggacacctgcacgcgcggatgcaggttctgtaacgtcaagacatctcgaacaccccctccaccggatcctgatgagccttccaatgttgctcaagctattgcctcatggggccttgaatatatagtaatcacgagtgttgaccgggatgatctacctgatcagggcagtggtcactttgctgaaacagtacagaagctaaaggctttgaagccagaaatgcttattgaagcgcttgtacctgatttccgtggagatccaagctgcgtagagaaggttgcgacttctggattgcatgtttttgcgcacaacattgaaactgtggaagagcttcaaaggaatgtcagagactaccgtgcaaatttcaagcaatctatagatgttctggaaatggcgaaagagtatgctcctcccggtacccttacaaagacatcgataatgctgggatgcggggagactccagatcaggttattaggaccatggaaaaagtgagggctgctgatgttgatgtcataacatttggccagtacatgaggccatcaaaacgtcacatgcctgtttctgagtatgttacgcctgaagcttttgagaagtatcgggcccttggtgtcgaaatggggttccgctacgttgcgtctgggccaatggtccggtcttcgtacaaggcaggtgaattctacatcaaggctatgatcgaagcggagcgagccaagggaaccgctgcagactcaagtgcataaccgagatagcacctcccggccccacccaccccttgacttgttccggcgccttcgtgccttggttcatcctccctctcaagtccaagaaaaaaaaagagattctcacggacgcggccttcagatc

SEQ ID NO: 204916 - DNA, 765 bp, Zea Mays
gtgcttctcactagtcagtactcagtagtagtagtagtcactccattccccccacccggctagtagccctgctctgctctctgcctcggctatatatatacgccgcgggcgcaccggtccagcaagcaacaataaagggcggtgtcgaagaggagcttggagcttggaccgacccgagccccatcgagcgagagaggaaataatgggtgaagaggccagctgcaacgctgccagcgcgatggaggccgccaccaacgccaggccggccaaggagaacggacgcgcgccggctgtggcggaggtagtggcccaggaggcggccgctgacccccggctgcagggcatctccgacgccatccgcgtcgtgccgcacttccccaagcacggcatcatgttcaacgacatcaccacgctgctgctgcgccccagggtgttcaaggacgccgtcgacctgttcgtcgagcgctaccgcgggatgcgcatcgacgccgtcgccgggattgaggccaggggcttcatatttggcccggcagtcgcattggctattggcgccaagttcatacctttgcgcaagcctaggaagctccccggcgaggtgatctccgagaaatacgttctcgagtacgggaccgattgcttagagatgcatgtcggagccatcgaacgacctggtgagcgcgtgctgatcaccgacgacttggtcgcgacgggagggacgctctgtgctgcaatcaggcttcttgcaaagggtatcttgcgattgtt

SEQ ID NO: 204917 - DNA, 851 bp, Zea Mays
gcttctcactagtcagtactcagtagtagtagtagtcactccattccccccacccggctagtagccctgctctgctctctgcctcggctatatatatacgccgcgggcgcaccggtccagcaagcaacaataaagggcggtgtcgaagaggagcttggagcttggaccgacccgagccccatcgagcgagagaggaaataatgggtgaagaggccagctgcaacgctgccagcgcgatggaggccgccaccaacgccaggccggccaaggagaacggacgcgcgccggctgtggcggaggtagtggcccaggaggcggccgctgacccccggctgcagggcatctccgacgccatccgcgtcgtgccgcacttccccaagcacggcatcatgttcaacgacatcaccacgctgctgctgcgccccagggtgttcaaggacgccgtcgacctgttcgtcgagcgctaccgcgggatgcgcatcgacgccgtcgccgggattgaggccaggggcttcatatttggcccggcagtcgcattggctattggcgccaagttcatacctttgcgcaagcctaggaagctccccggcgaggtgatctccgagaaatacgttctcgagtacgggaccgattgcttagagatgcatgtcggagccatcgaacgacctggtgagcgcgtgctgatcaccgacgacttggtcgcgacgggagggacgctctgtgctgcaatcaggcttcttgaacgtgctgaagctgatgtggtcgagtgcgcatgcctcattggcctcccaaaattcaaggtgccatataatatatcagctgttcattatgtgtactaaaacacaacaaat

SEQ ID NO: 204918 - DNA, 550 bp, Zea Mays
ggaaaacatttgcggttagatgataagaatgaaactcacacatatgctgatcaaatctaaacaaaatagtgctgatccatgttatgtggttaaaaaactagatgcgaatataaagaaatatggcattaattcccgaaaggtgatcacaagtaagaatttgacgatgctgatgggactaatagatcaagagattgaagagattaatgcagaaaagagaaagcgaagtggacatccagcaggaggacaaccagaactgaaggacgatgacggtcaactaagggcaaactcagtcaaggctcgcgacgctgaattgcgttgtgaaagggctgtaaagctacgacgactatagcactttgaaaccgctgttgctccccccgacagagaaagcagtttgaaactgctgtggctacctatagcttcaaagctagacaaggctaattcgtccttcagtagagctgattgacataaacgtagttgcagctcttgcgtgttctgctttttcgtgttgctcttccgcgttcgagttccatgcctgccacctccatcaatg

SEQ ID NO: 204919 - DNA, 3624 bp, Zea Mays
ggatctctatgtgtcgtgtccaaaaggtgacgggcccgcgagctagggtttccggtcaccgcggatctcggcggcctcctccgccgagctcctcgcagccccgcgacgcaatatcgtcagccgtgccgcctgagtgcccaagcttaacagactccggattatcaaaagttgatgcgatctcaccaccagtgacaagagctagccgttcaatgccctcaaaatcagcatgctcaatcgcgaggatgccagcatcagcaaagagttcttcagggaagttatagattaactgcctgttgacaaaatagttgatcccatgcgctataatcttctgcaccttctctctcattttctgcttttcagcagcttcaatatctgcaaccttaaacattgaatccacccagacacatgccccatagtcttaaatctgtgtccatagcactgtttgcaaccaaaattttggcattctcaattctcttaggttgcccaatgccaattttcttgtcaagaatgaacccttcatccaaaaaggagtccttaagagatcctccaggtttcttcagaatttgaatggcttccaggttggtgctgcccttaagccttaatacagcgtcaactgcaagttcagcaaagtactctttatcctgggaaagaatttttgaactaagggtagtcatagcaatgttcatgagatcagctctgaacttatctgaacaaactgtacatgttaaatcagtgctttactttgaactaataaaacaccgttaactggtaatttatcattgctatggtctttcaggctatttgaggagatgccgccatcgtcatcgtcatccttactctctggctccaatactgcgagtgctgagcttcctctaatcccttgcaagctctgcaatggggtggtgattgagcgggtttccaaacaaccagaaagcacgtcgaggaagttctaccggtgcagagccaagaaattggatgggtctcaatgtgatttttttccactggcaagcgagctatgctgttttgttaatcaaggatggggttgtcagtggtgaccaatgccttgagttgttaatggtcgcacttaatgatcatggcaaagctgttgaatctctaaccaattccatcagagaaatgaagaaaaagttgtccgacctggagttagtgatggaagagctggataacgtgaaaaagtcgatgaaggcagccatggttgagaaattgaggaaaacaagaaatcgatagctgcattgaaattgatggagaatgagatgcaaatgctgaaagggccaactaaagtgaaacctaggaatatggcactgtgttttctgcttttggcgttgattgggtggtttgtgatgggacagatgaattggggggaggaagcatccaatcgatttatgctgggaggctaatgaactttgggtggacttttgtatagctagatgtaatcagaactggttaggcaccctgggagtggaagctagatgtaagaagttgattgtgctgcgatttgatgctctggaggatgaagatgggctctgatcgaagcaaagttgtgccactaatatttttttcttattgaacttagtagttttctgtatgaacttctgtttatcagatacccagttgaacaagttcagtactctatttatgatattcaatattagcggttgactttaggaaatcagaaattatttggctcatgataatctcacgtgatcacgctgcatacagaaggtgaagcctgtttgttggcggagtgagaaaacttaagactaggggaaaatgaacttgtaaacaagaattcttgacaggaattatagttggattaagattctttttatgtacctcacttcggcaccaccgtgaaaccatagtgtccccatccatgttgtccggagtcgaataattgtatgcattttttaatcgaggacacaattcaataatcttggatgcagaggatgaactaacagaggacaaagctcacacaaccatggatacagacgtcaatccaaattctgcttcaatttgtaaaggctcttcaaattctacttcgttttgtgaaggtggcagtcgtgaaggtggccatgaacaaaaaaatccaaacacttttgtgagagaaagcaggtcaaaaaggagggctctgtataaagcttgcatagatttggcttgtacgaaaagtgaaaatgatacatacaaaaaaatcataggaaacagggctgctttggcagacttatcaagcaaatatctgcgtcacctaatgcctgtaaaagaggactatctgcttgtggaaattggagatgctcagttgactacagcttatttttgacatcaatgcaccgtgctggtgatatgagtaacacattgatgagtgttatcgtcgaatacttcaacagtatttctggggccctctttgacactgtttctagaccctctaccatttctaaatatgtcatctgtcctttcttgttggtaagatgggaaaaatgctttctctcctttctttctgtttcatatatttataggtatttaacagtgtttttgctgtgtttgaaaaatagaagaaagttaaaaagggttgcaactttaaagttaaagatagtttactgaagactcttgaggaaacccagaaaagagatatgattatgctcctgattctggatggcagtcattggcaacttgtatgtataaactttctccatagggaaattaactattttgactctttgggatcagatttctgcgctgcagaatcattggtgaggcctgactctttgggatcagatttctgcgctgcaaaatcattgatgaggccttttaaatcctgttataagtatagttgctttgcttaggacatgctaacacttgccaagtttcatcctgttgatattgcagcttgctaatttcatcgaattactgaagatacataaatgcataaaatttgatgttaattctttcgaaaaggtcagagtaaaatgtcctaaacagtccaacaacattgattgtggttttttcacaatactgtacatgattgcatggaatggaaaacatttgcggttagatgataagatcaaagctagcgaaattgttgcatgcagaatgaaactcacacatatgctgatcaaatctaaacaaaatagtgctgatccatgttatgtggttaaaaaactagatgcgaatataaagaaatatggcattaattcccgaaaggtgatcacaagtaagaatttgacgatgctgatgggactaatagatcaagagattgaagagattaatgcagaaaagagaaagcgaagtggacatccagcaggaggacaaccagaactgaaggacgatgacggtcaactaagggcaaactcagtcaaggctcgcgacgctgaattgcgttgtgaaagggctgtaaagctacgacgactatagcactttgaaaccgctgttgctccccccgacagagaaagcagtttgaaactgctgtggctacctatagcttcaaagctagacaaggctaattcgtccttcagtagagctgattgacataaacgtagttgcagctcttgcgtgttctgctttttcgtgttgctcttccgcgttcgagttccatgcctgccacctccatcaatg

SEQ ID NO: 204920 - DNA, 3216 bp, Zea Mays
ggatctctatgtgtcgtgtccaaaaggtgacgggcccgcgagctagggtttccggtcaccgcggatctcggcggcctcctccgccgagctcctcgcagccccgcgacgcaatatcgtcagccgtgccgcctgagtgcccaagcttaacagactccggattatcaaaagttgatgcgatctcaccaccagtgacaagagctagccgttcaatgccctcaaaatcagcatgctcaatcgcgaggatgccagcatcagcaaagagttcttcagggaagttatagattaactgcctgttgacaaaatagttgatcccatgcgctataatcttctgcaccttctctctcattttctgcttttcagcagcttcaatatctgcaaccttaaacattgaatccacccagacacatgccccatagtcttaaatctgtgtccatagcactgtttgcaaccaaaattttggcattctcaattctcttaggttgcccaatgccaattttcttgtcaagaatgaacccttcatccaaaaaggagtccttaagagatcctccaggtttcttcagaatttgaatggcttccaggttggtgctgcccttaagccttaatacagcgtcaactgcaagttcagcaaagtactctttatcctgggaaagaatttttgaactaagggtagtcatagcaatgttcatgagatcagctctgaacttatctgaacaaactgtacatgttaaatcagtgctttactttgaactaataaaacaccgttaactggtaatttatcattgctatggtctttcaggctatttgaggagatgccgccatcgtcatcgtcatccttactctctggctccaatactgcgagtgctgagcttcctctaatcccttgcaagctctgcaatggggtggtgattgagcgggtttccaaacaaccagaaagcacgtcgaggaagttctaccggtgcagagccaagaaattggatgggtctcaatgtgatttttttccactggcaagcgagctatgctgttttgttaatcaaggatggggttgtcagtggtgaccaatgccttgagttgttaatggtcgcacttaatgatcatggcaaagctgttgaatctctaaccaattccatcagagaaatgaagaaaaagttgtccgacctggagttagtgatggaagagctggataacgtgaaaaagtcgatgaaggcagccatggttgagaaattgaggaaaacaagaaatcgatagctgcattgaaattgatggagaatgagatgcaaatgctgaaagggccaactaaagtgaaacctaggaatatggcactgtgttttctgcttttggcgttgattgggtggtttgtgatgggacagatgaattggggggaggaagcatccaatcgatttatgctgggaggctaatgaactttgggtggacttttgtatagctagatgtaatcagaactggttaggcaccctgggagtggaagctagatgtaagaagttgattgtgctgcgatttgatgctctggaggatgaagatgggctctgatcgaagcaaagttgtgccactaatatttttttcttattgaacttagtagttttctgtatgaacttctgtttatcagatacccagttgaacaagttcagtactctatttatgatattcaatattagcggttgactttaggaaatcagaaattatttggctcatgataatctcacgtgatcacgctgcatacagaaggtgaagcctgtttgttggcggagtgagaaaacttaagactaggggaaaatgaacttgtaaacaagaattcttgacaggaattatagttggattaagattctttttatgtacctcacttcggcaccaccgtgaaaccatagtgtccccatccatgttgtccggagtcgaataattgtatgcattttttaatcgaggacacaattcaataatcttggatgcagaggatgaactaacagaggacaaagctcacacaaccatggatacagacgtcaatccaaattctgcttcaatttgtaaaggctcttcaaattctacttcgttttgtgaaggtggcagtcgtgaaggtggccatgaacaaaaaaatccaaacacttttgtgagagaaagcaggtcaaaaaggagggctctgtataaagcttgcatagatttggcttgtacgaaaagtgaaaatgatacatacaaaaaaatcataggaaacagggctgctttggcagacttatcaagcaaatatctgcgtcacctaatgcctgtaaaagaggactatctgcttgtggaaattggagatgctcagttgactacagcttatttttgacatcaatgcaccgtgctggtgatatgagtaacacattgatgagtgttatcgtcgaatacttcaacagtatttctggggccctctttgacactgtttctagaccctctaccatttctaaatatgtcatctgtcctttcttgttgaagaaagttaaaaagggttgcaactttaaagttaaagatagtttactgaagactcttgaggaaacccagaaaagagatatgattatgctcctgattctggatggcagtcattggcaacttcttgctaatttcatcgaattactgaagatacataaatgcataaaatttgatgttaattctttcgaaaagatcaaagctagcgaaattgttgcatgcagaatgaaactcacacatatgctgatcaaatctaaacaaaatagtgctgatccatgttatgtggttaaaaaactagatgcgaatataaagaaatatggcattaattcccgaaaggtgatcacaagtaagaatttgacgatgctgatgggactaatagatcaagagattgaagagattaatgcagaaaagagaaagcgaagtggacatccagcaggaggacaaccagaactgaaggacgatgacggtcaactaagggcaaactcagtcaaggctcgcgacgctgaattgcgttgtgaaagggctgtaaagctacgacgactatagcactttgaaaccgctgttgctccccccgacagagaaagcagtttgaaactgctgtggctacctatagcttcaaagctagacaaggctaattcgtccttcagtagagctgattgacataaacgtagttgcagctcttgcgtgttctgctttttcgtgttgctcttccgcgttcgagttccatgcctgccacctccatcaatg

SEQ ID NO: 204921 - DNA, 3128 bp, Zea Mays
cttagcgacacaacgatctacaagaataagggagacattcaaatagtaccaactaatgaagaattaggttgatgagccacactaagaagctatggaagagttattaagcatcttctgagaggaataactaggatctctatgtgtcgtgtccaaaaggtgacgggcccgcgagctagggtttccggtcaccgcggatctcggcggcctcctccgccgagctcctcgcagccccgcgacgcaatatcgtcagccgtgccgcctgagtgcccaagcttaacagactccggattatcaaaagttgatgcgatctcaccaccagtgacaagagctagccgttcaatgccctcaaaatcagcatgctcaatcgcgaggatgccagcatcagcaaagagttcttcagggaagttatagattaactgcctgttgacaaaatagttgatcccatgcgctataatcttctgcaccttctctctcattttctgcttttcagcagcttcaatatctgcaaccttaaacattgaatccacccagacacatgccccatagtcttaaatctgtgtccatagcactgtttgcaaccaaaattttggcattctcaattctcttaggttgcccaatgccaattttcttgtcaagaatgaacccttcatccaaaaaggagtccttaagagatcctccaggtttcttcagaatttgaatggcttccaggctatttgaggagatgccgccatcgtcatcgtcatccttactctctggctccaatactgcgagtgctgagcttcctctaatcccttgcaagctctgcaatggggtggtgattgagcgggtttccaaacaaccagaaagcacgtcgaggaagttctaccggtgcagagccaagaaattggatgggtctcaatgtgatttttttccactggcaagcgagctatgctgttttgttaatcaaggatggggttgtcagtggtgaccaatgccttgagttgttaatggtcgcacttaatgatcatggcaaagctgttgaatctctaaccaattccatcagagaaatgaagaaaaagttgtccgacctggagttagtgatggaagagctggataacgtgaaaaagtcgatgaaggcagccatggttgagaaattgaggaaaacaagaaatcgatagctgcattgaaattgatggagaatgagatgcaaatgctgaaagggccaactaaagtgaaacctaggaatatggcactgtgttttctgcttttggcgttgattgggtggtttgtgatgggacagatgaattggggggaggaagcatccaatcgatttatgctgggaggctaatgaactttgggtggacttttgtatagctagatgtaatcagaactggttaggcaccctgggagtggaagctagatgtaagaagttgattgtgctgcgatttgatgctctggaggatgaagatgggctctgatcgaagcaaagttgtgccactaatatttttttcttattgaacttagtagttttctgtatgaacttctgtttatcagatacccagttgaacaagttcagtactctatttatgatattcaatattagcggttgactttaggaaatcagaaattatttggctcatgataatctcacgtgatcacgctgcatacagaaggtgaagcctgtttgttggcggagtgagaaaacttaagactaggggaaaatgaacttgtaaacaagaattcttgacaggaattatagttggattaagattctttttatgtacctcacttcggcaccaccgtgaaaccatagtgtccccatccatgttgtccggagtcgaataattgtatgcattttttaatcgaggacacaattcaataatcttggatgcagaggatgaactaacagaggacaaagctcacacaaccatggatacagacgtcaatccaaattctgcttcaatttgtaaaggctcttcaaattctacttcgttttgtgaaggtggcagtcgtgaaggtggccatgaacaaaaaaatccaaacacttttgtgagagaaagcaggtcaaaaaggagggctctgtataaagcttgcatagatttggcttgtacgaaaagtgaaaatgatacatacaaaaaaatcataggaaacagggctgctttggcagacttatcaagcaaatatctgcgtcacctaatgcctgtaaaagaggactatctgcttgtggaaattggagatgctcagttgactacagcttatttttgacatcaatgcaccgtgctggtgatatgagtaacacattgatgagtgttatcgtcgaatacttcaacagtatttctggggccctctttgacactgtttctagaccctctaccatttctaaatatgtcatctgtcctttcttgttgaagaaagttaaaaagggttgcaactttaaagttaaagatagtttactgaagactcttgaggaaacccagaaaagagatatgattatgctcctgattctggatggcagtcattggcaacttcttgctaatttcatcgaattactgaagatacataaatgcataaaatttgatgttaattctttcgaaaagatcaaagctagcgaaattgttgcatgcagaatgaaactcacacatatgctgatcaaatctaaacaaaatagtgctgatccatgttatgtggttaaaaaactagatgcgaatataaagaaatatggcattaattcccgaaaggtgatcacaagtaagaatttgacgatgctgatgggactaatagatcaagagattgaagagattaatgcagaaaagagaaagcgaagtggacatccagcaggaggacaaccagaactgaaggacgatgacggtcaactaagggcaaactcagtcaaggctcgcgacgctgaattgcgttgtgaaagggctgtaaagctacgacgactatagcactttgaaaccgctgttgctccccccgacagagaaagcagtttgaaactgctgtggctacctatagcttcaaagctagacaaggctaattcgtccttcagtagagctgattgacataaacgtagttgcagctcttgcgtgttctgctttttcgtgttgctcttccgcgttcgagttccatgcctgccacctccatcaatg

SEQ ID NO: 204922 - DNA, 3401 bp, Zea Mays
cttagcgacacaacgatctacaagaataagggagacattcaaatagtaccaactaatgaagaattaggttgatgagccacactaagaagctatggaagagttattaagcatcttctgagaggaataactaggatctctatgtgtcgtgtccaaaaggtgacgggcccgcgagctagggtttccggtcaccgcggatctcggcggcctcctccgccgagctcctcgcagccccgcgacgcaatatcgtcagccgtgccgcctgagtgcccaagcttaacagactccggattatcaaaagttgatgcgatctcaccaccagtgacaagagctagccgttcaatgccctcaaaatcagcatgctcaatcgcgaggatgccagcatcagcaaagagttcttcagggaagttatagattaactgcctgttgacaaaatagttgatcccatgcgctataatcttctgcaccttctctctcattttctgcttttcagcagcttcaatatctgcaaccttaaacattgaatccacccagacacatgccccatagtcttaaatctgtgtccatagcactgtttgcaaccaaaattttggcattctcaattctcttaggttgcccaatgccaattttcttgtcaagaatgaacccttcatccaaaaaggagtccttaagagatcctccaggtttcttcagaatttgaatggcttccaggctatttgaggagatgccgccatcgtcatcgtcatccttactctctggctccaatactgcgagtgctgagcttcctctaatcccttgcaagctctgcaatggggtggtgattgagcgggtttccaaacaaccagaaagcacgtcgaggaagttctaccggtgcagagccaagaaattggatgggtctcaatgtgatttttttccactggcaagcgagctatgctgttttgttaatcaaggatggggttgtcagtggtgaccaatgccttgagttgttaatggtcgcacttaatgatcatggcaaagctgttgaatctctaaccaattccatcagagaaatgaagaaaaagttgtccgacctggagttagtgatggaagagctggataacgtgaaaaagtcgatgaaggcagccatggttgagaaattgaggaaaacaagaaatcgatagctgcattgaaattgatggagaatgagatgcaaatgctgaaagggccaactaaagtgaaacctaggaatatggcactgtgttttctgcttttggcgttgattgggtggtttgtgatgggacagatgaattggggggaggaagcatccaatcgatttatgctgggaggctaatgaactttgggtggacttttgtatagctagatgtaatcagaactggttaggcaccctgggagtggaagctagatgtaagaagttgattgtgctgcgatttgatgctctggaggatgaagatgggctctgatcgaagcaaagttgtgccactaatatttttttcttattgaacttagtagttttctgtatgaacttctgtttatcagatacccagttgaacaagttcagtactctatttatgatattcaatattagcggttgactttaggaaatcagaaattatttggctcatgataatctcacgtgatcacgctgcatacagaaggtgaagcctgtttgttggcggagtgagaaaacttaagactaggggaaaatgaacttgtaaacaagaattcttgacaggaattatagttggattaagattctttttatgtacctcacttcggcaccaccgtgaaaccatagtgtccccatccatgttgtccggagtcgaataattgtatgcattttttaatcgaggacacaattcaataatcttggatgcagaggatgaactaacagaggacaaagctcacacaaccatggatacagacgtcaatccaaattctgcttcaatttgtaaaggctcttcaaattctacttcgttttgtgaaggtggcagtcgtgaaggtggccatgaacaaaaaaatccaaacacttttgtgagagaaagcaggtcaaaaaggagggctctgtataaagcttgcatagatttggcttgtacgaaaagtgaaaatgatacatacaaaaaaatcataggaaacagggctgctttggcagacttatcaagcaaatatctgcgtcacctaatgcctgtaaaagaggactatctgcttgtggaaattggagatgctcagttgactacagcttatttttgacatcaatgcaccgtgctggtgatatgagtaacacattgatgagtgttatcgtcgaatacttcaacagtatttctggggccctctttgacactgtttctagaccctctaccatttctaaatatgtcatctgtcctttcttgttgaagaaagttaaaaagggttgcaactttaaagttaaagatagtttactgaagactcttgaggaaacccagaaaagagatatgattatgctcctgattctggatggcagtcattggcaacttgtatgtataaactttctccatagggaaattaactattttgactctttgggatcagatttctgcgctgcagaatcattgcttgctaatttcatcgaattactgaagatacataaatgcataaaatttgatgttaattctttcgaaaaggtcagagtaaaatgtcctaaacagtccaacaagtatggatgcttcactagtcacacttttcactagtaacactttatttcaagttccaaaatgtcatctgattacatttctttattgacaagcattgattgtggttttttcacaatactgtacatgattgcatggaatggaaaacatttgcggttagatgataagatcaaagctagcgaaattgttgcatgcagaatgaaactcacacatatgctgatcaaatctaaacaaaatagtgctgatccatgttatgtggttaaaaaactagatgcgaatataaagaaatatggcattaattcccgaaaggtgatcacaagtaagaatttgacgatgctgatgggactaatagatcaagagattgaagagattaatgcagaaaagagaaagcgaagtggacatccagcaggaggacaaccagaactgaaggacgatgacggtcaactaagggcaaactcagtcaaggctcgcgacgctgaattgcgttgtgaaagggctgtaaagctacgacgactatagcactttgaaaccgctgttgctccccccgacagagaaagcagtttgaaactgctgtggctacctatagcttcaaagctagacaaggctaattcgtccttcagtagagctgattgacataaacgtagttgcagctcttgcgtgttctgctttttcgtgttgctcttccgcgttcgagttccatgcctgccacctccatcaatg

SEQ ID NO: 204923 - DNA, 3210 bp, Zea Mays
cttagcgacacaacgatctacaagaataagggagacattcaaatagtaccaactaatgaagaattaggttgatgagccacactaagaagctatggaagagttattaagcatcttctgagaggaataactaggatctctatgtgtcgtgtccaaaaggtgacgggcccgcgagctagggtttccggtcaccgcggatctcggcggcctcctccgccgagctcctcgcagccccgcgacgcaatatcgtcagccgtgccgcctgagtgcccaagcttaacagactccggattatcaaaagttgatgcgatctcaccaccagtgacaagagctagccgttcaatgccctcaaaatcagcatgctcaatcgcgaggatgccagcatcagcaaagagttcttcagggaagttatagattaactgcctgttgacaaaatagttgatcccatgcgctataatcttctgcaccttctctctcattttctgcttttcagcagcttcaatatctgcaaccttaaacattgaatccacccagacacatgccccatagtcttaaatctgtgtccatagcactgtttgcaaccaaaattttggcattctcaattctcttaggttgcccaatgccaattttcttgtcaagaatgaacccttcatccaaaaaggagtccttaagagatcctccaggtttcttcagaatttgaatggcttccaggctatttgaggagatgccgccatcgtcatcgtcatccttactctctggctccaatactgcgagtgctgagcttcctctaatcccttgcaagctctgcaatggggtggtgattgagcgggtttccaaacaaccagaaagcacgtcgaggaagttctaccggtgcagagccaagaaattggatgggtctcaatgtgatttttttccactggcaagcgagctatgctgttttgttaatcaaggatggggttgtcagtggtgaccaatgccttgagttgttaatggtcgcacttaatgatcatggcaaagctgttgaatctctaaccaattccatcagagaaatgaagaaaaagttgtccgacctggagttagtgatggaagagctggataacgtgaaaaagtcgatgaaggcagccatggttgagaaattgaggaaaacaagaaatcgatagctgcattgaaattgatggagaatgagatgcaaatgctgaaagggccaactaaagtgaaacctaggaatatggcactgtgttttctgcttttggcgttgattgggtggtttgtgatgggacagatgaattggggggaggaagcatccaatcgatttatgctgggaggctaatgaactttgggtggacttttgtatagctagatgtaatcagaactggttaggcaccctgggagtggaagctagatgtaagaagttgattgtgctgcgatttgatgctctggaggatgaagatgggctctgatcgaagcaaagttgtgccactaatatttttttcttattgaacttagtagttttctgtatgaacttctgtttatcagatacccagttgaacaagttcagtactctatttatgatattcaatattagcggttgactttaggaaatcagaaattatttggctcatgataatctcacgtgatcacgctgcatacagaaggtgaagcctgtttgttggcggagtgagaaaacttaagactaggggaaaatgaacttgtaaacaagaattcttgacaggaattatagttggattaagattctttttatgtacctcacttcggcaccaccgtgaaaccatagtgtccccatccatgttgtccggagtcgaataattgtatgcattttttaatcgaggacacaattcaataatcttggatgcagaggatgaactaacagaggacaaagctcacacaaccatggatacagacgtcaatccaaattctgcttcaatttgtaaaggctcttcaaattctacttcgttttgtgaaggtggcagtcgtgaaggtggccatgaacaaaaaaatccaaacacttttgtgagagaaagcaggtcaaaaaggagggctctgtataaagcttgcatagatttggcttgtacgaaaagtgaaaatgatacatacaaaaaaatcataggaaacagggctgctttggcagacttatcaagcaaatatctgcgtcacctaatgcctgtaaaagaggactatctgcttgtggaaattggagatgctcagttgactacagcttatttttgacatcaatgcaccgtgctggtgatatgagtaacacattgatgagtgttatcgtcgaatacttcaacagtatttctggggccctctttgacactgtttctagaccctctaccatttctaaatatgtcatctgtcctttcttgttgaagaaagttaaaaagggttgcaactttaaagttaaagatagtttactgaagactcttgaggaaacccagaaaagagatatgattatgctcctgattctggatggcagtcattggcaacttgtatgtataaactttctccatagggaaattaactattttgactctttgggatcagatttctgcgctgcagaatcattgcattgattgtggttttttcacaatactgtacatgattgcatggaatggaaaacatttgcggttagatgataagatcaaagctagcgaaattgttgcatgcagaatgaaactcacacatatgctgatcaaatctaaacaaaatagtgctgatccatgttatgtggttaaaaaactagatgcgaatataaagaaatatggcattaattcccgaaaggtgatcacaagtaagaatttgacgatgctgatgggactaatagatcaagagattgaagagattaatgcagaaaagagaaagcgaagtggacatccagcaggaggacaaccagaactgaaggacgatgacggtcaactaagggcaaactcagtcaaggctcgcgacgctgaattgcgttgtgaaagggctgtaaagctacgacgactatagcactttgaaaccgctgttgctccccccgacagagaaagcagtttgaaactgctgtggctacctatagcttcaaagctagacaaggctaattcgtccttcagtagagctgattgacataaacgtagttgcagctcttgcgtgttctgctttttcgtgttgctcttccgcgttcgagttccatgcctgccacctccatcaatg

SEQ ID NO: 204924 - DNA, 3206 bp, Zea Mays
cttagcgacacaacgatctacaagaataagggagacattcaaatagtaccaactaatgaagaattaggttgatgagccacactaagaagctatggaagagttattaagcatcttctgagaggaataactaggatctctatgtgtcgtgtccaaaaggtgacgggcccgcgagctagggtttccggtcaccgcggatctcggcggcctcctccgccgagctcctcgcagccccgcgacgcaatatcgtcagccgtgccgcctgagtgcccaagcttaacagactccggattatcaaaagttgatgcgatctcaccaccagtgacaagagctagccgttcaatgccctcaaaatcagcatgctcaatcgcgaggatgccagcatcagcaaagagttcttcagggaagttatagattaactgcctgttgacaaaatagttgatcccatgcgctataatcttctgcaccttctctctcattttctgcttttcagcagcttcaatatctgcaaccttaaacattgaatccacccagacacatgccccatagtcttaaatctgtgtccatagcactgtttgcaaccaaaattttggcattctcaattctcttaggttgcccaatgccaattttcttgtcaagaatgaacccttcatccaaaaaggagtccttaagagatcctccaggtttcttcagaatttgaatggcttccaggctatttgaggagatgccgccatcgtcatcgtcatccttactctctggctccaatactgcgagtgctgagcttcctctaatcccttgcaagctctgcaatggggtggtgattgagcgggtttccaaacaaccagaaagcacgtcgaggaagttctaccggtgcagagccaagaaattggatgggtctcaatgtgatttttttccactggcaagcgagctatgctgttttgttaatcaaggatggggttgtcagtggtgaccaatgccttgagttgttaatggtcgcacttaatgatcatggcaaagctgttgaatctctaaccaattccatcagagaaatgaagaaaaagttgtccgacctggagttagtgatggaagagctggataacgtgaaaaagtcgatgaaggcagccatggttgagaaattgaggaaaacaagaaatcgatagctgcattgaaattgatggagaatgagatgcaaatgctgaaagggccaactaaagtgaaacctaggaatatggcactgtgttttctgcttttggcgttgattgggtggtttgtgatgggacagatgaattggggggaggaagcatccaatcgatttatgctgggaggctaatgaactttgggtggacttttgtatagctagatgtaatcagaactggttaggcaccctgggagtggaagctagatgtaagaagttgattgtgctgcgatttgatgctctggaggatgaagatgggctctgatcgaagcaaagttgtgccactaatatttttttcttattgaacttagtagttttctgtatgaacttctgtttatcagatacccagttgaacaagttcagtactctatttatgatattcaatattagcggttgactttaggaaatcagaaattatttggctcatgataatctcacgtgatcacgctgcatacagaaggtgaagcctgtttgttggcggagtgagaaaacttaagactaggggaaaatgaacttgtaaacaagaattcttgacaggaattatagttggattaagattctttttatgtacctcacttcggcaccaccgtgaaaccatagtgtccccatccatgttgtccggagtcgaataattgtatgcattttttaatcgaggacacaattcaataatcttggatgcagaggatgaactaacagaggacaaagctcacacaaccatggatacagacgtcaatccaaattctgcttcaatttgtaaaggctcttcaaattctacttcgttttgtgaaggtggcagtcgtgaaggtggccatgaacaaaaaaatccaaacacttttgtgagagaaagcaggtcaaaaaggagggctctgtataaagcttgcatagatttggcttgtacgaaaagtgaaaatgatacatacaaaaaaatcataggaaacagggctgctttggcagacttatcaagcaaatatctgcgtcacctaatgcctgtaaaagaggactatctgcttgtggaaattggagatgctcagttgactacagcttatttttgacatcaatgcaccgtgctggtgatatgagtaacacattgatgagtgttatcgtcgaatacttcaacagtatttctggggccctctttgacactgtttctagaccctctaccatttctaaatatgtcatctgtcctttcttgttgaagaaagttaaaaagggttgcaactttaaagttaaagatagtttactgaagactcttgaggaaacccagaaaagagatatgattatgctcctgattctggatggcagtcattggcaacttgtatgtataaactttctccatagggaaattaactattttgactctttgggatcagatttctgcgctgcagaatcattgcttgctaatttcatcgaattactgaagatacataaatgcataaaatttgatgttaattctttcgaaaagatcaaagctagcgaaattgttgcatgcagaatgaaactcacacatatgctgatcaaatctaaacaaaatagtgctgatccatgttatgtggttaaaaaactagatgcgaatataaagaaatatggcattaattcccgaaaggtgatcacaagtaagaatttgacgatgctgatgggactaatagatcaagagattgaagagattaatgcagaaaagagaaagcgaagtggacatccagcaggaggacaaccagaactgaaggacgatgacggtcaactaagggcaaactcagtcaaggctcgcgacgctgaattgcgttgtgaaagggctgtaaagctacgacgactatagcactttgaaaccgctgttgctccccccgacagagaaagcagtttgaaactgctgtggctacctatagcttcaaagctagacaaggctaattcgtccttcagtagagctgattgacataaacgtagttgcagctcttgcgtgttctgctttttcgtgttgctcttccgcgttcgagttccatgcctgccacctccatcaatg

SEQ ID NO: 204925 - DNA, 3123 bp, Zea Mays
cttatcgaaaccctcttagcgacacaacgatctacaagaataagggagacattcaaatagtaccaactaatgaagaattaggttgatgagccacactaagaagctatggaagagttattaagcatcttctgagaggaataactaggatctctatgtgtcgtgtccaaaaggtgacgggcccgcgagctagggtttccggtcaccgcggatctcggcggcctcctccgccgagctcctcgcagccccgcgacgcaatatcgtcagccgtgccgcctgagtgcccaagcttaacagactccggattatcaaaagttgatgcgatctcaccaccagtgacaagagctagccgttcaatgccctcaaaatcagcatgctcaatcgcgaggatgccagcatcagcaaagagttcttcagggaagttatagattaactgcctgttgacaaaatagttgatcccatgcgctataatcttctgcaccttctctctcattttctgcttttcagcagcttcaatatctgcaaccttaaacattgaatccacccagacacatgccccatagtcttaaatctgtgtccatagcactgtttgcaaccaaaattttggcattctcaattctcttaggttgcccaatgccaattttcttgtcaagaatgaacccttcatccaaaaaggagtccttaagagatcctccaggtttcttcagaatttgaatggcttccaggctatttgaggagatgccgccatcgtcatcgtcatccttactctctggctccaatactgcgagtgctgagcttcctctaatcccttgcaagctctgcaatggggtggtgattgagcgggtttccaaacaaccagaaagcacgtcgaggaagttctaccggatgggtctcaatgtgatttttttccactggcaagcgagctatgctgttttgttaatcaaggatggggttgtcagtggtgaccaatgccttgagttgttaatggtcgcacttaatgatcatggcaaagctgttgaatctctaaccaattccatcagagaaatgaagaaaaagttgtccgacctggagttagtgatggaagagctggataacgtgaaaaagtcgatgaaggcagccatggttgagaaattgaggaaaacaagaaatcgatagctgcattgaaattgatggagaatgagatgcaaatgctgaaagggccaactaaagtgaaacctaggaatatggcactgtgttttctgcttttggcgttgattgggtggtttgtgatgggacagatgaattggggggaggaagcatccaatcgatttatgctgggaggctaatgaactttgggtggacttttgtatagctagatgtaatcagaactggttaggcaccctgggagtggaagctagatgtaagaagttgattgtgctgcgatttgatgctctggaggatgaagatgggctctgatcgaagcaaagttgtgccactaatatttttttcttattgaacttagtagttttctgtatgaacttctgtttatcagatacccagttgaacaagttcagtactctatttatgatattcaatattagcggttgactttaggaaatcagaaattatttggctcatgataatctcacgtgatcacgctgcatacagaaggtgaagcctgtttgttggcggagtgagaaaacttaagactaggggaaaatgaacttgtaaacaagaattcttgacaggaattatagttggattaagattctttttatgtacctcacttcggcaccaccgtgaaaccatagtgtccccatccatgttgtccggagtcgaataattgtatgcattttttaatcgaggacacaattcaataatcttggatgcagaggatgaactaacagaggacaaagctcacacaaccatggatacagacgtcaatccaaattctgcttcaatttgtaaaggctcttcaaattctacttcgttttgtgaaggtggcagtcgtgaaggtggccatgaacaaaaaaatccaaacacttttgtgagagaaagcaggtcaaaaaggagggctctgtataaagcttgcatagatttggcttgtacgaaaagtgaaaatgatacatacaaaaaaatcataggaaacagggctgctttggcagacttatcaagcaaatatctgcgtcacctaatgcctgtaaaagaggactatctgcttgtggaaattggagatgctcagttgactacagcttatttttgacatcaatgcaccgtgctggtgatatgagtaacacattgatgagtgttatcgtcgaatacttcaacagtatttctggggccctctttgacactgtttctagaccctctaccatttctaaatatgtcatctgtcctttcttgttgaagaaagttaaaaagggttgcaactttaaagttaaagatagtttactgaagactcttgaggaaacccagaaaagagatatgattatgctcctgattctggatggcagtcattggcaacttcttgctaatttcatcgaattactgaagatacataaatgcataaaatttgatgttaattctttcgaaaagatcaaagctagcgaaattgttgcatgcagaatgaaactcacacatatgctgatcaaatctaaacaaaatagtgctgatccatgttatgtggttaaaaaactagatgcgaatataaagaaatatggcattaattcccgaaaggtgatcacaagtaagaatttgacgatgctgatgggactaatagatcaagagattgaagagattaatgcagaaaagagaaagcgaagtggacatccagcaggaggacaaccagaactgaaggacgatgacggtcaactaagggcaaactcagtcaaggctcgcgacgctgaattgcgttgtgaaagggctgtaaagctacgacgactatagcactttgaaaccgctgttgctccccccgacagagaaagcagtttgaaactgctgtggctacctatagcttcaaagctagacaaggctaattcgtccttcagtagagctgattgacataaacgtagttgcagctcttgcgtgttctgctttttcgtgttgctcttccgcgttcgagttccatgcctgccacctccatcaatg

SEQ ID NO: 204926 - DNA, 780 bp, Zea Mays
caagctttgttttgcttataaatgatagcttgttcgagctaatgagctagctcggggtgatcgagttggctcattaacaattcagtttcgttaacaagcctggagggaaaaaggacacatcacccaaaggcacagggaatcgcaccatcgtgggacccgtacagcgcaccgcccagccgccggatctgcgccggcgacgcgcccggacgtcggatctacgccgccgcaggaggggggaggcggcgctgtggccgttctctgcccgtgagcgcccggatccgtcccgccgcaaggattatggatccgaaagagaagccaaatgtatcgagcagtccaccaacaccacggctggactgcataaaatgctttgatatgctctggttctgttactcaccattccaccagatgcagaattattaccggtatggggagttcgacacctgcttcggcaagtggggcgatcttatgggctgcctcgctctcaagacaaagcggaaggcagaggtggaggagatcctcatcgcgcgggagaaggccaaaccacatatctggacctaccggacggtcgatgaggcatcggagaattggtggcggatgtacaagcatgctgtgatgatgtcaccactgccaggttctgctcagcttcctcgggtccctaagccgacgagtgagtgtgctgcgtgccccagcccagatgggtcgagcgcgtgggcgagcgcggaggggggagaggcgaggcggccggagccgagcgtgagagaggtggaagtcccgcggcct

SEQ ID NO: 204927 - DNA, 2001 bp, Zea Mays
gatcgagttggctcattaacaattcagtttcgttaacaagcctggagggaaaaaggacacatcacccaaaggcacagggaatcgcaccatcgtgggacccgtacagcgcaccgcccagccgccggatctgcgccggcgacgcgcccggacgtcggatctacgccgccgcaggaggggggaggcggcgctgtggccgttctctgcccgtgagcgcccggatccgtcccgccggtcataattccagaccgctggcgtcgtcgggtacttaggttccgacatgttcattcatgaagcgtgttttggctttctgattttttggtgttattcaattgcaaatacgtgggcttcggatctcgtataatttcttatcaaacatgttggattactcgtggagtgtttctcacttgtgtgaaaccgtgtgagctatttgaacaattcgatccggtcagcaaagggaaaacttttttttaaaaaaatatctgtgtggggggatcgatttgttcctagcatcctgtggacttaaatcagttgaactttggagtccttgtttagcttgtcaccgtcaattaattctacttcatttctggccgcatgcaaaatctgcctaactaatcgtaaacatttctggtggcatgcaaaatccgcactgatcccaatcactggattgtattacagacctatgtgattctgatgatatttggtcacctagtaccaaaacaggcggaaatggttgttttcctcgagaagctaattattattttttacattttaggcttgttcatttcgccgttaatccatgtggattgggtggtattgagtcggtttaaatccataataggttaaaattcatctcaatccatcccaatacactctaatccacatggaattggaataaccgaacaaggctttagtgagaataatacacgtgtatgcttacatgtgtgttgttataaatcctctttattgattctactctctgtccgagattgagatctaagctttagtgacatttctagttataatggtcttatcaccagtggttttgaaatgtagtcagaagcttgcaacactcaaatataatctactacttattgtggtcaacagttgttaataggtttatcgccttataggggatagacttgtgaagccatgctacctcactctggcaaaggactgtaacttagtcctttgcaatggaatgagcaaagaaaagatccaaagaatattgcgtttatggaagcaacttgatagttctgttacatgctaggctgctagctaatccatttgtaccagacaacagacatctgtaatcgctccatatttttttgtatttcctagatttgtctagaatcttacatttatcattgcatgaacgttcattttgtgttatatagtattcatttatcatatatatcaatcaaaatggtcctgtgatatcgagcttcagttgatgcagaggtggtgaaaacatcttgtcttctccaaagactgctgactgcaagttgcaaaacaaggattatggatccgaaagagaagccaaatgtatcgagcagtccaccaacaccacggctggactgcataaaatgctttgatatgctctggttctgttactcaccattccaccagatgcagaattattaccggtatggggagttcgacacctgcttcggcaagtggggcgatcttatgggctgcctcgctctcaagacaaagcggaaggcagaggtggaggagatcctcatcgcgcgggagaaggccaaaccacatatctggacctaccggacggtcgatgaggcatcggagaattggtggcggatgtacaagcatgctgtgatgatgtcaccactgccaggttctgctcagcttcctcgggtccctaagccgacgagtgagtgtgctgcgtgccccagcccagatgggtcgagcgcgtgggcgagcgcggaggggggagaggcgaggcggccggagccgagcgtgagagaggtggaagtcccgcggcct

SEQ ID NO: 204928 - DNA, 1424 bp, Zea Mays
ctatgatgtccatgacagttgagaaattcagagaatttctgttgtcaaaggactttgttgggatccacacgccaaaattgatttctggatccagtgaaggtggtgcagctgtattcaagcttctgtacaatggtcaacctgcttgcttggcacaatctcctcagttgcacaagcagatggctctatgtggtggttttgaacgagtatttgaggttggccctgtgtttagagcagaaaattcaaacacacacaggcatctctgtgagtttgttggtcttgatgctgaaatggagattaaggagcattattttgaggtctgtgacattatagatggcttatttgtatcaatatttaaacacttgactgaaaactgcaataaagaactcgagacgataaacaggcagtatccatttgaacctctgaagtatctagacaaaacattgaagctcacttatgaagaaggagttcaaatgttgaaggaagccggaacagaaattgagcctatgggtgacctcaatactgaagctgagaaaaaacttggtcggcttgtcagggaaaagtatgacacagattttttcattatgtatcgatatcctttggctgtgcgtcccttctacactatgccttgttatgacaacccagcttacagcaattcttttgatgtctttattcgaggcgaggagataatatctggagcgcaaaggatacacactcctgagctgttgaccaagcgtgcaacagagtgtggaatcgatgtcagcactatctcgacctacattgaagtcttcagctatggcgcgcctccgcatggtggtttcggggtgggtttggagagggtggtgatgctgttctgcgccctaaacaacatcaggaagacctcgatgttccctcgcgacccgcagaggcttgtgccgtaatttactgagtccaatgccctgagtttgcagcagagcgtactggttgttttgatgttctttgagcatcgaacatcgctaacttgcaatctcagctactgaagccccggttaccgtggttcagagttcctgttaaattcacaaagctacttgtatctattagattgctgaaaccagcaagtacgatcctttttgggatttgatctggtctaattgttgttaagtggaggtattgctctcagtttttttgtgctctgtttgtcggcatatgccaagagctagggcttcttaagttctaagtttttagacgagtggattccttttttttaagagccggcaaaagttctgccctgcacctgttaaaaatagatattaccctgttccaattctaaataatatgacgtgtcgccttctagatatttatattatgtagatgtacaatatgtctagatacagatagtaaagtaatgtatgtctttataaagagagaagaattgtgctgcgaatgaa

SEQ ID NO: 204929 - DNA, 2158 bp, Zea Mays
actttaacttaccctattacctttctgctcgtggtgagtgctgacaccacctcacgcacacaagccgccggcggcgaccagaccgaccacctcgcgcactagccttgctcgcttctcgtcgccggctcgttgccggctcgtcggcacgatgtcgtcggagcctccacccgccccttctgccgccgcagcagagggactggctgctgacctttccgccgccaccctcagcaagaagcagcagaagaaggacgccaggaaggcggagaaggctgagaaggcggcgcagcgccagcaacagcagcagccggccgacgccgaggacccatttgcggccaactacggctatccgcccggtcagcaagaagatggctttcgtcgtgctgcgccagagcatgagcaccgtgcagtgcgtgctcgttgccagcgccgacgccggcgtcagcacgcaaatggtgcgcttcgccaccgccttaagcaaggagtccatcgtcgacgttgagggcgtcgtgtccctccccaaggagcccctcaaggccaccacgcagcaagttgagattcaagtcaggaagatctattgcatcaatagggctatcccaacccttccaattaaccttgaagatgcagctcggagtgaggcagattttgagaaggctgaactggctggagaaaagcttgttcgtgttggtcaagatacccgcttgaactacagagctattgatctacgaacaccctcgaatcaagccatattccggatccagtgtcaagttgaaaacaaattcagagaatttctgttgtcaaaggactttgttgggatccacacgccaaaattgatttctggatccagtgaaggtggtgcagctgtattcaagcttctgtacaatggtcaacctgcttgcttggcacaatctcctcagttgcacaagcagatggctctatgtggtggttttgaacgagtatttgaggttggccctgtgtttagagcagaaaattcaaacacacacaggcatctctgtgagtttgttggtcttgatgctgaaatggagattaaggagcattattttgagatggcttatttgtatcaatatttaaacacttgactgaaaactgcaataaagaactcgagacgataaacaggcagtatccatttgaacctctgaagtatctagacaaaacattgaagctcacttatgaagaaggagttcaaatgttgaaggaagccggaacagaaattgagcctatgggtgacctcaatactgaagctgagaaaaaacttggtcggcttgtcagggaaaagtatgacacagattttttcattatgtatcgatatcctttggctgtgcgtcccttctacactatgccttgttatgacaacccagcttacagcaattcttttgatgtctttattcgaggcgaggagataatatctggagcgcaaaggatacacactcctgagctgttgaccaagcgtgcaacagagtgtggaatcgatgtcagcactatctcgacctacattgaagtcttcagctatggcgcgcctccgcatggtggtttcggggtgggtttggagagggtggtgatgctgttctgcgccctaaacaacatcaggaagacctcgatgttccctcgcgacccgcagaggcttgtgccgtaatttactgagtccaatgccctgagtttgcagcagagcgtactggttgttttgatgttctttgagcatcgaacatcgctaacttgcaatctcagctactgaagccccggttaccgtggttcagagttcctgttaaattcacaaagctacttgtatctattagattgctgaaaccagcaagtacgatcctttttgggatttgatctggtctaattgttgttaagtggaggtattgctctcagtttttttgtgctctgtttgtcggcatatgccaagagctagggcttcttaagttctaagtttttagacgagtggattccttttttttaagagccggcaaaagttctgccctgcacctgttaaaaatagatattaccctgttccaattctaaataatatgacgtgtcgccttctagatatttatattatgtagatgtacaatatgtctagatacagatagtaaagtaatgtatgtctttataaagagagaagaattgtgctgcgaatgaa

SEQ ID NO: 204930 - DNA, 1729 bp, Zea Mays
gcaaatcattgtagaactttacaccccagaacattgccgtatcatctgaaacgggacagacaaactacatcaggagaggttgggaggaataggaacagactgaataatatgatgctgctgcacctcaactccagaaagtaaaacgtggaagttcagtatatgggcaacttacttagagcttgggttaccctgcgcccatctgcagagaaaaacttcgttggcctgccaacaatagcacgcccacatgtgtacccagggcctggagtcttaagagtgaaattcttcggcaccttaacagttttattggtagttccagcaagaccaacactgatctggaaggaggaagcagcatttgctgggtcctggttaaagcaatggggggtgttgcccttgaactttgagcagtcaccctgttcagtggtctgagccccaaccattgaccatataacctccttttttgcccatgtccacccaagctgccatccaggtgccccgatgtgccgaaattgttgataattgaacattgtgacaacagcctgcagcaggtcaaactgggctattcaatagaataaaccagggcctaccaagctggagatgaaagagatacagctgttagagtgggcaattctacttacgacatatccgtcaggagtccactgcatgatatcccattttatagtgatgttgccgtttggatccagcgaatcgtaggcctctgcagagagcaatcacagggttgacatcaaacaaagatcccaattatagaaagaagatggataatgaattcacgcaatatatgaagtctatgttacgttcgaggtccgctttcgaaggtccacacactgagtctggcaatggatcccttaatggtgaactacagttaagtaagatcttgaattgcttgttcactcctgaacagatctactaaataccaaggagctccgtatggagcagctcgcggcaggttgagcagacagtggcactagtttttttccccgacaggcgacagaggcaatcctcatttctattatttgcataacagaaatacagctgagttttagaagacagtggcactcgttaataagcctgagatggcatctccatctccatgtatagctgcaggaagctaagccagtaagcctacgtaattggattcgtagctgaggcaagctcgaaaggtcgatctgaattggactgcagtaggaccaaaactagaaggcaccgactctgcactggagccaccgatactgacagtaccaatcaaacggggaccgcatttgtcagcgcgcaacggaagcacccggagcggaagcaccatcgcagctctccgaactccgttgaatcagaagggcgatgggggcgacggatctaaccagctcagtaatccgcgcgcgagcgggagaggcgtagagagacggacgaggagaagcgaagaagccgaagggccgaacctgtggtggtcggtgcggagaggagcagcgcggccgcgagcagcacggcggcaaagcacgcgatggatctgccgcccgccgccattcttccttcccacccgccgccgcctaaccgacacaaccggtctcccaccaacagatagatacagacagagccgcgcccgcccgcctgtcgcccgtccgtccgtccgtctacccgccgatcttgctccggactgcggcggttgcggccgccgggtgctgggcgccggggaatgaggggcagtggtgaggagggc

SEQ ID NO: 204931 - DNA, 1439 bp, Zea Mays
aaaaagggtaatggatcaactcatatcaactgaccgagcgcttgtcaaaaaccaaacagaacaaggacccaggcaaaatccactgacggcaagagataggagggagatctcgtgatttccggtggcaagtttcggttttgatcccaaccccaggttcctcaccccgaggagaaaaggatccagattttcttcctctctagtaagttgcagttcgcggtggcgccgccccccgccgctgcctccgtgttgcgcggttccgatttggagtgagggggagcgcgtgccgtgggattcccgttcggatctacggagtgggcagctttcctgctccaattcggtcggccagcaacgaaggcccttgaatcttgttgatgcgcggccagatgcgggaagcgtactgggagaaggtttcttggaatcttcgtccgggctccgtggagtgaggtccctcgcccgccgggatcgccccgtcgtcctatgggctgcgtcagttccaagcaattccacggcggggacgaccatggggacggcaagccgcgccggcggccctcgagcaactcgctgaagcgcctggttagttacagttccagcaagaggcatgaggagttggaggaggaggatgaggtgggggcggctgtggcggccacgtcctcgagcggcggacgccgcgctgggaatgacgccagcacggcgaggctgatccggaagccgccagcactggtggtcgaggctgtgccggcattgtcggaggaggctgccactttggcggttggtgtagttgatgcagaaagggcggttgctgcagcgactgggaatcggaagcggcctcctgcagatgtacatatcaatggcgcggcagagcaaggactgagtagcgttggtgttagaacggagggggaggccaaaccaaggatcagggacgtgcccaatggcgtccagggggagcatgtggtggcagggtggccgagatggctcacagaggtggcggcagaggcggttcgtgggtggcaacctcggagggctgagtctttcgagaagctggacaagataggacaaggtacatatagcagcgtttataaagcacgtgatcttgagaatggaaaaattgtcgctctgaagaaagttcggtttgccaatatggaccctgagagtgtccgatttatggcaagggaaatccacatcttaagaaggcttgatcatccaaatgttatcaaacttgaaggtttggtgacgtcacgcatgtcaagcagcttgtatcttgtatttgaatacatggagcacgaccttgcaggacttgcagctacacctggcttaaaattctcagaacctcaggtcaagtgttacatgcaacagctactttctggacttgatcattgtcacaaccgtggtgttttgcatcgggatataaaggtaacattgtggtaccggcctcctgagct

SEQ ID NO: 204932 - DNA, 1753 bp, Zea Mays
gtggaccttcgaaagcggacctcgaacaggcctacgattcgctggatccaaacggcaacatcactataaaatgggatatcatgcagtggactcctgacggatatgtcgctgttgtcacaatgttcaattatcaacaatttcggcacatcggggcacctggatggcagcttgggtggacatgggcaaaaaaggaggttatatggtcaatggttggggctcagaccactgaacagggtgactgctcaaagttcaagggcaacaccccccattgctgcaagaaagatccaacaattgttgatttacttccaggcactccatacaacatgcaaattgccaattgctgcaaggcaggagttataaatacctttaaccaggacccagcaaatgctgcttcctccttccagatcagtgttggtcttgctggaactaccaataaaactgttaaggtgccgaagaatttcactcttaagactccaggccctgggtacacatgtgggcgtgctattgttggcaggccaacgaagtttttctctgcagatgggcgcagggtaacccaagctctaatgacatggaatgtgacctgcacatattcccaatttcttgctcagaagactccatcctgctgtgtatctctctcatcattttataatgacacaattgtgaactgcccgacatgctcatgtggctgccagaacccaagtgggtcaaactgtgtgaacgaggattcacctaatctacaagccgcaattgatggtcctggtaaatggactggccagcctcttgtacaatgcacttctcacatgtgcccaataagaatccactggcatgtgaagctcaactacaaggaatactggagagtgaaaatcactatcacgaacttcaacttccgcatgaattacacacagtggaacttagttgctcagcatccaaactttgataatatcactcagttgttcagcttcaactacaaaccacttactccatatgggggtggcataaatgatacggcaatgttctggggtgtaaagttctacaatgatttgctgatgcaagccggcaaacttgggaatgtgcaatcagaactgcttctccgcaaggactcacggactttcacattcgaaaagggatgggccttcccacgccgagtgtacttcaatggtgataattgtgtcatgccatctcctgaaaattatccatggctgccgaatgcaagccctctaacaaaacaagcattgacactcccactcttgatattctgggttgccttggctgttctgttggcttatgcatgatgagtgggatcaagatgtttagcaagcttcaagttgatgtcggattccatgaggtgcactgcaacgggatatttattcattcaattccatagcggcacaggagagatgaggcgaagccaagaaaaagtggatgtgtgtgtgtgtgtgtttgtaagttaaagggccaaaatgtatttcttgtctggtagtatatagcagctctacaacactttggtgaacttagttactgcaaattaggcaattacagttgcaccttttgtattttatagcaaacccagacttctattggattctatgactgcccctcttgtagtaaacgcaaggcttcactggtactcctgtttaaagattggtcaaatagaagagacgacggtgattgtctgattgagataactaagttctggtgtcttgatccatttgaccattctgctgcaaagattattgagctaaattgctaataa

SEQ ID NO: 204933 - DNA, 2300 bp, Zea Mays
ctttttttcgagcccatgaaaaacatcattactttattcaactacccaagtagagggggctcttgtagaggcgcccatcccacagtccgacacactccggtaaagatcgcccacccaatgccatcgccgccgccgtccacggcagcggcggcggcgctgcagctggagcccctcctcccgcacttgtccacgctttcccattacaagcagttccacgcgcgcctccatgccttgggcacgctccattcctacccttccctccgcgcgcgcttcctcgaccgcctagcgctcttgccgcacgccgacgcgcttccgcacgcgctactcctcctccgctccctcccgtcccccgcaaccaacgacttcaacgccgccctgcgcggcctagccgcctccccgcaccctgcgcgctctctcctcctccttgccggccgcctcctccctgctcccgccccgccacggcctcgcctcgatgcgctctccctctccttcgcgctgaaggccacagcccgatgctccgacgcgttcgccacactccagctccacgcgaccctttttcgcctcggtgtggctgctgatgtccgcctgatgaccacgctgctggactcctatgccaagtgcggcgacgtcgcgtccgcacggaaggtgtttgacgaaatgcccgtgcgcgacgtggccacatggaacgcgctgctcgcagggctggcgcaggggacggagccgaatctcgctctattgctattccgcaggctggcagggagctttcgggagttgccgccaagggaggagccaaatgcggtgactgttgtcgctgcactttctgcatgtgcacaacttggaaccttaaaggatggattggctgtgcatgagtttgctcgtacaataggagctgtggacaatgtttgtgtcggcaacgcacttattgacatgtactccaagtgtggctcactgagccgggctcttgaagtgttccattccatcaagctagaagaccgaacacttgtgtcctacaatgctacaattcaggcgctttccatccatgggcatggggaagatgcactgaagctgtttgatgaaatgccagctcgtattgaaccggacgaaatcacttaccttgctgtgatgggtgggtgcaaccatgctgggcttgttgatgatgggcgcagggtttttgattccatgcgggttcctcccaatatgaagcactacgggaccattgtggacctccttggccgtgcaggccgccttgctgaggcatatgacatgattatgtctatgccatttccagcggatattgtcctctggcagacattgctaggtgctgccaagatgcatggtaatgtggatctagcggagttggctgccacaaagcttgctgatcttggctctaacgttgatggtgactatgtgctcctgtccaatgtatatgcatccaagtcccgatgggtggatgttggtcgagtccgtgacaccatgcgaagtaatgatgtgaaaaaagtccctggcttcagctacacagaaatagatggcgtaatgcataagttcataaatggtgacaaagaacacatgaggtggagggaaatatatagagcattagatgaaattgggtcaagaatctgtgctctggggtatgagccagaaacgagcaatgtgctacatgacattggggaggaggagaagcagtatgctttaagctaccacagcgagaagctggctattgcatttgggttaatttctacaccacctggggagactattcgagtgatcaaaaacctccgaacatgtggagactgtcatgtggtggcaaaacttatctctaaagcctataatcgggtgatcattattcgggacagggcaagattccaccgtttcgaagatggacattgttcctgcagagattactggtaaaaatgctggcacactggtcacttgcagccctactaaacacaacatgtgctccttgaggagagttcaagtgatgtgactgcatttctagtcaaaagtacggatgaaagtggatgacatacatactcttgaccaccatgttactgtccagagggctcatcaagttaaaaagttcttagaagatgcaaagttatcttacttgcatgaactcctgggttcgcataacaattcgagaagtgccttggaagcagaaccaaaaaattgtgataactgtgcaagctttgaattgaaatcgctccatgactgttatcattcaatattttcacaatctacaaggattattgatgcatctgtcttggtattgtcataaagttctataaaaatttcattgtcgt

SEQ ID NO: 204934 - DNA, 1395 bp, Zea Mays
gcgagcacgagcacgggcgggcgccaccattacttcccggtccatccatccaactgcactgcactgcacccaccttttcaatccaatcctgccgcattgcataattcgcatcgaagatcgatgtgaatccgtggaagggagggcggaggagaaggaagaagaggggtcgaggccgaatccgccggtgagaaggggagcgatggcgaggctggcggtggccgcgagggcgttctccgctgcggcctccggcggcggcgtgtccttggtgcagggggcgtcccgggggatcggcctcgagttcctgctgcgcagaagcgatggaggccgcgtcgtcgctacgtgccgcacgccgggttccgcggccgagctccagaagctcagggaggagcacgcgcccgggcgcctcaccgtgctgccgctcgacgtcaccgacgagagcaccatagaggcagctgcggcctcaatcacggagacccacggttctcttgaccttctgatcaactccgccggcatcctctcgatcccgaacgtgatacagccagagactacgctaagcaaggttcagaagtcgtccctgatgctggcatacgaggtgaacgcagtcggccctatcctagtgatcaagcacatgtggcctctgctgaagatcggaggccgctccgagactaggagagggttcgcgcttgttgcaaacatgagcgctcgagtcagctccataggagacaacgctctgggtggctggcatgcgtacagagcttctaaaacagcgctgaatcagtgtgagtgttccatcgtcctgttccaagtttttaacgatctgtgtgcattgatctctcttgaataatctggtgcttgtgcgctgtcaaaatttatctgccatgcccatgctgaatcgtgcagtgaccaagacagtgtcggtggagttcggcaggaaggacaacatcgcctgcgtcctgctgcatcctggaaccgtggacaccgacctctcgaggccgtttcagaggaatgtccccgagggtaaactcttcacgagggagttctctgtgcagaggcttctctccgtcatcgacagcgtcaagaaaggcgacaacggcaagttcttcgcgtgggatggccaagaaatcccttggtgaacggtcatcgtaactcgcttgagtctatagcacagcacacagcagtcaacaacgcccctggttttaatccaacgttgtttttttttcaacaagccaagcgaacagatgcattatttctagctaaagggtcctctttttgtgttatcaccgacctaaagttcaagatgttttttttcttcttctaagtgttgaaatattagacatttttaaatcaaattctgaatataaatcatgactaaatcaaaagaactgaagtataaag

SEQ ID NO: 204935 - DNA, 1284 bp, Zea Mays
gcgaatccccgaggcgagcacgagcacgggcgggcgccaccattacttcccggtccatccatccaactgcactgcactgcacccaccttttcaatccaatcctgccgcattgcataattcgcatcgaagatcgatgtgaatccgtggaagggagggcggaggagaaggaagaagaggggtcgaggccgaatccgccggtgagaaggggagcgatggcgaggctggcggtggccgcgagggcgttctccgctgcggcctccggcggcggcgtgtccttggtgcagggggcgtcccgggggatcggcctcgagttcgtgcggcagctgctgcgcagaagcgatggaggccgcgtcgtcgctacgtgccgcacgccgggttccgcggccgagctccagaagctcagggaggagcacgcgcccgggcgcctcaccgtgctgccgctcgacgtcaccgacgagagcaccatagaggcagctgcggcctcaatcacggagacccacggttctcttgaccttctgatcaactccgccggcatcctctcgatcccgaacgtgatacagccagagactacgctaagcaaggttcagaagtcgtccctgatgctggcatacgaggtgaacgcagtcggccctatcctagtgatcaagcacatgtggcctctgctgaagatcggaggccgctccgagactaggagagggttcgcgcttgttgcaaacatgagcgctcgagtcagctccataggagacaacgctctgggtggctggcatgcgtacagagcttctaaaacagcgctgaatcagttgtcggtggagttcggcaggaaggacaacatcgcctgcgtcctgctgcatcctggaaccgtggacaccgacctctcgaggccgtttcagaggaatgtccccgagggtaaactcttcacgagggagttctctgtgcagaggcttctctccgtcatcgacagcgtcaagaaaggcgacaacggcaagttcttcgcgtgggatggccaagaaatcccttggtgaacggtcatcgtaactcgcttgagtctatagcacagcacacagcagtcaacaacgcccctggttttaatccaacgttgtttttttttcaacaagccaagcgaacagatgcattatttctagctaaagggtcctctttttgtgttatcaccgacctaaagttcaagatgttttttttcttcttctaagtgttgaaatattagacatttttaaatcaaattctgaatataaatcatgactaaatcaaaagaactgaagtataaag

SEQ ID NO: 204936 - DNA, 1332 bp, Zea Mays
tctttgtgcactcgcgaacacaagcagccagcaagctccagagatagatagctagacgtgtcgaaatggtcatctcattttcggccgagtgggttaccagacgaacagcaggaaatacctgcatctggcagaatcagtgggcagtgtgggcacgacacatgtttgggttgaatctctggcgaaatgctgcggcgctgcaggcgctcacatgaacgcgatggtgttccaggtgtatgcggtcctgtcgcggtcgctgggccccgccacctccgagccgccgtcctacgcgagcgtggcgctggccggcgtcagcacgggggcgctgcagacgctgatcctgtccccggtggagctggtcaagatccggctgcagctggaggcggcgtcggggcacggccccgtggagatggtccgtgaaatcctccggcgcgagggcctgcgcggcgtgtaccgcgggctggcggtgaccgcgctccgcgacgcgccggcgcacggcgtctacttctggacgtacgagcgcgcccgggagcgcctgcacccggggtgccgccgcagcagcagcagccaggaccaagacggggacgagggcctgggcaccatgctcgtggccggcggcctggccggggtcgccagctgggtgtgctgctacccgctggacgtggtcaagtcgcggctccaggcgcagggcgcggcgtcggcgtcggcgcccaggtaccgcggcgtcgtcgactgcttccagaggagcgtccgggaggaaggcctccccgtgctgtggcgcggcctcggcaccgccgtcgcccgcgcgttcgtcgtcaacggcgccatcttctccgcctacgagcttgccctgcgcttcattgccagcggcggcggccccaggctggtcatggaggacaagtgagtcagactggaccgtgttgtacataggctagtataagtatccattccagtggttggtggagagtatccatgccactgccagcgcagtgagctgagattcgtggactggagtagcgtaccgtagctgcaagcttcatacaaatcgaagcatgcgtcttgatgatggcgatcgattcaccctggtaatttggggaaatacactgtgcagtgcattgtgcattacattggtgtgctgctattccatatagtatagtactctgcatgaacatcagtgatcaatcaactgaccaattgacattacagtatgtatggataaaccattcatggaaaacatcagaattctgctagttagttgcttgctctcagagtaagcaagaggctgtggttagtcattaagttttttctcttttagaaaaaaaatcagaaaaaaaa

SEQ ID NO: 204937 - DNA, 1190 bp, Zea Mays
aaatctccggcccatgaatttcgtcacgcgagactctagtcccccgcacgggtgacagactgacaggtccgtccgcaaatctgcaacgttgcctcgtcacctctatcctccggtctctcaccgcctaacacggccgccatggccgccgcctccacctcccttccccttggcttctcctctcaccaccgcccaactcccagaatccggccgcagccccagtcccagtcgcaaccactgaaggcaaaaccccttaacccccttcgcttcagcctagccctcaccccggcgaccgcgaagccccgcctcgctgcgatgcccgacgatgtcgctgtcgccaacttcgtggagaaggactggtcgttcctcgagtccgcgggcgcaaacctccagcgcgctctcgcgtcgggggcgctctcgccggcgtcgcgggtgttggcattgacgcccacggcgtccttcgtgaggtcgctcctcgcgtcctcgccctgcgagctactggtggccgcgcatgagtcgatgtacgtgctggcaggggtcaaggaggcgcacgacgaggtgaggtgcttccacctcgagggtgggggcggcggcagaggcggcggcgtggtggaggccgtgccagagaggttcgacgacttcgatgttgtgttcgtgtgctacttccctggaatgggagtctccgcgggggcgctcctcaaatcgctggccaagaggtgctcaaaaggattaaaactatgccaacaccaggagcatatctattagaagtgaatggtggcatgctatggtgaatcggtcacaaatacagctggtgcaagagttgtcatgttcttagatcaaggcagacagaattttgagcaacaacggagagagcatcctgatgttgtaacttcggatttgcccagtatagccttcctggagaaggctgcatctgggaacaagtatgaaataacagagttcgttgacgagcctagcttttaccttgctgttttgcagtttcaaggatgatttgttccttttttgcaatatttgtgaagcaaattgtgactgtctgtaaatttgcaatatttgtgaagcaaattgtgactgtctgtaaattctgatggacgtagtttgtgggtggcttatgtcgtactagcctgtttggtttgctgtctaatttatcacactttaactaattttttgtgtctaag

SEQ ID NO: 204938 - DNA, 1003 bp, Zea Mays
ctagtcccccgcacgggtgacagactgacaggtccgtccgcaaatctgcaacgttgcctcgtcacctctatcctccggtctctcaccgcctaacacggccgccatggccgccgcctccacctcccttccccttggcttctcctctcaccaccgcccaactcccagaatccggccgcagccccagtcccagtcgcaaccactgaaggcaaaaccccttaacccccttcgcttcagcctagccctcaccccggcgaccgcgaagccccgcctcgctgcgatgcccgacgatgtcgctgtcgccaacttcgtggagaaggactggtcgttcctcgagtccgcgggcgcaaacctccagcgcgctctcgcgtcgggggcgctctcgccggcgtcgcgggtgttggcattgacgcccacggcgtccttcgtgaggggtcaaggaggcgcacgacgaggtgaggtgcttccacctcgagggtgggggcggcggcagaggcggcggcgtggtggaggccgtgccagagaggttcgacgacttcgatgttgtgttcgtgtgctacttccctggaatgggagtctccgcgggggcgctcctcaaatcgctggccaagaggtgctcaaaaggtgcaagagttgtcatgttcttagatcaaggcagacagaattttgagcaacaacggagagagcatcctgatgttgtaacttcggatttgcccagtatagccttcctggagaaggctgcatctgggaacaagtatgaaataacagagttcgttgacgagcctagcttttaccttgctgttttgcagtttcaaggatgatttgttccttttttgcaatatttgtgaagcaaattgtgactgtctgtaaatttgcaatatttgtgaagcaaattgtgactgtctgtaaattctgatggacgtagtttgtgggtggcttatgtcgtactagcctgtttggtttgctgtctaatttatcacactttaactaattttttgtgtctaag

SEQ ID NO: 204939 - DNA, 425 bp, Zea Mays
ctaaatcatttgagatggcaaattggtggggtttagagttgaggtgcaagagttgtcatgttcttagatcaaggcagacagaattttgagcaacaacggagagagcatcctgatgttgtaacttcggatttgcccagtatagccttcctggagaaggctgcatctgggaacaagtatgaaataacagagttcgttgacgagcctagcttttaccttgctgttttgcagtttcaaggatgatttgttccttttttgcaatatttgtgaagcaaattgtgactgtctgtaaatttgcaatatttgtgaagcaaattgtgactgtctgtaaattctgatggacgtagtttgtgggtggcttatgtcgtactagcctgtttggtttgctgtctaatttatcacactttaactaattttttgtgtctaag

SEQ ID NO: 204940 - DNA, 424 bp, Zea Mays
gtggcgtgccaatggtattgaactcaccgccgaatagaacaggtgcaagagttgtcatgttcttagatcaaggcagacagaattttgagcaacaacggagagagcatcctgatgttgtaacttcggatttgcccagtatagccttcctggagaaggctgcatctgggaacaagtatgaaataacagagttcgttgacgagcctagcttttaccttgctgttttgcagtttcaaggatgatttgttccttttttgcaatatttgtgaagcaaattgtgactgtctgtaaatttgcaatatttgtgaagcaaattgtgactgtctgtaaattctgatggacgtagtttgtgggtggcttatgtcgtactagcctgtttggtttgctgtctaatttatcacactttaactaattttttgtgtctaag

SEQ ID NO: 204941 - DNA, 3398 bp, Zea Mays
gccgcctgtctcagtcgcggccgtcccccggcttcttggactttgtcgccgcacccgcacggcgctacgcaacaacaaaagcaggtccgctcgtcccgtctcgtgaccctcccgcggctcgtctccctctcacggtctctcacctcacaacctcacggtcctcacctcactccacctcgttcgccgcctcgctgccgcgtcgggccagtgcgtgcgtgggggcgggcgtgagtgactggctctcctcggcgcgcggacccaggggcggcggcgatggggaagaatatgcgcatcaagacggcgcccaaggcgaaccgtgtccccctcctcggcgacggggagacgtcaagggcgctctcggacctggaagagggcagcgacgtccagccagcgaacgtcggcttctgtcgggtcatcaaacttgcgaaacatgacgccggaaagctggtcctcgccacagcggctctgctcgtcgcctccctcagtaaccttctcgttcccaaatatggtggcaagataattgacattgtgtcaagagatgttcggcgcccagaagataaggcgcaagccctggaggatgtgaagggcacaattttgtacattgtgacaatcgtcttagtcggttcagtttgcacggctcttcgggcatggttattcaattctgctagtgagagagtagtcgctcgactaaggaaagacttgttcagccatctcataaaccaggaaatagcgttttttgatgtgactagaacaggagagctcttaagcaggctttctgaagatacacaaataataaagaatgctgctacaaccaacctatcagaggcactgcgcaatgttactactacagctattggtcttggtttcatgttttcaacttcatggaagttaacattgctggcacttgtaattgtcccggttatatcagttgctgtgcgtagatttggacgttttcttcgtgagctttcacatcaaacacaagctgctgctgctgtagcttcatccatagctgaggaatcttttggtgccatccgcacagtaagatcctttgctcaggaatatcatgagatttcacgctatggtgaaaaagtagaggagacacttaaacttggtctcaaacaagctaaagttgttggcttgttttctggagggcttaacgctgcatcaaccatgtctgtggttattgttgttatttatggcgccaacttaaccatcaatggttacatgacaactggctctcttacatcattcatcttatacagccttacagttggttcgtcagtatctgccttgtcaggactatacacaactgtaatgaaagcctctggtgcaagccgtagggtttttcaacttttggaccgtgtttcgtcaatgacaaactctggggacaaatgtccaataaatgaaaaggatggggaagttgagcttgatgatgtctggtttgcatatccttctcgcccatctcatatgattcttaagggaataactctgaagctagcaccaggttcaaaggttgcacttgttgggccaagtggtggtggtaaaaccacaatagcaaatttgattgagcggttttatgaccctctaaagggaaggatcttgcttaatggagtaccgttggtagaaatttcacatcaatatcttcacagcaaggtaagcattgtcagccaggagcctacgctcttcaactgcaccatcgaagagaatattgcttatggactagagggcacaacgaactttgctgacgttgagagtgcagctaaaatggcgaatgcacacaacttcatatgcggctttcccgaccaatataagactgtcgtcggcgagcgggggatcaggttatccggcgggcagaagcagaggatcgccattgcgagagctttgcttatgaacccacgagtgcttctcctggacgaagccaccagtgccctggatgctgaaagcgaatatcttgtacaggatgcaatggactccttgatgaaagggaggactgtccttgtgatagcccaccggctctcgaccgtcaagagcgccgacaccgtcgccgtcatctccgacggcctaatcgtggagagcggcacgcacgacgaactcctggaccgcgacggcatatacacggccttggtgaagaggcagctgcaggggccgaagtttgaggccaccagcagcatcagcgaggcctccgaaattgaagcggaacccagcagtaatgggcaatagcggccccgattattaggaagaccacagttgatttgaatccacacaagtgtatgtaaccctgatgttgacgtatgccactgcgaatcacgcgaaaccattggatatcacatgatgctacggttgttgtaggagtaatttcccacttggttaatccaacacatatgaaaaactcaaacatgtcttttcactgggaaagtccttaaggcctccgaagaaaaagcttctcatcttagatcttaatggtttacttgtggatatcaacgaagactaccacaacgctcacatggctgatgccaaggttcgaagaaaattagtattccgaaggccttactgcgatgattttctcaacttttgtgctctgaattttgagctaggcatatggtcctcaagaaaaaaagaaaatgttgattcggttgttaatattgttatgagtgaattcaaaccacacctactgttttgttgggacatgtctaaatgcacattcaccggacataaaacactggagaataagcacaagccattagtgctgaaggaattgagaaaactatggaacgtggaagaacaagatcttccatgggaagtgggggactattcaccttcgaatacattactagtggatgattccccttacaaagctctgcgcaatcctccgcatactgccatttttcctcactcctacagttacttaaactggaatgacgattcgctgggtcccaatggagaccttcgtgtgtatctgcagaacctagccgctgcagataatgttcagcattttgttcgtgataatccgtttggtcaacctttcattactgagagcgatccgcattggaacttctatgctcagattgctgatagagggcgtgcacccttgacatgttgcgcttgaactcccaagggtcgtgcttttttctgggagttctgtggttatccatgatcaaaagatcatgatcagtatacagtgatcttctctgagtagtttgcttgtatccctgtactgaagattacagagtttctgctatgggtttaaattgcaggctctacgaaaggtatcagaccaaatgaatgaattgtctgacattatctcagtctcaaactgtttgcagccatgcttttttttcatttgcctcacgttttaaagattaattgtgatgcctccttttgttctggtcttaaagaaa

SEQ ID NO: 204942 - DNA, 2474 bp, Zea Mays
gccgcctgtctcagtcgcggccgtcccccggcttcttggactttgtcgccgcacccgcacggcgctacgcaacaacaaaagcaggtccgctcgtcccgtctcgtgaccctcccgcggctcgtctccctctcacggtctctcacctcacaacctcacggtcctcacctcactccacctcgttcgccgcctcgctgccgcgtcgggccagtgcgtgcgtgggggcgggcgtgagtgactggctctcctcggcgcgcggacccaggggcggcggcgatggggaagaatatgcgcatcaagacggcgcccaaggcgaaccgtgtccccctcctcggcgacggggagacgtcaagggcgctctcggacctggaagagggcagcgacgtccagccagcgaacgtcggcttctgtcgggtcatcaaacttgcgaaacatgacgccggaaagctggtcctcgccacagcggctctgctcgtcgcctccctcagtaaccttctcgttcccaaatatggtggcaagataattgacattgtgtcaagagatgttcggcgcccagaagataaggcgcaagccctggaggatgtgaagggcacaattttgtacattgtgacaatcgtcttagtcggtttgcacggctcttcgggcatggttattcaattctgctagtgagagagtagtcgctcgactaaggaaagacttgttcagccatctcataaaccaggaaatagcgttttttgatgtgactagaacaggagagctcttaagcaggctttctgaagatacacaaataataaagaatgctgctacaaccaacctatcagaggcactgcgcaatgttactactacagctattggtcttggtttcatgttttcaacttcatggaagttaacattgctggcacttgtaattgtcccggttatatcagttgctgtgcgtagatttggacgttttcttcgtgagctttcacatcaaacacaagctgctgctgctgtagcttcatccatagctgaggaatcttttggtgccatccgcacagtaagatcctttgctcaggaatatcatgagatttcacgctatggtgaaaaagtagaggagacacttaaacttggtctcaaacaagctaaagttgttggcttgttttctggagggcttaacgctgcatcaaccatgtctgtggttattgttgttatttatggcgccaacttaaccatcaatggttacatgacaactggctctcttacatcattcatcttatacagccttacagttggttcgtcagtatctgccttgtcaggactatacacaactgtaatgaaagcctctggtgcaagccgtagggtttttcaacttttggaccgtgtttcgtcaatgacaaactctggggacaaatgtccaataaatgaaaaggatggggaagttgagcttgatgatgtctggtttgcatatccttctcgcccatctcatatgattcttaagggaataactctgaagctagcaccaggttcaaaggttgcacttgttgggccaagtggtggtggtaaaaccacaatagcaaatttgattgagcggttttatgaccctctaaagggaaggatcttgcttaatggagtaccgttggtagaaatttcacatcaatatcttcacagcaaggtaagcattgtcagccaggagcctacgctcttcaactgcaccatcgaagagaatattgcttatggactagagggcacaacgaactttgctgacgttgagagtgcagctaaaatggcgaatgcacacaacttcatatgcggctttcccgaccaatataagactgtcgtcggcgagcgggggatcaggttatccggcgggcagaagcagaggatcgccattgcgagagctttgcttatgaacccacgagtgcttctcctggacgaagccaccagtgccctggatgctgaaagcgaatatcttgtacaggatgcaatggactccttgatgaaagggaggactgtccttgtgatagcccaccggctctcgaccgtcaagagcgccgacaccgtcgccgtcatctccgacggcctaatcgtggagagcggcacgcacgacgaactcctggaccgcgacggcatatacacggccttggtgaagaggcagctgcaggggccgaagtttgaggccaccagcagcatcagcgaggcctccgaaattgaagcggaacccagcagtaatgggcaatagcggccccgattattaggaagaccacagttgatttgaatccacacaagtgtatgtaaccctgatgttgacgtatgccactgcgaatcacgcgaaaccattggatatcacatgatgctacggttgttgtaggagtaatttcccacttggttaatccaacacatatggtccagttttgtgtttatgctgttgggattattgggccaagcccgtttgaaattctgaaatagtttctagagaaacacaaaggcccattcataaa

SEQ ID NO: 204943 - DNA, 1674 bp, Zea Mays
cactcgttcttataataaagctgaaaaaaatccaagtgggcacgcacttaacctctagtactcgactgctaccggtaccggggacgacggcggaagccgcctgtctcagtcgcggccgtcccccggcttcttggactttgtcgtacgtgcccctctcctcttccccagctccctgtgccatgtgaacgagatcaccagctgaccagccactgcgtcgcaggccgcacccgcacggcgctacgcaacaacaaaagcaggtccgctcgtcccgtctcgtgaccctcccgcggctcgtctccctctcacggtctctcacctcacaacctcacggtcctcacctcactccacctcgttcgccgcctcgctgccgcgtcgggccagtgcgtgcgtgggggcgggcgtgagtgactggctctcctcggcgcgcggacccaggggcggcggcgatggggaagaatatgcgcatcaagacggcgcccaaggcgaaccgtgtccccctcctcggcgacggggagacgtcaagggcgctctcggacctggaagagggcagcgacgtccagccagcgaacgtcggcttctgtcgggtcatcaaacttgcgaaacatgacgccggaaagctggtcctcgccacagcggctctgctcgtcgcctccctcagtaaccttctcgttcccaaatatggtggcaagataattgacattgtgtcaagagatgttcggcgcccagaagataaggcgcaagccctggaggatgtgaagggcacaattttgtacattgtgacaatcgtcttagtcggttcagtttgcacggctcttcgggcatggttattcaattctgctagtgagagagtagtcgctcgactaaggaaagacttgttcagccatctcataaaccaggaaatagcgttttttgatgtgactagaacaggagagctcttaagcaggctttctgaagatacacaaataataaagaatgctgctacaaccaacctatcagaggcactgcgcaatgttactactacagctattggtcttggtttcatgttttcaacttcatggaagttaacattgctggcacttgtaattgtcccggttatatcagttgctgtgcgtagatttggacgttttcttcgtgagctttcacatcaaacacaagctgctgctgctgtagcttcatccatagctgaggaatcttttggtgccatccgcacagtaagatcctttgctcaggaatatcatgagatttcacgctatggtgaaaaagtagaggagacacttaaacttggtctcaaacaagctaaagttgttggcttgttttctggagggcttaacgctgcatcaaccatgtctgtggttattgttgttatttatggcgccaacttaaccatcaatggttacatgacaactggctctcttacatcattcatcttatacagccttacagttggttcgtcagtatctgccttgtcaggactatacacaactgtaatgaaagcctctggtgcaagccgtagggtttttcaacttttggaccgtgtttcgtcaatgacaaactctggggacaaatgtccaataaatgaaaaggatggggaagttgagcttgatgatgtctggtttgcatatccttctcgcccatctcatatgattcttaaggatgacatatatgggaatttca

SEQ ID NO: 204944 - DNA, 2623 bp, Zea Mays
gtatatcatcattccggactcgatctctccttgtgtggccacatatccagcgcaacatacgtatctctgccacacttagttggaagaatttatttggaattggcaccttgaatatttgttggattcttcgtctgctatcttactgcaaggttgagaaggccttcagggaaggtacggcacagcaaaatgcacatagtatttttgtgtcccttgctttaaaacttttggaacagcgagttcatgtcgcatgcaaagaaattattacgttggaaaaacagaacaaacttcttgaggaagaggagaaagaaaagcgtgaagaacaagagcgcaggttgaagaggagaacaagagagagagaaaagaagaacaggagaaaagaaaggctgaaagaaaaggaaaataataaagggaaaaaactagttgaatcaaagtcacgaaatgatattctatcttcagctccaagcaactccacaacatctatcaatgattattcgacaaatactctggactcaagagattcagttaaggaagatgaagatagtgctgaagttgtgaatctgtgctctcctgacagctgtatgaatcaatcttcatgtacaaaaattaatggagaaaacagtgtccacttcaatgcagtaacagaattttctccaatggacagtagtgacctttgtacatcagatcaatccaagtcttcgagacggggtccaaggtcaagggaggattttcctcaagatcagtcctgttggtatgatgactgcggagatgagtctggaagaattggtgaattacaatggaagtcaagggaaaggacaagaagtattaatagaagtcgcaacgcagcatccacctcaaacaacaggacaagagagaggcaatcatacaattcttgcagctgcggccatctggaagactatggagtcatggacagctgtttcttgccaacagctagatctggcaaagagacgaagatagcaagaaaatcaggagttgagaaacctagggtgcagtaccacagatgctatacattggatagctttatagtgtcaaaaggaaaccgtgctggttctacacagaaaaatgctatcccaaagcaaatatgggagcctatggatgctcgaaggaagactaaattacacaatacagttcatgattcaggttcagttaacgatgttgattcactgaaacatgtggtttttgataacagtggatctcaaaattttggagtaggatgtgaatcacagcctcaggcttctgaaagttccagggatgaatgtaattcagatcaaccatgtgcaaatggtgggagaaatcaaactatttcatgtgctagtagtactcttatggtgaaccaacaaaactgttgcgcaggaaatgatgaaggctccaggcatgatgaagagctgatgatgaactctgctggctctgatagctcctcgtcatgcatgagcgagggagatagggaaagcagctccagcagtacaacctcttcaagcgctcaaaatccggaatcatcttctgagtctgaggaatcacccgagagaataaatagcacagtaggtacacaatcatcaagagctgctgcttcacggtctttgcttgaagcatgtgcaggtaatggtttcagagaataccaacccaaggcaaccggcctagctcacaatgacatgtttgggtacaatgtatcccctgtccaggaccagctgctgcattaccaaagcatgtatccacctcaacatcggccaataacaatggggtttcatgacggttcttgggctgcaccaacgaatggaaactttcagtatgctcgaccatcccacttatattctagtccactcgtattcggaatacctgggaaccattttattgattatccttacatggctcccgccttcagccatatacctccagagcctattcacaaggccgcatccagctttagagccatgcctctgtcactgccttttcaaaacggacatcggcaggctgctagtcttactcagagagacatgaatctagaaaggcgccctgcaaagttgactaagccgacaggcaaggatcccccagaaaacaagaacaagtcgggcctaaaggatctcccagaagacaagagcaaatcatgggatgcggatgcatccttctcgttgttccaattcaacttgccaatagcttcgcctgtaacaccatcatcaaaagataagagcggagagctggccgcaaggacgccactggctcaggtgcaagctcagctttgctcgagggaacaagcagatgtcaaggagtatagcctgttctcctcgaaagataatggcatattttcgtttatgtagataaaagaaaaactgtgacaaacctgctacccttcgtttctggtgtctcttgctgcacttcgtgaatgctttgtgttctccggagcaaaataaaggatgttgccattttcttcatgctgtctgtatcttcgttttacatttgtgtctgttaccgtgtgtgctaaaagctagtaatctgcaatgctgctgagttgaattttttttcacgtagaatacatagatctgtattgattggttcatgattcactcctgacaactaagattctgagaacatgaacccggaaaatgaaaat

SEQ ID NO: 204945 - DNA, 3263 bp, Zea Mays
cttctttgccgcttccagattttcttgctattggtgctggctggttggtgtttttgcagctgcagccagcagtgctgcagcagcaatctcaactaaccagagcaaagaatgcttgaatagtagtatatgtcattacacatagggtttgatagcaagagattttgccgagagtgtcgaaggaacgttatccgcgaattcaaggagctgaaggaactaaagcgcatgcgaagggaacctcactgcaccagttggttttgtgttgcagatactgcgtttcagtgtgaggtgtttgaggatgctgtcatagttgattggcgccagtgtttatcagagccagatgaatcttatgaccactttgaatgggctattggaacagatgaaggagaatccgatatttttggctttgaaaatgttggaatgaatgcacaagtccacagaaatggaatcgatcttgatcagtttgaggactacttcataacactgcgagcttggaggcttgatggccagttcacagagctgtgtgtaaaagcacatgcattgaagggtcaatcatgtgtccaccacaggctagtggttggtgatggctttgtgactatgacaaagggtgaaagtattagaagtttctttgagcatgctgaagaggccgaggaagaggatgaagatgatgacatggacagggatggaaatgattttgatggtgatggtgcccatccacagaagcatgccaagagccctgaactggcaagagaatttcttttggatgctgctgctgtgatattcaaagaacaggttgagaaggccttcagggaaggtacggcacagcaaaatgcacatagtatttttgtgtcccttgctttaaaacttttggaacagcgagttcatgtcgcatgcaaagaaattattacgttggaaaaacagaacaaacttcttgaggaagaggagaaagaaaagcgtgaagaacaagagcgcaggttgaagaggagaacaagagagagagaaaagaagaacaggagaaaagaaaggctgaaagaaaaggaaaataataaagggaaaaaactagttgaatcaaagtcacgaaatgatattctatcttcagctccaagcaactccacaacatctatcaatgattattcgacaaatactctggactcaagagattcagttaaggaagatgaagatagtgctgaagttgtgaatctgtgctctcctgacagctgtatgaatcaatcttcatgtacaaaaattaatggagaaaacagtgtccacttcaatgcagtaacagaattttctccaatggacagtagtgacctttgtacatcagatcaatccaagtcttcgagacggggtccaaggtcaagggaggattttcctcaagatcagtcctgttggtatgatgactgcggagatgagtctggaagaattggtgaattacaatggaagtcaagggaaaggacaagaagtattaatagaagtcgcaacgcagcatccacctcaaacaacaggacaagagagaggcaatcatacaattcttgcagctgcggccatctggaagactatggagtcatggacagctgtttcttgccaacagctagatctggcaaagagacgaagatagcaagaaaatcaggagttgagaaacctagggtgcagtaccacagatgctatacattggatagctttatagtgtcaaaaggaaaccgtgctggttctacacagaaaaatgctatcccaaagcaaatatgggagcctatggatgctcgaaggaagactaaattacacaatacagttcatgattcaggttcagttaacgatgttgattcactgaaacatgtggtttttgataacagtggatctcaaaattttggagtaggatgtgaatcacagcctcaggcttctgaaagttccagggatgaatgtaattcagatcaaccatgtgcaaatggtgggagaaatcaaactatttcatgtgctagtagtactcttatggtgaaccaacaaaactgttgcgcaggaaatgatgaaggctccaggcatgatgaagagctgatgatgaactctgctggctctgatagctcctcgtcatgcatgagcgagggagatagggaaagcagctccagcagtacaacctcttcaagcgctcaaaatccggaatcatcttctgagtctgaggaatcacccgagagaataaatagcacagtaggtacacaatcatcaagagctgctgcttcacggtctttgcttgaagcatgtgcaggtaatggtttcagagaataccaacccaaggcaaccggcctagctcacaatgacatgtttgggtacaatgtatcccctgtccaggaccagctgctgcattaccaaagcatgtatccacctcaacatcggccaataacaatggggtttcatgacggttcttgggctgcaccaacgaatggaaactttcagtatgctcgaccatcccacttatattctagtccactcgtattcggaatacctgggaaccattttattgattatccttacatggctcccgccttcagccatatacctccagagcctattcacaaggccgcatccagctttagagccatgcctctgtcactgccttttcaaaacggacatcggcaggctgctagtcttactcagagagacatgaatctagaaaggcgccctgcaaagttgactaagccgacaggcaaggatcccccagaaaacaagaacaagtcgggcctaaaggatctcccagaagacaagagcaaatcatgggatgcggatgcatccttctcgttgttccaattcaacttgccaatagcttcgcctgtaacaccatcatcaaaagataagagcggagagctggccgcaaggacgccactggctcaggtgcaagctcagctttgctcgagggaacaagcagatgtcaaggagtatagcctgttctcctcgaaagataatggcatattttcgtttatgtagataaaagaaaaactgtgacaaacctgctacccttcgtttctggtgtctcttgctgcacttcgtgaatgctttgtgttctccggagcaaaataaaggatgttgccattttcttcatgctgtctgtatcttcgttttacatttgtgtctgttaccgtgtgtgctaaaagctagtaatctgcaatgctgctgagttgaattttttttcacgtagaatacatagatctgtattgattggttcatgattcactcctgacaactaagattctgagaacatgaacccggaaaatgaaaat

SEQ ID NO: 204946 - DNA, 1810 bp, Zea Mays
gaatacgtctctctagtgttttggcgtaggaattaattacacgtgagtggttggcttaaaagcctaaacctgtgtcctgtaaccggtgaatttagatcaggattcaggaatagaaaaagaaaaagaatggacagcttgttgctcaagttgttcacccacctccactccacctgtgtgtgtgtgtttcacgtcccggcggaacttgccggcggacacgcgtcgtcacagccgaccaacggcgcttgcccgttcccccatcccccttgattcctccgccagcccagcggcggccactctccacgcatctgcatccgcatggctctccacgccgcggcgccggcctgcgcggtgttctgccgcctcccgtcgccctccccatctcacgccggcagcagacgctcccttcccgccgtcgcgagtccccgcggcgttgtctctgccgcgccgctacggacacgcgcagttccaacaaaggcgatcgtaaacagtgatggcatccctgaaacgagtgattctccacatgtggtttgctttggtgaattgctaattgacttcgtcccaactgtcaatggcgtgtcactggcagaagcacctgcctttaagaaggctcctgggggagcacctgccaatgttgcagttggaatagctcgccttggtggctcgtcagctttcattggaaaggttggtgatgatgaatttggctacatgctagctgacatattgaagcagaataatgtcaataatcaaggattgctgtttgatcctcatgctagaacagctttggcgtttgtgtcactccgaagtgatggtgaacgcgaatttatgttctatcgtaatccaagtgctgatatgctacttgaagaaaaagaacttgatcttgatcttatacggaaggcaaagatattccaccatggctcaataagtcttataactgagccctgtaaaactgcacatattgcagctgccagagctgctaaagatgctggagtacttgtttcatatgatccaaatttgaggctttcattgtggtcatcacctgaggatgctagagatggtatcctgagcgtatggagaactgctgatattttcaaggtaagtgaagaggaggtttcctttctcacaaatggagaggatccttatgatgatgccgttgtaaagaaacttatgcactcaaacctgaagttgcttcttgtcactgaaggtccagacggctgtaggattttagtggtagagttggtggacttaaggtaagtgctgttgacacaactggtgctggcgatgcctttgttgctggagtgctatctcaattagccacagacttttctctgctccaggatgaaggtcggttgagagaagccctgaagttcgcaaacgtctgtggagctctcaccgtgacacagagaggcgctattcctgcgctgcccacccgacaacaagtgcttgatgccctgaccaattttgttgcttgaaagtagccgtgcacacctacttgtgtattgtaatgctgaccgcctgagcgccatgtcgatagattacaggcgtgatttcgcttgcataccacttggcatttttgttggtgcgtaccaaagccccccagccaaaccaagtactcggtggaagaggttgtttcccgtcggattttgatgtgtgaagttgtgtgttggggacgttgggttaacactttgtggacgtgtgtgatgtgtgtgctgatgttgtaatgctgctggggagaacatgacacagcggagcagttttggtacctgaaaacatgagctatgaatgagtgattcagttattgggcccaatttgc

SEQ ID NO: 204947 - DNA, 1501 bp, Zea Mays
tgggtatttatactggcatctctgtgcttcccctcggccatatacgcaaggcaccgaggctgtcctgatgaacagagcaccatcggtgtgggcaaagggtggagcgaccgggggaacgccgctgtgcagcacgccgccatggctagatctcacgctttgaattctggcattgtattattgtgctccattccgggaacagttgctggaatactatagaagaaacagaaatctcgaagatgctgaagaaaatttgttgacctgcctagcagatcttttttcacagataagtgcatcaaagaaaaagactggtgttattgctccaaaacgtttcattcaaatggttaggaaactaaatgaatattttcgtggctacatgcatcaggatgcccatgagtttttgaatttcttactgaatgaaattgttgatattctggaaaaagagtctagttctgcaaaggattctcctgggaccacatcttctgaaaatgtctcaaatggcgcagctgttgatggagttagaaaagaaccactggttacatgggtacataagaattttcagggtattttgaccaatgaaaccagatgcctaatgtgtgagacaatcaccgcaaaggatgagacattttttgacttgagcgtcgacattgaacagaatagttcactcacaagctgtctgaagaatttcttttctactgagactttaaatgcggatgacaagttcttctgtgataaatgctgcagtttgcaagaagcagagaagagaatgaagataaaaaaggcgccacaaatattagtgatccacctaaagcgcttcaagttcatcgagcagcttaaccggcacaagaagctgtcgtaccgagtggtgtaccccttggagcttaagctcagcagcaactccgctgatgccgactgtgagtactccctctttgccgtggtggtccacctggggagcggccccaaccaggggcactacgtagccatgatcaagagccatgaccattggttgtccttcgatgatgacaatgtcgagatgatcccggagtctaccctacagaccttctatggctcttatcatgaatattcgggcaacactgatcatggctacatcttgttctacgggcgcattggtgggagtggaaatgagaagaccgactcttccgatggagtgtgaccgttgacatgggatcctgggtggttcgatgtacatgggctttcctggccttcgtatacttcggttggataggatatatttacattttcaacaagaaagtgttttttttgcggaagaccgtggggggaaaacataaaagtttagtttgttgttagttgcagttccttgtaaaggattagttggcaggttagtatatcattttattttgttttcataattctaacttgtcatcgggaccacattgcgcacgtttttttttttttgtgaaaaagtcctgttcggaagcactgattttttttgttttgagaaattgatttgttgatgtagaaa

SEQ ID NO: 204948 - DNA, 1711 bp, Zea Mays
ccagcttgcagatgacttgtgtactaagtttagcttaatgtataaactaccggtgaccagggctagccctagggccatgcagcggaggcgaccgtcggggggtcaggaaagaaaggggcctaatatgtaatagaatagtagtgttaatgttaaattattgtcttgtgaaatcgcatagaagcgaaagagaggacacacacattaggctaaagcgtcggttaaaggcctcctacaccgctgcacagaaccagtctcgtcctcactgtcatcgccgatcacatgtcacaggctcgcaactccctgatcttagatgttaccaaagaagtatcttttcatgagaagcaatggatgtgatggagttatattcttcattaaggcattgtattattgtgctccattccgggaacagttgctggaatactatagaagaaacagaaatctcgaagatgctgaagaaaatttgttgacctgcctagcagatcttttttcacagataagtgcatcaaagaaaaagactggtgttattgctccaaaacgtttcattcaaatggttaggaaactaaatgaatattttcgtggctacatgcatcaggatgcccatgagtttttgaatttcttactgaatgaaattgttgatattctggaaaaagagtctagttctgcaaaggattctcctgggaccacatcttctgaaaatgtctcaaatggcgcagctgttgatggagttagaaaagaaccactggttacatgggtacataagaattttcagggtattttgaccaatgaaaccagatgcctaatgtgtgagacaatcaccgcaaaggatgagacattttttgacttgagcgtcgacattgaacagaatagttcactcacaagctgtctgaagaatttcttttctactgagactttaaatgcggatgacaagttcttctgtgataaatgctgcagtttgcaagaagcagagaagagaatgaagataaaaaaggcgccacaaatattagtgatccacctaaagcgcttcaagttcatcgagcagcttaaccggcacaagaagctgtcgtaccgagtggtgtaccccttggagcttaagctcagcagcaactccgctgatgccgactgtgagtactccctctttgccgtggtggtccacctggggagcggccccaaccaggggcactacgtagccatgatcaagagccatgaccattggttgtccttcgatgatgacaatgtcgagatgatcccggagtctaccctacagaccttctatggctcttatcatgaatattcgggcaacactgatcatggctacatcttgttctacgggcgcattggtgggagtggaaatgagaagaccgactcttccgatggagtgtgaccgttgacatgggatcctgggtggttcgatgtacatgggctttcctggccttcgtatacttcggttggataggatatatttacattttcaacaagaaagtgttttttttgcggaagaccgtggggggaaaacataaaagtttagtttgttgttagttgcagttccttgtaaaggattagttggcaggttagtatatcattttattttgttttcataattctaacttgtcatcgggaccacattgcgcacgtttttttttttttgtgaaaaagtcctgttcggaagcactgattttttttgttttgagaaattgatttgttgatgtagaaa

SEQ ID NO: 204949 - DNA, 1835 bp, Zea Mays
cgagactgcgcggctttccctctcgtcgctgacatgccgaagcggcaccgcgacagcgagggccggcagcggtcgtcgtcgtcgcggcggcggcgcagcccgtccccgtccgactcggacgccgcctcctccgattacagcggctccccccgacggagccgtggacgccaccgccataggagccgccgccggagggacactccgtccacctccagcgacgcgagcggcagcgggagcgaggattcgaggtcggactccggacgccgagggaggagcggcggccggaggcgccggaatgtcaccgaggagcagatcattgagtacatggcgaagaaggcgcagaagaaggcagagaaggtggcgaagaagctgaaagcgaattcggtttcaggctactccaacgattcaaacccctttggtgatcccaacctgacagagaagtttgtgtggcgaaagaagatagagcatgatgtatctcagggacagaaggtggacttttctgtcaaatccgagaagaagaaacagctagaaagaatggctgaaatagagaaggttaagaaaagaagggaagaaagagctattgaaaaggcacagcacgaagaggaaatggcgttaatagctagagaaagagcacgtgcagagtttcaagactgggagaagaaggaggaagagtttcattttgaccaaagcaaggtcaggtctgagatcaggttgcgggaggggcgtacaaagcctattgatgttctccttaagaatcttagtttctcagatgaatttgacattgagttaaatgagccttatctggtgttcaagggattaacagtgaaagaaatggaagagctatgtgatgacattaagatgcatcttgatctggacagggaaagccaaacaaatgttaagtactgggaggaccgaaaacgtgaagctgtagttttggagcatcaaagaaaagttcaggaagccatgaaaacaaaggcaagagtacctgatgagatggagatgaaggccataaaaacaatgggagctatggaggaaggagatgcagtatttggtgccggtgctgaagtgaaccttgattcacaggtgtactggtggcacgacaagtatcgaccaagaaagcccaagtacttcaatcgggtgcacactggatatgaatggaataaatacaaccagactcattatgaccatgataacccaccaccgaaaattgtccaaggctacaagttcaatatattttaccctgatcttgtggacaaatcgaaagcaccaacatacagtatagagaaagatggaagcgccggagagacttgcttcataagatttcacgctggacctccatacgaggatattgctttccgtattgtgaacaaggagtgggaatactcacacaagaaggggttcaagtgtacttttgagcgtgggattctccatctctatttcaacttcaagcgttaccgttacaggcgctgaaatggctcaagaggcaggggaaaactggatcgattggactggtgcgtcatgattctgctgtatgctgtggcatggataccagtcgagtatgtatcttcagtataattaggtactatgctaaatgggaacacactttttggttttactgactgattccccccttttttgaggttgtacaataatacagcatagcaagctgatagttttctaacaaactagcatgtagtctgtgctaacgctaagatctcggtaatgagaggggttgatggcggtggcaacacgagtaagaggaggggtggcggggtcgctggagaagagtgataagggatgattcaaataatagtctattggatttaaaaagggag

SEQ ID NO: 204950 - DNA, 2402 bp, Zea Mays
cgagactgcgcggctttccctctcgtcgctgacatgccgaagcggcaccgcgacagcgagggccggcagcggtcgtcgtcgtcgcggcggcggcgcagcccgtccccgtccgactcggacgccgcctcctccgattacagcggctccccccgacggagccgtggacgccaccgccataggagccgccgccggagggacactccgtccacctccagcgacgcgagcggcagcgggagcgaggattcgaggtcggactccggacgccgagggaggagcggcggccggaggcgccggaatgtcaccgaggagcagatcattgagtacatggcgaagaaggcgcagaagaaggcagagaaggtggcgaagaagctgaaagcgaattcggtttcaggctactccaacgattcaaacccctttggtgatcccaacctgacagagaagtttgtgtggcgaaagaagatagagcatgatgtatctcagggacagaaggtggacttttctgtcaaatccgagaagaagaaacagctagaaagaatggctgaaatagagaaggttaagaaaagaagggaagaaagagctattgaaaaggcacagcacgaagaggaaatggcgttaatagctagagaaagagcacgtgcagagtttcaagactgggagaagaaggaggaagagtttcattttgaccaaagcaaggtcaggtctgagatcaggttgcgggaggggcgtacaaagcctattgatgttctccttaagaatcttagtttctcagatgaatttgacattgagttaaatgagccttatctggtgttcaagggattaacagtgaaagaaatggaagagctatgtgatgacattaagatgcatcttgatctggacagggaaagccaaacaaatgttaagtactgggaggcactcatggtggtatgtgaatgggagctaggtgaggctcggaaaagagatgccctagatcgggctagggtccgtggtgaggaaccaccacctgaggttcttgcagaagagagaggtttgcatgcaagtattgagggggatgtaaaaagtctcctggatggtaaaacttccacagagcttgaagatatgcaaagtcaaattgagtcccaaatgcgctctggaactgcgaaagttgttgaatactgggaggctattctgaaacggcttcatatttacaaagcaaaggcttgcctgagggagatacatgcttctatcctaaggaagcatttacatcgattggagcatcctggtgctgctgaacaggatgtggattctgagaaagaagttgataataaactggaggatgaaatgcatgaggacgaagatgataaacgatattcacctgagcctatgcctcagcagacagataacgaatttgaagaggcagatggatccttttctccacagctaatgcatggcaatgaagatgaagatgcaattgatcctgaagaggacaaagctgagctggaccgaaaacgtgaagctgtagttttggagcatcaaagaaaagttcaggaagccatgaaaacaaaggcaagagtacctgatgagatggagatgaaggccataaaaacaatgggagctatggaggaaggagatgcagtatttggtgccggtgctgaagtgaaccttgattcacaggtgtactggtggcacgacaagtatcgaccaagaaagcccaagtacttcaatcgggtgcacactggatatgaatggaataaatacaaccagactcattatgaccatgataacccaccaccgaaaattgtccaaggctacaagttcaatatattttaccctgatcttgtggacaaatcgaaagcaccaacatacagtatagagaaagatggaagcgccggagagacttgcttcataagatttcacgctggacctccatacgaggatattgctttccgtattgtgaacaaggagtgggaatactcacacaagaaggggttcaagtgtacttttgagcgtgggattctccatctctatttcaacttcaagcgttaccgttacaggcgctgaaatggctcaagaggcaggggaaaactggatcgattggactggtgcgtcatgattctgctgtatgctgtggcatggataccagtcgagtatgtatcttcagtataattaggtactatgctaaatgggaacacactttttggttttactgactgattccccccttttttgaggttgtacaataatacagcatagcaagctgatagttttctaacaaactagcatgtagtctgtgctaacgctaagatctcggtaatgagaggggttgatggcggtggcaacacgagtaagaggaggggtggcggggtcgctggagaagagtgataagggatgattcaaataatagtctattggatttaaaaagggag

SEQ ID NO: 204951 - DNA, 2063 bp, Zea Mays
gaagaagaggcagagaaggtggcgaagaagctgaaagcgaattcggtttcaggctactccaacgattcaaacccctttggtgatcccaacctgacagagaagtttgtgtggcgaaagaagatagagcatgatgtatctcagggacagaaggtggacttttctgtcaaatccgagaagaagaaacagctagaaagaatggctgaaatagagaaggttaagaaaagaagggaagaaagagctattgaaaaggcacagcacgaagaggaaatggcgttaatagctagagaaagagcacgtgcagagtttcaagactgggagaagaaggaggaagagtttcattttgaccaaagcaaggtcaggtctgagatcaggttgcgggaggggcgtacaaagcctattgatgttctccttaagaatcttagtttctcagatgaatttgacattgagttaaatgagccttatctggtgttcaagggattaacagtgaaagaaatggaagagctatgtgatgacattaagatgcatcttgatctggacagggaaagccaaacaaatgttaagtactgggaggcactcatggtggtatgtgaatgggagctaggtgaggctcggaaaagagatgccctagatcgggctagggtccgtggtgaggaaccaccacctgaggttcttgcagaagagagaggtttgcatgcaagtattgagggggatgtaaaaagtctcctggatggtaaaacttccacagagcttgaagatatgcaaagtcaaattgagtcccaaatgcgctctggaactgcgaaagttgttgaatactgggaggctattctgaaacggcttcatatttacaaagcaaaggcttgcctgagggagatacatgcttctatcctaaggaagcatttacatcgattggagcatcctggtgctgctgaacaggatgtggattctgagaaagaagttgataataaactggaggatgaaatgcatgaggacgaagatgataaacgatattcacctgagcctatgcctcagcagacagataacgaatttgaagaggcagatggatccttttctccacagctaatgcatggcaatgaagatgaagatgcaattgatcctgaagaggacaaagctgagctggaccgaaaacgtgaagctgtagttttggagcatcaaagaaaagttcaggaagccatgaaaacaaaggcaagagtacctgatgagatggagatgaaggccataaaaacaatgggagctatggaggaaggagatgcagtatttggtgccggtgctgaagtgaaccttgattcacaggtgtactggtggcacgacaagtatcgaccaagaaagcccaagtacttcaatcgggtgcacactggatatgaatggaataaatacaaccagactcattatgaccatgataacccaccaccgaaaattgtccaaggctacaagttcaatatattttaccctgatcttgtggacaaatcgaaagcaccaacatacagtatagagaaagatggaagcgccggagagacttgcttcataagatttcacgctggacctccatacgaggatattgctttccgtattgtgaacaaggagtgggaatactcacacaagaaggggttcaagtgtacttttgagcgtgggattctccatctctatttcaacttcaagcgttaccgttacaggcgctgaaatggctcaagaggcaggggaaaactggatcgattggactggtgcgtcatgattctgctgtatgctgtggcatggataccagtcgagtatgtatcttcagtataattaggtactatgctaaatgggaacacactttttggttttactgactgattccccccttttttgaggttgtacaataatacagcatagcaagctgatagttttctaacaaactagcatgtagtctgtgctaacgctaagatctcggtaatgagaggggttgatggcggtggcaacacgagtaagaggaggggtggcggggtcgctggagaagagtgataagggatgattcaaataatagtctattggatttaaaaagggag

SEQ ID NO: 204952 - DNA, 2929 bp, Zea Mays
gtgtattattcaaaatatccccgtcctcccgttccgtccccaaaaccctagggcgccgccgcctctggagcaagctcagggcaaagaccaagatgaaatcgatcctggtttacaccacctgaacaccgcccctcatacttgtcgacggtctacctgatggcagcaggttccggcggtggaggttttctgggcgacgtcaacgacccatggctgaagccgcggctgctccgcgcggtggtcaccgggcgccttccgcagcctggcgccgccgccgagctctcgccgacggaggtcgcctccatcctcgaggtggtacgcactcacggcctactcacggaggatctcccgggccgcggcgcgctggtgaacccgaagctcgccgaggcgtggcgcgccgccgtggacgcctgggttgagcgtgtcgtggcgctggtggagagcgactcgcaatcgtctagctttcaacttgttattgttatttcctgtacttccatgtctgatttatttgtaagattggctaagttttcgaacttaaagaaagagggatcatcctttgctggaagggttgttgaaccagtgctgcggcttttaaatcaaaatggtctagtagctgacgaagcaattgatttgctgaggacagttattaaattgtacccatcctctgtaaaccggcactacaataaagttgaatctgctattgcagcaaagattatgagcaatgtaaaaccatctgagaaatttgcgagaaccttagcattgttaccttctgtccgagtgtccgaggacagttggtcactgatgattcggaggatactgattgtggtaaacaatcttttgaatgatgctttcattgggcttgaagaagaaaagaaaggccatgatattatgctgctgctagttccacctggaactgatcctctaccaacattgggagatgaagtaatgcctggaggcaatgtgcatatcatgaagaaatttcgtgtctttactgttcctaccatttcagctcttacgctttgctgcagcgtgatgctgactagttattatccagtcaatgttccaattcatgctttgatagctttgatgcgaagagtgctgttagttgatggatcattgcataacaagctgttcccttctacaacttcattgcatcaagagcttatttgttttgatcttccatcgttacattcaactttcttggatttgctgaatgcaactattaaaggcatgcgaagccaactcttacctcatggtgctagtatcatacggcttataacagagtacttcaaaatagcaaagctgcctactttgaggacaaaaacttatagcattttgcagctgttgctgacctccatgggtgttgggacgtctctgcacctgcttgaggcaacagtccgcaatgcagttgctgatctgaatgatgatggtgaaattaacatgactatgatcaacacaaattcatcgcaattgaccaatgaatcatcatcaaaagtttattcgaagaagaggaagcaagaaccacagatgcaaaactcaaccatctcaggttcagagaaagtagcaatcagcccaaggaaaagaaaaggttcttccataccaattacatcaaagggagtggcccctgaaagtacaggagatgttacactatcaactccacattctgtcaaaatagctgcgcttgaaacattggaagttcttctgaatgtgggaggttcattgcggatggatcgctggaggtcagaagtggacatgctcttaattaacgtggctagaagtgcttgcggcatgggagggagttatgagcaaaagccatccacatttggggagccaaacatatcggacttccaacttgcttcgcttaagggcctgctggcatcttttctttcttctcatgcccgtcctccttatttagccaacggaattgaactcttcagaaaagggaagctagagataggcactaaggttgcagagttttgttcacatgctttgcttgctttggatgtccttgtccaccctcgagccctttctctggaaagaacagttcctgcaagctctgggttcaactacactgcacagaaaaaaacagtttttggtgctggtacacaccagatctcaccatttggggaccagcctcaagcaatggaggtcgaagacatgtacgatgactggctaatatccaacaacaatgaaccaccagaggttccagtgaacggtagtgatgctgtggtaagtaaaggtgtgctggtggaggatggaaagcagctcaatcccatagcagaagatccaaaagtcgacccacccagaatcacagacgcagcacaagatgcaccagcatccaccaagactgatgtcaaggtggtcgatgcagctgcagccacagctgccaagccaaacacagcggagaatccttcgagttccaatgctgtcccctctccagtgcgcacaacagattctgattcacgtaagcatgcgtcatttcccgagcaggatagtcctcatgagaacaaaagcgcagccgtccatccaggtgaagcttctgcgactccaggtgttggttcaagccaccaccgccatgaagcacctgaggcccgttcagccagcttcacggaattgtttggttctgagtctggcatcgaatcagagtccgaagacttgatgccagatatcgtcgacggggaccctgactctgactaggtttgccgtcgtcatttgtgacatggcaatggaaattttgtgatgttcctgttttgttttgagcaaattgtacgacattgccggctgacagatgatgcagtatttgattgatagatatagatggagctaaattttgtgatgttcctgttttgttttaccaccaaaaatttgctcaatctgattggatttagaggcacgccggtgaatagaataaagtgcaaacaaagtatttcga

SEQ ID NO: 204953 - DNA, 2369 bp, Zea Mays
gtttgcatttgaccaataatttatatgtgtttctgagttgtgatgtgaagattggctaagttttcgaacttaaagaaagagggatcatcctttgctggaagggttgttgaaccagtgctgcggcttttaaatcaaaatggtctagtagctgacgaagcaattgatttgctgaggacagttattaaattgtacccatcctctgtaaaccggcactacaataaagttgaatctgctattgcagcaaagattatgagcaatgtaaaaccatctgagaaatttgcgagaaccttagcattgttaccttctgtccgagtgtccgaggacagttggtcactgatgattcggaggatactgattgtggtaaacaatcttttgaatgatgctttcattgggcttgaagaagaaaagaaaggccatgatattatgctgctgctagttccacctggaactgatcctctaccaacattgggagatgaagtaatgcctggaggtcaatgttccaattcatgctttgatagctttgatgcgaagagtgctgttagttgatggatcattgcataacaagctgttcccttctacaacttcattgcatcaagagcttatttgttttgatcttccatcgttacattcaactttcttggatttgctgaatgcaactattaaaggcatgcgaagccaactcttacctcatggtgctagtatcatacggcttataacagagtacttcaaaatagcaaagctgcctactttgaggacaaaaacttatagcattttgcagctgttgctgacctccatgggtgttgggacgtctctgcacctgcttgaggcaacagtccgcaatgcagttgctgatctgaatgatgatggtgaaattaacatgactatgatcaacacaaattcatcgcaattgaccaatgaatcatcatcaaaagtttattcgaagaagaggaagcaagaaccacagatgcaaaactcaaccatctcaggttcagagaaagtagcaatcagcccaaggaaaagaaaaggttcttccataccaattacatcaaagggagtggcccctgaaagtacaggagatgttacactatcaactccacattctgtcaaaatagctgcgcttgaaacattggaagttcttctgaatgtgggaggttcattgcggatggatcgctggaggtcagaagtggacatgctcttaattaacgtggctagaagtgcttgcggcatgggagggagttatgagcaaaagccatccacatttggggagccaaacatatcggacttccaacttgcttcgcttaagggcctgctggcatcttttctttcttctcatgcccgtcctccttatttagccaacggaattgaactcttcagaaaagggaagctagagataggcactaaggttgcagagttttgttcacatgctttgcttgctttggatgtccttgtccaccctcgagccctttctctggaaagaacagttcctgcaagctctgggttcaactacactgcacagaaaaaaacagtttttggtgctggtacacaccagatctcaccatttggggaccagcctcaagcaatggaggtcgaagacatgtacgatgactggctaatatccaacaacaatgaaccaccagaggttccagtgaacggtagtgatgctgtggtaagtaaaggtgtgctggtggaggatggaaagcagctcaatcccatagcagaagatccaaaagtcgacccacccagaatcacagacgcagcacaagatgcaccagcatccaccaagactgatgtcaaggtggtcgatgcagctgcagccacagctgccaagccaaacacagcggagaatccttcgagttccaatgctgtcccctctccagtgcgcacaacagattctgattcacgtaagcatgcgtcatttcccgagcaggatagtcctcatgagaacaaaagcgcagccgtccatccaggtgaagcttctgcgactccaggtgttggttcaagccaccaccgccatgaagcacctgaggcccgttcagccagcttcacggaattgtttggttctgagtctggcatcgaatcagagtccgaagacttgatgccagatatcgtcgacggggaccctgactctgactaggtttgccgtcgtcatttgtgacatggcaatggaaattttgtgatgttcctgttttgttttgagcaaattgtacgacattgccggctgacagatgatgcagtatttgattgatagatatagatggagctaaattttgtgatgttcctgttttgttttaccaccaaaaatttgctcaatctgattggatttagaggcacgccggtgaatagaataaagtgcaaacaaagtatttcga

SEQ ID NO: 204954 - DNA, 2438 bp, Zea Mays
ggaaagtgtgcacaggtcctgtcattttgaacacagctgtgccacacatgttttctacgcatgaagtttctattccaagaatctcccaagttcccaaatatacgatgcagatttttcattagtcaactaatcgcttgtgtctatagaagttgaatctgctattgcagcaaagattatgagcaatgtaaaaccatctgagaattccccaagtcttacatatactgtttcaatgctccagaaatttgcgagaaccttagcattgttaccttctgtccgagtgtccgaggacagttggtcactgatgattcggaggatactgattgtggtaaacaatcttttgaatgatgctttcattgggcttgaagaagaaaagaaaggccatgatattatgctgctgctagttccacctggaactgatcctctaccaacattgggagatgaagtaatgcctggaggcaatgtgcatatcatgaagaaatttcgtgtctttactgttcctaccatttcagctcttacgctttgctgcagcgtgatgctgactagttattatccagttcaggtcaatgttccaattcatgctttgatagctttgatgcgaagagtgctgttagttgatggatcattgcataacaagctgttcccttctacaacttcattgcatcaagagcttatttgttttgatcttccatcgttacattcaactttcttggatttgctgaatgcaactattaaaggcatgcgaagccaactcttacctcatggtgctagtatcatacggcttataacagagtacttcaaaatagcaaagctgcctactttgaggacaaaaacttatagcattttgcagctgttgctgacctccatgggtgttgggacgtctctgcacctgcttgaggcaacagtccgcaatgcagttgctgatctgaatgatgatggtgaaattaacatgactatgatcaacacaaattcatcgcaattgaccaatgaatcatcatcaaaagtttattcgaagaagaggaagcaagaaccacagatgcaaaactcaaccatctcaggttcagagaaagtagcaatcagcccaaggaaaagaaaaggttcttccataccaattacatcaaagggagtggcccctgaaagtacaggagatgttacactatcaactccacattctgtcaaaatagctgcgcttgaaacattggaagttcttctgaatgtgggaggttcattgcggatggatcgctggaggtcagaagtggacatgctcttaattaacgtggctagaagtgcttgcggcatgggagggagttatgagcaaaagccatccacatttggggagccaaacatatcggacttccaacttgcttcgcttaagggcctgctggcatcttttctttcttctcatgcccgtcctccttatttagccaacggaattgaactcttcagaaaagggaagctagagataggcactaaggttgcagagttttgttcacatgctttgcttgctttggatgtccttgtccaccctcgagccctttctctggaaagaacagttcctgcaagctctgggttcaactacactgcacagaaaaaaacagtttttggtgctggtacacaccagatctcaccatttggggaccagcctcaagcaatggaggtcgaagacatgtacgatgactggctaatatccaacaacaatgaaccaccagaggttccagtgaacggtagtgatgctgtggtaagtaaaggtgtgctggtggaggatggaaagcagctcaatcccatagcagaagatccaaaagtcgacccacccagaatcacagacgcagcacaagatgcaccagcatccaccaagactgatgtcaaggtggtcgatgcagctgcagccacagctgccaagccaaacacagcggagaatccttcgagttccaatgctgtcccctctccagtgcgcacaacagattctgattcacgtaagcatgcgtcatttcccgagcaggatagtcctcatgagaacaaaagcgcagccgtccatccaggtgaagcttctgcgactccaggtgttggttcaagccaccaccgccatgaagcacctgaggcccgttcagccagcttcacggaattgtttggttctgagtctggcatcgaatcagagtccgaagacttgatgccagatatcgtcgacggggaccctgactctgactaggtttgccgtcgtcatttgtgacatggcaatggaaattttgtgatgttcctgttttgttttgagcaaattgtacgacattgccggctgacagatgatgcagtatttgattgatagatatagatggagctaaattttgtgatgttcctgttttgttttaccaccaaaaatttgctcaatctgattggatttagaggcacgccggtgaatagaataaagtgcaaacaaagtatttcga

SEQ ID NO: 204955 - DNA, 1107 bp, Zea Mays
cacaagcgtagtcgccgtcacttctcccatggccgctccctccctcagccgtggcgggggccgacggcatagcgctcatcaccatcaccaaccttcctgtggtggatgcgccattgcctgatgcgagccgcggggaaatgagggatccttggaggcagagcaacgcggccccgtctccgtctctggccccagcgacgccgccggcccccgccacctcgtcccccgcggcgctgctccgcccgcagcgggaggcgttcgagcatgggctcctgcccatccctaagctcatcttcccggagggcatgctggcgcagaccctcgcccagctcaaggagaagctcgccgcctcagtccctgacgggcgcgtgcgcgctgcggccctggctaaggcgcagcagatcccgcaggagcaggcggcgctcgccctcggcacgctcgcggcgatgctcccggccgaggaccccgtgcttggggacggcgccatggatggtgctgccgccgacatccgcgacgtgctgctcttcctctatatccagtcttacaagcgcctcgtccacctccgcgttcgatggcttgttcgcagcaacagccgccgttttatgccttctcaagctaatgaagaaattcatcagttgtcctttctgcaaaagcatatggcgaatattcttactctcttggcagattctgttgagggtgagggtgacgattcactggtcttcactccaagtataatatgagaacaaccagaaccaaacacagatgctctgtattttcctcagggttattggcaaaactttacgatcggcattgttcctgggtttcatgaattgcagcatcttacgtcttctctggcttcataatcgtgagagatgatgcctgtgtggtggcggtgggtgtactgggcggatccggcggcatggacggttcatggcagagcgccccttgtttgtggagttcctcgaggcatatttataataatattatatatttatattatggtgatattttgtatttgtgaatgatctagctagctatctgtaaatgatctagttgtgaatgatattataattgtgatgcttttgtgaatatataattgtggtgcttttg

SEQ ID NO: 204956 - DNA, 1030 bp, Zea Mays
ctccctcagccgtggcgggggccgacggcatagcgctcatcaccatcaccaaccttcctgtggtggatgcgccattgcctgatgcgagccgcggggaaatgagggatccttggaggcagagcaacgcggccccgtctccgtctctggccccagcgacgccgccggcccccgccacctcgtcccccgcggcgctgctccgcccgcagcgggaggcgttcgagcatgggctcctgcccatccctaagctcatcttcccggagggcatgctggcgcagaccctcgcccagctcaaggagaagctcgccgcctcagtccctgacgggcgcgtgcgcgctgcggccctggctaaggcgcagcagatcccgcaggagcaggcggcgctcgccctcggcacgctcgcggcgatgctcccggccgaggaccccgtgcttggggacggcgccatggatggtgctgccgccgacatccgcgacgtgctgctcttcctctatatccagtcttacaagcgcctcgtccacctccgcgttcgatgggtacctctctgcgctctccccgatccagcttgttcgcagcaacagccgccgttttatgccttctcaagctaatgaagaaattcatcagttgtcctttctgcaaaagcatatggcgaatattcttactctcttggcagattctgttgagggtgagggtgacgattcactgggttattggcaaaactttacgatcggcattgttcctgggtttcatgaattgcagcatcttacgtcttctctggcttcataatcgtgagagatgatgcctgtgtggtggcggtgggtgtactgggcggatccggcggcatggacggttcatggcagagcgccccttgtttgtggagttcctcgaggcatatttataataatattatatatttatattatggtgatattttgtatttgtgaatgatctagctagctatctgtaaatgatctagttgtgaatgatattataattgtgatgcttttgtgaatatataattgtggtgcttttg

SEQ ID NO: 204957 - DNA, 3484 bp, Zea Mays
ccaggttgcctttggtgcaatctatgctcaggtaaagaagaaggcgtcgaggcggatctccaggagttctgggacttcaacgagttcgaggattaggctagcgaccacccccagtcagttgcctgtggttttgggtgtagatatatgcaagttggctattctctcctcatggcccacgtgggtagattggatggagaaagacggaccactgttcaaactgcctcagagcttttatgagaacttctctagtgttttctagagctgaaggcgcaaagatggaacacaagtgcttcagtgaaatttgatttctgcagctaacttaaatgcatcgatgttgtctctgcatttttcaaagctcacattagttattcagtgaacccagattattttttaacatcattaaaatcaaaaggattccactagaaacgttgcatgtgaaaatttcctgctttatttcgtgtctgcaaaggtacgtaccactgattccaccataaatcttctccacgtttggttttaggtactaatttttagtccctctaatttagtcctaaattatcaaacacaatgactaaaagagagattatctctattttagtcaatattcttgacaatttagggattaaaattaaggcttagaaaccgaacgccccctaactctgctgttgtttattatttgtaagaattattgatagtttgtagcaatttaagtgtattatttatgagaattattgacggtttctagcaatttcaagatgcaaattctgcttgcgaagctgactcgtgtgctctgtatttgtggatcttctgcactgtacacacatttgtcaccatgctagatggcactgatgatagtacggaaatcagttcataaagtgttgtcgttgtctcaaaggggaaaatagaacccaagagaagatggcagatgaacacattttgggacatgtctgtgacagaaaatctgtcaaccagcctagctccaatggccgacagcgtcccattaggtactgaggctaaaaatggaaaacaaatgccaaggaggggggagggcagcggctctcgtcctggaaatgtggcatggcggtgcggtggagcactggaggttgggcaatgtgacgctttgaagcctacttccctttcctccgtctctgtggtttggtttcaaccccttcgcttcttccgcagaagaacaaggagaaaagggaggggttcgtcacgaggaggaggaggaggaggaggtgcgtcgttccaatcgaaccccggcgcacaatctagaggccggggtggatcatcatcctcaccaagacagaactccatccccgttaaggtgttaaacattaatcatggccacaccgccagacggggcgcccgctggacctgatgacacgtcgccgccgccttcttccaactcgtcgacgccgcctccttccgactcatcgacgccgccacccaagtcctccggctcgggctcgccgtcgccatcgccacccgcaccgtcgttgtcgccgccaccaccggcgtcgccgcaggatagcacggcgccagcggccagaggctcgccggccgcgccgtcgagggactccccgtcaccaccggctccaaagcgcagcgacagtgactccgataatagtggcagcagcaagagcggaagcggaagcggaagcagaagcagaagcagcgggtcgacgcaggtggatgtcatcctggccggcgtggtgattggggtcctggcatttagcctgctgatgtgcatcgccgcgtgcgtgtgctgcgccaagaagaagaggaggaagaagcccccgcacatgaacatgccgtactacaccgacgagcacgggaacgtcttctacgcgaacagcatgcccaagtggcagagcagcgcgatggaccacggctggcacgcgccgtactcgcccgcaagcggggacatgagcggctcgcacgggccggggctgggccagatgccgccctcgccgggcatgccgtcgctgggcttctccaagagctcgttctcgtacgaggagctagccgcggcgacgggcggcttctcatcgacgaacctgctggggcagggcgggttcgggtacgtgtacaagggcgtgctcgcgggcagcggcaaggaggtggccgtgaagcagctcaaggccgggagcgggcagggcgagcgcgagttccaggccgaggtggagatcatcagccgagtccaccaccgccacctcgtctccctcgtaggctactgtatcgccggctcctcccagcgcctgcttgtctacgagttcgtgcccaacaacaccctcgagcaccacctccacgggaagggtgtgccggtgatggcctggccggcgaggcttgccatcgccctcggctccgccaagggcttggcttacctgcacgaagattgccaccccaggatcatccaccgtgacatcaaggcagccaacatccttctggacgagaatttcgaggctaaggtcgcggatttcggacttgccaagctgaccacagacaccaacacgcacgtctccacgcgtgtcatgggaactttcgggtatttggccccggagtacgcgtcgagcggcaagctcaccgacaagtcggacgtgttctccttcggcgtcatgctcctggagctcattaccggcaggagaccggttgatcccacgaactacatggaggacagcctggtcgactgggccaggcccctcttggcgcgcgcgctgtccgaagacaacttcgacgagctgctcgacccgcggctggagaacagggtcgaccggctggagctggagcggatgtgctcctctgccgcggcggccgtccgccactcagccaagcggcggcccaagatgaaacagatcgtccgtgctctggaaggggacgcgtcgctggacgacctgaacgagggggtgaagccagggcagagcatgatgttcagctccggatcggagtacgacggggccaactacgcggccaacatcagcaagttcaggaaggtggccttcgagagcagcgagttcagcaacgactacagcgggacaagcgagtacggcgccgactccggggaagcggcgacccagcggcagcaacatcgctgacctcctcgtccgagatgcgtgtgtggtgtacaatatttataccaaggggtcgatgtcgactgtcggatactatcagagatacccaaccctcgatcgtgacagctttagtacatgtaatgatgctcataaaatgtcatgtaacgtacgtatttgtgtgtgacatgttgctgcttgcttgactggcgaatttcgctgcttagttgtgcaaattttgctggcgggtgtccaaatgcgccgagggattaggaactttccgactccattttactgctctctttgtcccaaattataagccgttctagctagaagagctataagcctataaccagttataatttgaaaatttggaagtagtaaacattcatttgccgttatagtactgataatgcctg

SEQ ID NO: 204958 - DNA, 3846 bp, Zea Mays
agcgccgccgccgcctgcatgtgggacccacccgccaagccgcccctctcctgtttatcttctctgaatcgtctcccctgcctaagtcgcccacgacgcatgaggatcggcaacaacttccaccggccacccctattcaaacgcacttgtctacccccacttctttgtaccgcagccgttcctcctctcgcctcgcagcaacacgctcttgccgtcacgtggtgcctcggccttgtagccgtgtctaatctccgtcgagcagggaaccagcgctaagctcgccgcgatgtcgccttgccaagtcgccgtcgtccatcgcgatggagttctttatcgccgttcacattttgtcctcgccgtccgagcttcgcgttgagatcgtgagctgttcccgagcttcgaggaatcgatgatcaaacttcgacgatcaagtggacatgttcttcgagttctacaaagttaaagatcctgagcatctgtttggtgaaggttttgggtgtagatatatgcaagttggctattctctcctcatggcccacgtgggtagattggatggagaaagacggaccactgttcaaactgcctcagagcttttatgagaacttctctagtgttttctagagctgaaggcgcaaagatggaacacaagtgcttcagtgaaatttgatttctgcagctaacttaaatgcatcgatgttgtctctgcatttttcaaagctcacattagttattcagtgaacccagattattttttaacatcattaaaatcaaaaggattccactagaaacgttgcatgtgaaaatttcctgctttatttcgtgtctgcaaaggtacgtaccactgattccaccataaatcttctccacgtttggttttaggtactaatttttagtccctctaatttagtcctaaattatcaaacacaatgactaaaagagagattatctctattttagtcaatattcttgacaatttagggattaaaattaaggcttagaaaccgaacgccccctaactctgctgttgtttattatttgtaagaattattgatagtttgtagcaatttaagtgtattatttatgagaattattgacggtttctagcaatttcaagatgcaaattctgcttgcgaagctgactcgtgtgctctgtatttgtggatcttctgcactgtacacacatttgtcaccatgctagatggcactgatgatagtacggaaatcagttcataaagtgttgtcgttgtctcaaaggggaaaatagaacccaagagaagatggcagatgaacacattttgggacatgtctgtgacagaaaatctgtcaaccagcctagctccaatggccgacagcgtcccattaggtactgaggctaaaaatggaaaacaaatgccaaggaggggggagggcagcggctctcgtcctggaaatgtggcatggcggtgcggtggagcactggaggttgggcaatgtgacgctttgaagcctacttccctttcctccgtctctgtggtttggtttcaaccccttcgcttcttccgcagaagaacaaggagaaaagggaggggttcgtcacgaggaggaggaggaggaggaggtgcgtcgttccaatcgaaccccggcgcacaatctagaggccggggtggatcatcatcctcaccaagacagaactccatccccgttaaggtgttaaacattaatcatggccacaccgccagacggggcgcccgctggacctgatgacacgtcgccgccgccttcttccaactcgtcgacgccgcctccttccgactcatcgacgccgccacccaagtcctccggctcgggctcgccgtcgccatcgccacccgcaccgtcgttgtcgccgccaccaccggcgtcgccgcaggatagcacggcgccagcggccagaggctcgccggccgcgccgtcgagggactccccgtcaccaccggctccaaagcgcagcgacagtgactccgataatagtggcagcagcaagagcggaagcggaagcggaagcagaagcagaagcagcgggtcgacgcaggtggatgtcatcctggccggcgtggtgattggggtcctggcatttagcctgctgatgtgcatcgccgcgtgcgtgtgctgcgccaagaagaagaggaggaagaagcccccgcacatgaacatgccgtactacaccgacgagcacgggaacgtcttctacgcgaacagcatgcccaagtggcagagcagcgcgatggaccacggctggcacgcgccgtactcgcccgcaagcggggacatgagcggctcgcacgggccggggctgggccagatgccgccctcgccgggcatgccgtcgctgggcttctccaagagctcgttctcgtacgaggagctagccgcggcgacgggcggcttctcatcgacgaacctgctggggcagggcgggttcgggtacgtgtacaagggcgtgctcgcgggcagcggcaaggaggtggccgtgaagcagctcaaggccgggagcgggcagggcgagcgcgagttccaggccgaggtggagatcatcagccgagtccaccaccgccacctcgtctccctcgtaggctactgtatcgccggctcctcccagcgcctgcttgtctacgagttcgtgcccaacaacaccctcgagcaccacctccacgggaagggtgtgccggtgatggcctggccggcgaggcttgccatcgccctcggctccgccaagggcttggcttacctgcacgaagattgccaccccaggatcatccaccgtgacatcaaggcagccaacatccttctggacgagaatttcgaggctaaggtcgcggatttcggacttgccaagctgaccacagacaccaacacgcacgtctccacgcgtgtcatgggaactttcgggtatttggccccggagtacgcgtcgagcggcaagctcaccgacaagtcggacgtgttctccttcggcgtcatgctcctggagctcattaccggcaggagaccggttgatcccacgaactacatggaggacagcctggtcgactgggccaggcccctcttggcgcgcgcgctgtccgaagacaacttcgacgagctgctcgacccgcggctggagaacagggtcgaccggctggagctggagcggatgtgctcctctgccgcggcggccgtccgccactcagccaagcggcggcccaagatgaaacagatcgtccgtgctctggaaggggacgcgtcgctggacgacctgaacgagggggtgaagccagggcagagcatgatgttcagctccggatcggagtacgacggggccaactacgcggccaacatcagcaagttcaggaaggtggccttcgagagcagcgagttcagcaacgactacagcgggacaagcgagtacggcgccgactccggggaagcggcgacccagcggcagcaacatcgctgacctcctcgtccgagatgcgtgtgtggtgtacaatatttataccaaggggtcgatgtcgactgtcggatactatcagagatacccaaccctcgatcgtgacagctttagtacatgtaatgatgctcataaaatgtcatgtaacgtacgtatttgtgtgtgacatgttgctgcttgcttgactggcgaatttcgctgcttagttgtgcaaattttgctggcgggtgtccaaatgcgccgagggattaggaactttccgactccattttactgctctctttgtcccaaattataagccgttctagctagaagagctataagcctataaccagttataatttgaaaatttggaagtagtaaacattcatttgccgttatagtactgataatgcctg

SEQ ID NO: 204959 - DNA, 3734 bp, Zea Mays
agcgccgccgccgcctgcatgtgggacccacccgccaagccgcccctctcctgtttatcttctctgaatcgtctcccctgcctaagtcgcccacgacgcatgaggatcggcaacaacttccaccggccacccctattcaaacgcacttgtctacccccacttctttgtaccgcagccgttcctcctctcgcctcgcagcaacacgctcttgccgtcacgtggtgcctcggccttgtagccgtgtctaatctccgtcgagcagggaaccagcgctaagctcgccgcgatgtcgccttgccaagtcgccgtcgtccatcgcgatggagttctttatcgccgttcacattttgtcctcgccgtccgagcttcgcgttgaggttttgggtgtagatatatgcaagttggctattctctcctcatggcccacgtgggtagattggatggagaaagacggaccactgttcaaactgcctcagagcttttatgagaacttctctagtgttttctagagctgaaggcgcaaagatggaacacaagtgcttcagtgaaatttgatttctgcagctaacttaaatgcatcgatgttgtctctgcatttttcaaagctcacattagttattcagtgaacccagattattttttaacatcattaaaatcaaaaggattccactagaaacgttgcatgtgaaaatttcctgctttatttcgtgtctgcaaaggtacgtaccactgattccaccataaatcttctccacgtttggttttaggtactaatttttagtccctctaatttagtcctaaattatcaaacacaatgactaaaagagagattatctctattttagtcaatattcttgacaatttagggattaaaattaaggcttagaaaccgaacgccccctaactctgctgttgtttattatttgtaagaattattgatagtttgtagcaatttaagtgtattatttatgagaattattgacggtttctagcaatttcaagatgcaaattctgcttgcgaagctgactcgtgtgctctgtatttgtggatcttctgcactgtacacacatttgtcaccatgctagatggcactgatgatagtacggaaatcagttcataaagtgttgtcgttgtctcaaaggggaaaatagaacccaagagaagatggcagatgaacacattttgggacatgtctgtgacagaaaatctgtcaaccagcctagctccaatggccgacagcgtcccattaggtactgaggctaaaaatggaaaacaaatgccaaggaggggggagggcagcggctctcgtcctggaaatgtggcatggcggtgcggtggagcactggaggttgggcaatgtgacgctttgaagcctacttccctttcctccgtctctgtggtttggtttcaaccccttcgcttcttccgcagaagaacaaggagaaaagggaggggttcgtcacgaggaggaggaggaggaggaggtgcgtcgttccaatcgaaccccggcgcacaatctagaggccggggtggatcatcatcctcaccaagacagaactccatccccgttaaggtgttaaacattaatcatggccacaccgccagacggggcgcccgctggacctgatgacacgtcgccgccgccttcttccaactcgtcgacgccgcctccttccgactcatcgacgccgccacccaagtcctccggctcgggctcgccgtcgccatcgccacccgcaccgtcgttgtcgccgccaccaccggcgtcgccgcaggatagcacggcgccagcggccagaggctcgccggccgcgccgtcgagggactccccgtcaccaccggctccaaagcgcagcgacagtgactccgataatagtggcagcagcaagagcggaagcggaagcggaagcagaagcagaagcagcgggtcgacgcaggtggatgtcatcctggccggcgtggtgattggggtcctggcatttagcctgctgatgtgcatcgccgcgtgcgtgtgctgcgccaagaagaagaggaggaagaagcccccgcacatgaacatgccgtactacaccgacgagcacgggaacgtcttctacgcgaacagcatgcccaagtggcagagcagcgcgatggaccacggctggcacgcgccgtactcgcccgcaagcggggacatgagcggctcgcacgggccggggctgggccagatgccgccctcgccgggcatgccgtcgctgggcttctccaagagctcgttctcgtacgaggagctagccgcggcgacgggcggcttctcatcgacgaacctgctggggcagggcgggttcgggtacgtgtacaagggcgtgctcgcgggcagcggcaaggaggtggccgtgaagcagctcaaggccgggagcgggcagggcgagcgcgagttccaggccgaggtggagatcatcagccgagtccaccaccgccacctcgtctccctcgtaggctactgtatcgccggctcctcccagcgcctgcttgtctacgagttcgtgcccaacaacaccctcgagcaccacctccacgggaagggtgtgccggtgatggcctggccggcgaggcttgccatcgccctcggctccgccaagggcttggcttacctgcacgaagattgccaccccaggatcatccaccgtgacatcaaggcagccaacatccttctggacgagaatttcgaggctaaggtcgcggatttcggacttgccaagctgaccacagacaccaacacgcacgtctccacgcgtgtcatgggaactttcgggtatttggccccggagtacgcgtcgagcggcaagctcaccgacaagtcggacgtgttctccttcggcgtcatgctcctggagctcattaccggcaggagaccggttgatcccacgaactacatggaggacagcctggtcgactgggccaggcccctcttggcgcgcgcgctgtccgaagacaacttcgacgagctgctcgacccgcggctggagaacagggtcgaccggctggagctggagcggatgtgctcctctgccgcggcggccgtccgccactcagccaagcggcggcccaagatgaaacagatcgtccgtgctctggaaggggacgcgtcgctggacgacctgaacgagggggtgaagccagggcagagcatgatgttcagctccggatcggagtacgacggggccaactacgcggccaacatcagcaagttcaggaaggtggccttcgagagcagcgagttcagcaacgactacagcgggacaagcgagtacggcgccgactccggggaagcggcgacccagcggcagcaacatcgctgacctcctcgtccgagatgcgtgtgtggtgtacaatatttataccaaggggtcgatgtcgactgtcggatactatcagagatacccaaccctcgatcgtgacagctttagtacatgtaatgatgctcataaaatgtcatgtaacgtacgtatttgtgtgtgacatgttgctgcttgcttgactggcgaatttcgctgcttagttgtgcaaattttgctggcgggtgtccaaatgcgccgagggattaggaactttccgactccattttactgctctctttgtcccaaattataagccgttctagctagaagagctataagcctataaccagttataatttgaaaatttggaagtagtaaacattcatttgccgttatagtactgataatgcctg

SEQ ID NO: 204960 - DNA, 348 bp, Zea Mays
gtataaactaccggtgaccagggctagccctagggccatgcagcggaggcgaccgtcggggggtcaggaaagaaaggggcctaatatgtaatagaatagtagtgttaatgttaaattattgtcttgtgaaatcgcatagaagcgaaagagaggacacacacattaggctaaagcgtcggttaaaggcctcctacaccgctgcacagaaccagtctcgtcctcactgtcatcgccgatcacatgtcacaggctcgcaactccctgatcttagatgttaccaaagaagtatcttttcatgagaagcaatggatgtgatggagttatattcttcattaagcgcgaggttac

SEQ ID NO: 204961 - DNA, 2006 bp, Zea Mays
ctgagaccgacccccgacctagccgcggtaaataaatacccgacttcgccggcgtccgcgagcttcgagaatacatccttccccgcgttttaccctaacaacctaactagctgcggttctccactatcactcgctgctactgcacctacttcctttccgctctggtactgttgctggcttgctgctgctcttggtggtggtggtggtggcaccgaaaccctagcccttgccctcatgtcgcagcaggaggctgtggacccgccttcggcgacggacgagcggctgggaggtctaccgcggagcggctccaccagccgcctcaacgcgcaggcgccggagttcgtgccgcgcgctgccgcggttccccctccccctccgcagcagaaggtggtgcgtttgttcgcgccgcctccccacgcggcgttcttcgtcgcggcaccccggcccccaccgcccccgttcgagtactatgcggcggttgccaccggtgggggtggcaggttcggtccccccgccgccgctgcagagcaggaggccgaggctgagcagccgccgagggacgggagctttgatgaccccgtgcccaagatcagaaagcaggtggagtattatttcagtgatataaacctggccaccactgaacatttgatgaggtttatttcaaaggatcctgaaggatatgtgccaatatcagttgttgctggctttaagaaaattaaggctttggttcaaagtaactccatgcttgcttctgctcttcggacttcatcaaagcttgtggtcagtgacgatggtgcaagagtaaaacgtgagcaaccatttacagaatcggatttagaagaactccaggcccgaattgttgttgcagaaaatctcccagatgatcattgttaccagaacctgatgaggctcttttcagttgttggcagtgtcaggacaattagaacttgctatcctcagaccccaaatggcactggtccagctactaacagatctgcaaagctagatatgctttttgccaacaaacttcatgcttttgttgagtatgatactattgaagatgctgctagagcgattgtggaacttaatgatgagaggaactggagaagtgggcttagagttcgattgttgagcacttgcatgggaggtaaagggaaaaagggtgggcatgaatctgatgggtatggtgacgaggagaatgtctctacttctgatcaaccatatgataaatatttagaagaaacacctcagatgtcagatgtgcctggagaacacatgactgaggatagcgctggagatatgggacgaggacgtgtccgggggcgtggtcgtggtggcaggggccgggggcgtggttaccatcaacagaacaacaatcaacaccaccagcactaccaaaacagtagccaccacagtaacagtagtagtacccgtccagtgggaaccccaccgccatctggccacccagtcatgattgagcagcagcaacagcagcaggcagctcaaccacagcccctcacagcggctaacaaacagcctccaggtcctcgcatgccggatggctcacggggattcagcatgggcagagggaagccgcaaacattgacgcccaaagtatccgagtctgaacctgaacaatgaattcgaacctcgcagagagactaatgggttccggtttgccatgttgatacatatgctgagagacttgccttttagaagtctgtcctcgaggtcgctttctaatttatgggaccatatacatttctgcatgtgctgtgtgtgtacttccaaagccagcagacactggttcgcgaatagtacggttgcggccattctgtaattccatttttgccccccttatgcagttttgggtgcaatactgaaaatcaaaaactcatgctaaaaaggttgaaaagaatcgagtcgttgtaaaataagattgtttcttcgctgtttgcgggggactgatcatttcgatgcttttaccattttgttgtttattatcc

SEQ ID NO: 204962 - DNA, 2913 bp, Zea Mays
gaccgacccccgacctagccgcggtaaataaatacccgacttcgccggcgtccgcgagcttcgagaatacatccttccccgcgttttaccctaacaacctaactagctgcggttctccactatcactcgctgctactgcacctacttcctttccgctctggtactgttgctggcttgctgctgctcttggtggtggtggtggtggcaccgaaaccctagcccttgccctcatgtcgcagcaggaggctgtggacccgccttcggcgacggacgagcggctgggaggtctaccgcggagcggctccaccagccgcctcaacgcgcaggcgccggagttcgtgccgcgcgctgccgcggttccccctccccctccgcagcagaaggtggtgcgtttgttcgcgccgcctccccacgcggcgttcttcgtcgcggcaccccggcccccaccgcccccgttcgagtactatgcggcggttgccaccggtgggggtggcaggttcggtccccccgccgccgctgcagagcaggaggccgaggctgagcagccgccgagggacgggagctttgatgaccccgtgcccaagatcagaaagcaggtggagtattatttcagtgatataaacctggccaccactgaacatttgatgaggtttatttcaaaggatcctgaaggatatgtgccaatatcagttgttgctggctttaagaaaattaaggctttggttcaaagtaactccatgcttgcttctgctcttcggacttcatcaaagcttgtggtcagtgacgatggtgcaagagtaaaacgtgagcaaccatttacagaatcggatttagaagaactccaggcccgaattgttgttgcagaaaatctcccagatgatcattgttaccagaacctgatgaggctcttttcagttgttggcagtgtcaggacaattagaacttgctatcctcagaccccaaatggcactggtccagctactaacagatctgcaaagctagatatgctttttgccaacaaacttcatgcttttgttgagtatgatactattgaagatgctgctagagcgattgtggaacttaatgatgagaggaactggagaagtgggcttagagttcgattgttgagcacttgcatggtaaccttccattgaacttcattaattgccgatgagatggcttattggtgttcaaccgcttgtacatacatattacaaggaatattccaaaaatcctctggggcctcggaacagctatacaggaatcatattacaaagccctggatgaactctgcagaaatacatttattttgaatctactttttagtgaagcagataccacccaatgaccgaccagatccatagggggtgatggggataacttcttttggaaacttgaaagctctcttgaactgctgtgctatagcattataacacagttttttcttaaaaaatcagggagaagtctatggccatccaacgttcatatttggcgattcagctattttgatgggtggttttggtgacgtggatgacaagtggcagtcagtcccgcttgtcatcattgttcaattttttagaatggctcaaaatggagaaatgaccaaaaccaaagttgttatagttgagatctactttgcacttgacttgttcatttgaaattatttacattctcaaaactctgtttgacgttctcatattttgaaatccaaaatttttgaactgttcaaattaacttggatggggaaatgacccaaactgaagatgtagatctcatcgatgagatctacaactttgtagctggcaactttttttagtgaaaatcatttatggtcccaaaattttgtttgaagtcacattttgaagttcaaaattttcaaacctccttggatggagaaaaaacggccagaaacaaagatttacttctccaccagatggagggggaagaagataatgctgacatgtgggcttgctgtttccctaacttgtttttgtgtcacaaaacaattttctaatttatttgctgcctgctctttgcaattcagacaaagggaggtaaagggaaaaagggtgggcatgaatctgatgggtatggtgacgaggagaatgtctctacttctgatcaaccatatgataaatatttagaagaaacacctcagatgtcagatgtgcctggagaacacatgactgaggatagcgctggagatatgggacgaggacgtgtccgggggcgtggtcgtggtggcaggggccgggggcgtggttaccatcaacagaacaacaatcaacaccaccagcactaccaaaacagtagccaccacagtaacagtagtagtacccgtccagtgggaaccccaccgccatctggccacccagtcatgattgagcagcagcaacagcagcaggcagctcaaccacagcccctcacagcggctaacaaacagcctccaggtcctcgcatgccggatggctcacggggattcagcatgggcagagggaagccgcaaacattgacgcccaaagtatccgagtctgaacctgaacaatgaattcgaacctcgcagagagactaatgggttccggtttgccatgttgatacatatgctgagagacttgccttttagaagtctgtcctcgaggtcgctttctaatttatgggaccatatacatttctgcatgtgctgtgtgtgtacttccaaagccagcagacactggttcgcgaatagtacggttgcggccattctgtaattccatttttgccccccttatgcagttttgggtgcaatactgaaaatcaaaaactcatgctaaaaaggttgaaaagaatcgagtcgttgtaaaataagattgtttcttcgctgtttgcgggggactgatcatttcgatgcttttaccattttgttgtttattatcc

SEQ ID NO: 204963 - DNA, 2465 bp, Zea Mays
cgccgctcggcgccgcctaggcgctccaaacgcctagcagcccgcctacccccctagtccaggtgggaggccgtggcctagcgcctaggcgtgtcgtagttgtggattttcaaaaccctgctctgcccctgaatggacctgctagcaattgaaaattctggtggagtattatttcagtgatataaacctggccaccactgaacatttgatgaggtttatttcaaaggatcctgaaggatatgttgttgctggctttaagaaaattaaggctttggttcaaagtaactccatgcttgcttctgctcttcggacttcatcaaagcttgtggtcagtgacgatggtgcaagagtaaaacgtgagcaaccatttacagaatcggatttagaagaactccaggcccgaattgttgttgcagaaaatctcccagatgatcattgttaccagaacctgatgaggctcttttcagttgttggcagtgtcaggacaattagaacttgctatcctcagaccccaaatggcactggtccagctactaacagatctgcaaagctagatatgctttttgccaacaaacttcatgcttttgttgagtatgatactattgaagatgctgctagagcgattgtggaacttaatgatgagaggaactggagaagtgggcttagagttcgattgttgagcacttgcatggtaaccttccattgaacttcattaattgccgatgagatggcttattggtgttcaaccgcttgtacatacatattacaaggaatattccaaaaatcctctggggcctcggaacagctatacaggaatcatattacaaagccctggatgaactctgcagaaatacatttattttgaatctactttttagtgaagcagataccacccaatgaccgaccagatccatagggggtgatggggataacttcttttggaaacttgaaagctctcttgaactgctgtgctatagcattataacacagttttttcttaaaaaatcagggagaagtctatggccatccaacgttcatatttggcgattcagctattttgatgggtggttttggtgacgtggatgacaagtggcagtcagtcccgcttgtcatcattgttcaattttttagaatggctcaaaatggagaaatgaccaaaaccaaagttgttatagttgagatctactttgcacttgacttgttcatttgaaattatttacattctcaaaactctgtttgacgttctcatattttgaaatccaaaatttttgaactgttcaaattaacttggatggggaaatgacccaaactgaagatgtagatctcatcgatgagatctacaactttgtagctggcaactttttttagtgaaaatcatttatggtcccaaaattttgtttgaagtcacattttgaagttcaaaattttcaaacctccttggatggagaaaaaacggccagaaacaaagatttacttctccaccagatggagggggaagaagataatgctgacatgtgggcttgctgtttccctaacttgtttttgtgtcacaaaacaattttctaatttatttgctgcctgctctttgcaattcagacaaagggaggtaaagggaaaaagggtgggcatgaatctgatgggtatggtgacgaggagaatgtctctacttctgatcaaccatatgataaatatttagaagaaacacctcagatgtcagatgtgcctggagaacacatgactgaggatagcgctggagatatgggacgaggacgtgtccgggggcgtggtcgtggtggcaggggccgggggcgtggttaccatcaacagaacaacaatcaacaccaccagcactaccaaaacagtagccaccacagtaacagtagtagtacccgtccagtgggaaccccaccgccatctggccacccagtcatgattgagcagcagcaacagcagcaggcagctcaaccacagcccctcacagcggctaacaaacagcctccaggtcctcgcatgccggatggctcacggggattcagcatgggcagagggaagccgcaaacattgacgcccaaagtatccgagtctgaacctgaacaatgaattcgaacctcgcagagagactaatgggttccggtttgccatgttgatacatatgctgagagacttgccttttagaagtctgtcctcgaggtcgctttctaatttatgggaccatatacatttctgcatgtgctgtgtgtgtacttccaaagccagcagacactggttcgcgaatagtacggttgcggccattctgtaattccatttttgccccccttatgcagttttgggtgcaatactgaaaatcaaaaactcatgctaaaaaggttgaaaagaatcgagtcgttgtaaaataagattgtttcttcgctgtttgcgggggactgatcatttcgatgcttttaccattttgttgtttattatcc

SEQ ID NO: 204964 - DNA, 259 bp, Zea Mays
atcaacaatagaagtttcaactaatcagcttactaggatgaagcctgcaacggtggcactgctcattttgttgaacatgatgtgcatagttgcatactttgatcatggaacgatggctgaagaaaccaccttgctggcaaattcgtatggaagaaatgaaggaaccaagggcatacatcatggaagaaagctgatggacaatagtattggttcaaaccagttgtttcttactgagataagactacttgataaaaaaact

SEQ ID NO: 204965 - DNA, 452 bp, Zea Mays
gcactaaaaccataggaagataacgaagagagggaaaacaagtgtggaagagggaaaactggaaaaggcacagcaaaccgagaaaatggcggctcggcgtgggcgagagtgggacggggacgagcagggcgcggcgctgccaacgccggcgcccctcggcgcgccggtcgtctgccttctcagctccgccggagacctagccgccggcgccttcgtaggctccctcgtcggatacggaaaaggtttgatcacaaaccaaggcacgaaggcttgtcttagcattgctggatcttctgcaaagacatttgctgctcttgctggtgtccaaagtttcatcatgtgcttgctaagaagactgcgtgggaaagatgacatgatcaatgcgggtatggcaggttgttgcacaggcattgctttgagctttccagataggcgacgggagaagagtgaag

SEQ ID NO: 204966 - DNA, 557 bp, Zea Mays
aaataagattgggcagacaagtgcgccccaggcaatgttccacagctgtgtcaccttcgcagcattctcatgcataatggacggtctcagcaagcagcaggcagcaatggcactcacacttgatgtgaaatctccaactgtcaagtatgaggagggccgggtcatcccaccattcactcttccgccgcttctggatgcattggatcctctaggttcattctgccagacccttatcaagcctaagcattaggagtgcgctgaggcttgttaccccaaaaaggcagtttcgatctatagtttggcactgtatgctctataaccgttctgaatttgtctccagtcatgctgttcaagtttggtaactgtagtggcgctataggacatatgcccattttttgtcaatggtacattttttatgaaacttgctgaagagattataaccataagattgttcattggtgaagatttgatagttcattgcaacaatggtgttcaactctctgagttgaagatattttttcagaaaacaaactgttagcaggaaatctgaataggtg

SEQ ID NO: 204967 - DNA, 1458 bp, Zea Mays
ctcctatgttggcaacatttcccttttccatgacatggaagagaagctccaccagacagaagcagatccagcaattatcgccttgcttcttgaaaaaaccaatccatggattagtgaaaacatagtttatgttgctggcgatagggttgttaccgatccactttgcaagccatttagcatgggaagaaatctcatttgtgtgtactcgaaaaagcatatgaatgattttccagagctaattgagatgaagaggagatcaaacactcggagcctcaaggaaatggccttgcttttacgtggtggttcacagctaatttggattgcaccgagtggtggtagagatcgcccaaatccttcaacaggagagtggtacccggcaaatgaaacgagatggtacagacagttgtagaggttgctcacaagaattatccttttttttttgcctaagacaatgcttgagaagtccgctgcatggtggacaatatgaggaggcttctggagcatgctggtgttcctgggcacatatatccactatcattactgtgctacgaggttatgcctccaccacaacaggtcgagaaagagattggtgaacagagggtgatatccttccatggagtaggcttgtcagcaactgaagaaacaaagtatggggatattacttgtcataccaagaatgctgatgagggaagggagctattcacaaatactttgtacaactcagttgttaatcagtacaatgtcctcaaatctgctatctttagagatcgtggagcagctgtatcaaacaatgccatctcactgtcacaaccatggcgatgaatgtagctttcccagtccagattcgatactgaagttaccttttcagaagaacaggtgaactgcaattgtgcaatttttctgggaaaaactcttgaagtttaatctttctgatatcactggactttaccaatcatggtggagcttattactctaatgcagatcctcgctaagatgtctggctggtcaagggtgattggtgattctgcagatagggatcctcgtaacattgcatgccgtcgtccgcaaattactgctccctcaggttgttcagtaatgtgctggttgggcactgaggaatccatcaggttgcatccttttgtctagacgtcgatttgtgttgttgaagtggtaaacattttcatcctgggctgtatcgtcatcatgtatagataggctcgagtctctctcttttttttttggctccacaattttttggagatataaaagcggcaggagttatgacatgcccacagtcggccctccttgtagaaatcctttggatgtaacctgtctctttcttatatacatactgaaagtcaaggcagatatcccgtgtttcgagtacgtggctccgtgactacccgcgtctgcgtctcctgtctagctggagctgtagcgtaaagaatctatctgcag

SEQ ID NO: 204968 - DNA, 2073 bp, Zea Mays
tcccaggccgccattcccactagggttttcggattattaggtttctagaacctttcttcgccgccccccccccccccccccccagaccccatgcacgctccgccgctggtcgcgttcgcagggggcgcctgccccgcttccgctgcctcctcgctgtcgccctggttggcctcgctgcggcccgccatcgttgctgcgccggcgaggctgctatggttccgccgcggggcactccggctggaagccaaggccgcgtggagggctaccggagggggacggggcccgcgggtcccggccaagggcgctgtgctcgcctcctatatgggtgccgaggaggtggtgggacccttgtcgctgctcgacgaggaagagctcattttgcacataagaaaggaacgggataatggaaaacttcctgcagatgttgccattaacttggaggagctgtattataattacaggaatgcagtcctgcaaaatggtgatcctaatgcatatgagatcatgctttcaaatatgacagctttgtttgatcgtgttctactggatgtacagcagaatccatttacctttccaccgtatcacaaagctgtgcgggaaccatttgactattacatgtttggtcagaactacattaggcctctggtagatttcaggaactcctatgttggcaacatttcccttttccatgacatggaagagaagctccaccagggccacaatgttgttttgatgtccaaccatcagacagaagcagatccagcaattatcgccttgcttcttgaaaaaaccaatccatggattagtgaaaacatagtttatgttgctggcgatagggttgttaccgatccactttgcaagccatttagcatgggaagaaatctcatttgtgtgtactcgaaaaagcatatgaatgattttccagagctaattgagatgaagaggagatcaaacactcggagcctcaaggaaatggccttgcttttacgtggtggttcacagctaatttggattgcaccgagtggtggtagagatcgcccaaatccttcaacaggagagtggtacccggcgcattttgattcatccacagtggacaatatgaggaggcttctggagcatgctggtgttcctgggcacatatatccactatcattactgtgctacgaggttatgcctccaccacaacaggtcgagaaagagattggtgaacagagggtgatatccttccatggagtaggcttgtcagcaactgaagaaacaaagtatggggatattacttgtcataccaagaatgctgatgagggaagggagctattcacaaatactttgtacaactcagttgttaatcagtacaatgtcctcaaatctgctatctttagagatcgtggagcagctgtatcaaacaatgccatctcactgtcacaaccatggcgatgaatgtagctttcccagtccagattcgatactgaagttaccttttcagaagaacaggtgaactgcaattgtgcaatttttctgggaaaaactcttgaagtttaatctttctgatatcactggactttaccaatcatggtggagcttattactctaatgcagatcctcgctaagatgtctggctggtcaagggtgattggtgattctgcagatagggatcctcgtaacattgcatgccgtcgtccgcaaattactgctccctcaggttgttcagtaatgtgctggttgggcactgaggaatccatcaggttgcatccttttgtctagacgtcgatttgtgttgttgaagtggtaaacattttcatcctgggctgtatcgtcatcatgtatagataggctcgagtctctctcttttttttttggctccacaattttttggagatataaaagcggcaggagttatgacatgcccacagtcggccctccttgtagaaatcctttggatgtaacctgtctctttcttatatacatactgaaagtcaaggcagatatcccgtgtttcgagtacgtggctccgtgactacccgcgtctgcgtctcctgtctagctggagctgtagcgtaaagaatctatctgcag

SEQ ID NO: 204969 - DNA, 2231 bp, Zea Mays
aaggccctattttaaatttctgaggagaaaaactaaacagaaaaatcgaggaaaatatgctgctagcaggggtgagcgggccgaggcttctcgtgtcgactgtcgacgccttcttcgccctctccgtccggcttccgcctcagctgaactcatgcgctatttcccaggccgccattcccactagggttttcggattattaggtttctagaacctttcttcgccgccccccccccccccccccccagaccccatgcacgctccgccgctggtcgcgttcgcagggggcgcctgccccgcttccgctgcctcctcgctgtcgccctggttggcctcgctgcggcccgccatcgttgctgcgccggcgaggctgctatggttccgccgcggggcactccggctggaagccaaggccgcgtggagggctaccggagggggacggggcccgcgggtcccggccaagggcgctgtgctcgcctcctatatgggtgccgaggaggtggtgggacccttgtcgctgctcgacgaggaagagctcattttgcacataagaaaggaacgggataatggaaaacttcctgcagatgttgccattaacttggaggagctgtattataattacaggaatgcagtcctgcaaaatggtgatcctaatgcatatgagatcatgctttcaaatatgacagctttgtttgatcgtgttctactggatgtacagaatccatttacctttccaccgtatcacaaagctgtgcgggaaccatttgactattacatgtttggtcagaactacattaggcctctggtagatttcaggaactcctatgttggcaacatttcccttttccatgacatggaagagaagctccaccagggccacaatgttgttttgatgtccaaccatcagacagaagcagatccagcaattatcgccttgcttcttgaaaaaaccaatccatggattagtgaaaacatagtttatgttgctggcgatagggttgttaccgatccactttgcaagccatttagcatgggaagaaatctcatttgtgtgtactcgaaaaagcatatgaatgattttccagagctaattgagatgaagaggagatcaaacactcggagcctcaaggaaatggccttgcttttacgtggtggttcacagctaatttggattgcaccgagtggtggtagagatcgcccaaatccttcaacaggagagtggtacccggcgcattttgattcatccacagtggacaatatgaggaggcttctggagcatgctggtgttcctgggcacatatatccactatcattactgtgctacgaggttatgcctccaccacaacaggtcgagaaagagattggtgaacagagggtgatatccttccatggagtaggcttgtcagcaactgaagaaacaaagtatggggatattacttgtcataccaagaatgctgatgagggaagggagctattcacaaatactttgtacaactcagttgttaatcagtacaatgtcctcaaatctgctatctttagagatcgtggagcagctgtatcaaacaatgccatctcactgtcacaaccatggcgatgaatgtagctttcccagtccagattcgatactgaagttaccttttcagaagaacaggtgaactgcaattgtgcaatttttctgggaaaaactcttgaagtttaatctttctgatatcactggactttaccaatcatggtggagcttattactctaatgcagatcctcgctaagatgtctggctggtcaagggtgattggtgattctgcagatagggatcctcgtaacattgcatgccgtcgtccgcaaattactgctccctcaggttgttcagtaatgtgctggttgggcactgaggaatccatcaggttgcatccttttgtctagacgtcgatttgtgttgttgaagtggtaaacattttcatcctgggctgtatcgtcatcatgtatagataggctcgagtctctctcttttttttttggctccacaattttttggagatataaaagcggcaggagttatgacatgcccacagtcggccctccttgtagaaatcctttggatgtaacctgtctctttcttatatacatactgaaagtcaaggcagatatcccgtgtttcgagtacgtggctccgtgactacccgcgtctgcgtctcctgtctagctggagctgtagcgtaaagaatctatctgcag

SEQ ID NO: 204970 - DNA, 1578 bp, Zea Mays
aaggccctattttaaatttctgaggagaaaaactaaacagaaaaatcgaggaaaatatgctgctagcaggggtgagcgggccgaggcttctcgtgtcgactgtcgacgccttcttcgccctctccgtccggcttccgcctcagctgaactcatgcgctatttcccaggccgccattcccactagggttttcggattattaggtttctagaacctttcttcgccgccccccccccccccccccccagaccccatgcacgctccgccgctggtcgcgttcgcagggggcgcctgccccgcttccgctgcctcctcgctgtcgccctggttggcctcgctgcggcccgccatcgttgctgcgccggcgaggctgctatggttccgccgcggggcactccggctggaagccaaggccgcgtggagggctaccggagggggacggggcccgcgggtcccggccaagggcgctgtgctcgcctcctatatgggtgccgaggaggtggtgggacccttgtcgctgctcgacgaggaagagctcattttgcacataagaaaggaacgggataatggaaaacttcctgcagatgttgccattaacttggaggagctgtattataattacaggaatgcagtcctgcaaaatggtgatcctaatgcatatgagatcatgctttcaaatatgacagctttgtttgatcgtgttctactggatgtacagaatccatttacctttccaccgtatcacaaagctgtgcgggaaccatttgactattacatgtttggtcagaactacattaggcctctggtagatttcaggaactcctatgttggcaacatttcccttttccatgacatggaagagaagctccaccagggccacaatgttgttttgatgtccaaccatcagacagaagcagatccagcaattatcgccttgcttcttgaaaaaaccaatccatggattagtgaaaacatagtttatgttgctggcgatagggttgttaccgatccactttgcaagccatttagcatgggaagaaatctcatttgtgtgtactcgaaaaagcatatgaatgattttccagagctaattgagatgaagaggagatcaaacactcggagcctcaaggaaatggccttgcttttacgtggtggttcacagctaatttggattgcaccgagtggtggtagagatcgcccaaatccttcaacaggagagtggtacccggcgcattttgattcatccacagtggacaatatgaggaggcttctggagcatgctggtgttcctgggcacatatatccactatcattactgtgctacgaggttatgcctccaccacaacaggtcgagaaagagattggtgaacagagggtgatatccttccatggagtaggcttgtcagcaactgaagaaacaaagtatggggatattacttgtcataccaagaatgctgatgagttgacaggttagaaaccgtgtttcgacagctgacaggttaaagaagcgaggcctccttcatccggaacatttttttgtgaccaagaagaggaggacgtttaacacattcttaccacct

SEQ ID NO: 204971 - DNA, 1753 bp, Zea Mays
agcagattgaagctgcaaaggatttgatcaagcaagctatgaatcagtttccgtcaattatttttgttgaaggtgccgatttggagttggtcaggtatcctaatgctgatacagctagctttcttcatggggggtcatcgtttacttgcaccgaagagggacattgaccattatcccttagccttgcatggtgtatgtagttggtaactggtaaggctgcctattgccgaaaggaaacagaaattgtatggcattggaagactacaacgagtgtatcattgccatgacaaggcttctacatcaccatgttaggtttgctaagctgaatcatttgtgactgtatgttgtctgcaaaacagaacttccatatgctatagtttgaacgattaagaatttagtgttgttgttacttatttggtatgtcactattaactatagtttgagttgcttagcattattattcttcccattagtcacggttgctattagaaagtatgtgtgatatgatatagtgtatttaatatcaatattattgtgttatccattgaagctgtttatgtttatgcgctgcatctataaattaaattctaaagtaaccctttgtttgtatttctatttcttgttacaatttttaatgatggttaaccaagatgcacagaaattcgtggagattttgttaatggaattcttttcttgaacattgttttttgaatgacatagttatcaatgctggacagtgtttaagaaatatgagatatgagctactatgcaggcgtattttcttaatgccgttcttatttaactgcaatttgtacagtctggttgccccttgatggtttcctataacctgttgctttatgttaggaatctcagccacccagctaccctcctgggccagggaattacaacagttattatgggcaatcccagggtcctaattaactatggccaacctcagtatccgcaacatgcacctcaacagaactacagccatggctatggtgatcctagatacaatgctccccctccgaaccagcagtactatggtcagccaccgatgggcccgcagcaaggctatcctcaacagccagatccctatgctaggcctccatacagtggacctgctggtcaatggacccccaggggtgctcccgccgcagatggcatggctcctaccaggcggcaccagcatcttatgggccaccgtctcagcaacctcctgcttatgggcaaacatatggtgcagcaacgggacctgatgggtatggtcaacagggttacccacagcagggtggccaggtaccaacttcatatggtcagagtgcaccagcagctccaggatatcctcagcaaggtggctatgcacagtacccgcagacccaaccagcatatggtgatcaagcagcagctcaagccaatgcgaactatgggtaccagggagctccagcagatcccaactacggaagtgcctacccacagcagccagggtatggtcaggcaactggttatgtatgcctcctctgcgccagcggccagccagcctgcctatggccaggcaggatacacccagccacctacaaatcctccaagttatgatcagtctgcagcaccagcggtttcgagtttatgggatgacggggtgccgtttcgagttggcaatagatctgttgtttatccaaactcagttggttttgttttgtatttgttccgaatcatgttggtacagttagcatgtgaatggacaagccattag

SEQ ID NO: 204972 - DNA, 540 bp, Zea Mays
atactttttggtccatttggaagacaaacaccccggtccagtcctcccccgatgctgagggatacccgtggaagccctcatggccacctgaggccgggcaaccttccccagtttggaagggacacaagcggatccgagcaaccacgccctccgccgccactatcgtccacaccgctgccatccgctctgctgccgctccatcgtcgtccttccccgacgcagtcgcgagcgggacgtgaggcgacagtgccctccaccaccgccaccgtctcggatttgtcgccctccgccgccatctctgccctcggttcactgtcctccaccgtcgtcttccgcgacacgatgtacaatacaatgttgtctccaagacacagtacatggtcttctccaagatccagtacaaggtcgtctcctccaagatccaaaccccaacgctagtgagcagccgaagacttcttttccgctatgcttgattgagagggctgtgtctacacccagttctgcctgtggcttgggctagtattttcttcttactgcgct

SEQ ID NO: 204973 - DNA, 2006 bp, Zea Mays
cccggcaccctgcccgcctgtcgacactgtcgggtccggttggtgccccagcgaaaagcaaaagaaatactactaccggaagaaactgcctcctcctctcctcgcttctctctttggaggcaggcgcaggcgggcgagtggtccggtacacctctagctgcagatcccagctcgcgcggtccagcaggattctagcggatggaatgccacagctggtacgcgctgaaatcaagaagatctgtagcgatcgctggtgcggggtttgaagatgctgcagaaggcgccagcgatcttggtgacacgatgagtcttgcacgcaagcagaaggttgtcaaggaaacagtggagatggaggaggagcaggagtttgtttggaaatctaacctgctcccctacaaggatgatgatgccttcgttcttcctgagagtagcaaggaggaatacgcatcaacatcaggagacacagctccgtctggcaaaatggaccccaggatagaaaggtctggaagcaatgggacaagcaaggtccctagactgggttccatgcttgggacagccagcatggctggatttggcaaggcagtggagattctagacacgttaggctgcttgatgacgaccttgagctcagatggtggctttgtttccaggaccaagaccaaaggatgcaagatatcaattcttgcttttgaggttgccaacacaatacttaaaggtgctagtattatgcaatctctctcggaagacactgtcacatacttcaaacaggttgtgcttccttccgaaggtgtgcagaatttggtttccagtgagatgagtgaactgatgcgaattgcagctaacgacaaaagagaagagctgaaaatattttcccaggagattgttaggttcgggaaccgctgtaaagatccccagtggcataacctggatcgctactttgtgaagttagaatcagagagtgcaccccagaagcagctgaaagaaacagcaatagcagagatgcaaaagttgatgaacctcgttcaacgtacaactgatttgtatcatgagttgcatgcactagacagattcgagcaagagtaccgctctaggctaaacggaaagggtaatacagatagatttgaaaaaggagacaatattcaaattgtgagactagagttgaagacccaaagtagttatgtgaagagcttgaaaaaaagatctctctggtccaagacgttggaagaagtggtcgagaagcttgtagaagttgtgcactacttgcatgtcgagatcgacaatgctttcggaccttctgatggaggaggtgtggtggtgaatgcggaaccaaccgtgagctgtcaaaggctaggtcctgccgggctcgcattacattatgcaaacattatcatccagatatatagcatcgtttctcgatccgggtatgtgccagcaaattcaagagacgccctctaccagggactgccaccgaggatcaagtcggcgctaccaaatgagctgaggacgacctcggcgcctcaggtgctcaccgtcgaccagataagggctaggatggagaagaccctgaaatggctcgcgcccatggccatcaacaccacctgcgcccgaggcttcttcctgaggtttagcgagtgggcgaaatcagggaccgagagcgttggcagacgactgggccaagcggatcgggtcgagacgctgtaccatgcggacaaggcaaggaccgaggatcgcattctggagctggtcgtctggcttcaccacctcgtcagccagagtagccggccggcgttgcaaaaaggccactgaccagatagatgccaggaatggtggaagaagctggagctgttcttgccatggagaggaggacgtccgggtacagtcggggagatgcttgtatatgcgtgctttgtaacatcagctgagtaggttttagttactactttgttctgcttgttgtttgtaagtgtacttgtgaataccacgttatacaatgcaaagaaaaacgc

SEQ ID NO: 204974 - DNA, 2366 bp, Zea Mays
cccggcaccctgcccgcctgtcgacactgtcgggtccggttggtgccccagcgaaaagcaaaagaaatactactaccggaagaaactgcctcctcctctcctcgcttctctctttggaggcaggcgcaggcgggcgagtggtccggtacacctctagctgcagatcccagctcgcgcggtccagcaggccagcactaagctccctccctcctgtccacctggacagcgcgcccgatcgtgaatcgtcgcttgctctggagaaagcttgcatttttttttcgtttcttcttcttcttcttcttcttcttctttttttttttgcttcgcatccttttttcctggcgcggtttcctttgtacgggaaattttcggttggtgcggttggttggtcattttcccgcaccttctctttggttcttgctcgagagcgccatctttcctgctacccgttgactcgggcgggcattccgtcgagcaccttccgtgcggtgtggggagcgacggttcctggtttctcggggacgttccttgatgccgctgttgtgtcaggcgcaggattctagcggatggaatgccacagctggtacgcgctgaaatcaagaagatctgtagcgatcgctggtgcggggtttgaagatgctgcagaaggcgccagcgatcttggtgacacgatgagtcttgcacgcaagcagaaggttgtcaaggaaacagtggagatggaggaggagcaggagtttgtttggaaatctaacctgctcccctacaaggatgatgatgccttcgttcttcctgagagtagcaaggaggaatacgcatcaacatcaggagacacagctccgtctggcaaaatggaccccaggatagaaaggtctggaagcaatgggacaagcaaggtccctagactgggttccatgcttgggacagccagcatggctggatttggcaaggcagtggagattctagacacgttaggctgcttgatgacgaccttgagctcagatggtggctttgtttccaggaccaagaccaaaggatgcaagatatcaattcttgcttttgaggttgccaacacaatacttaaaggtgctagtattatgcaatctctctcggaagacactgtcacatacttcaaacaggttgtgcttccttccgaaggtgtgcagaatttggtttccagtgagatgagtgaactgatgcgaattgcagctaacgacaaaagagaagagctgaaaatattttcccaggagattgttaggttcgggaaccgctgtaaagatccccagtggcataacctggatcgctactttgtgaaaatcagagagtgcaccccagaagcagctgaaagaaacagcaatagcagagatgcaaaagttgatgaacctcgttcaacgtacaactgatttgtatcatgagttgcatgcactagacagattcgagcaagagtaccgctctaggctaaacggaaagggtaatacagatagatttgaaaaaggagacaatattcaaattgtgagactagagttgaagacccaaagtagttatgtgaagagcttgaaaaaaagatctctctggtccaagacgttggaagaagtggtcgagaagcttgtagaagttgtgcactacttgcatgtcgagatcgacaatgctttcggaccttctgatggaggaggtgtggtggtgaatgcggaaccaaccgtgagctgtcaaaggctaggtcctgccgggctcgcattacattatgcaaacattatcatccagatatatagcatcgtttctcgatccgggtatgtgccagcaaattcaagagacgccctctaccagggactgccaccgaggatcaagtcggcgctaccaaatgagctgaggacgacctcggcgcctcagctcaccgtcgaccagataagggctaggatggagaagaccctgaaatggctcgcgcccatggccatcaacaccacctgcgcccgaggcttcttcctgaggtttagcgagtgggcgaaatcagggaccgagagcgttggcagacgactgggccaagcggatcgggtcgagacgctgtaccatgcggacaaggcaaggaccgaggatcgcattctggagctggtcgtctggcttcaccacctcgtcagccagagtagccggccggcgttgcaaaaaggccactgaccagatagatgccaggaatggtggaagaagctggagctgttcttgccatggagaggaggacgtccgggtacagtcggggagatgcttgtatatgcgtgctttgtaacatcagctgagtaggttttagttactactttgttctgcttgttgtttgtaagtgtacttgtgaataccacgttatacaatgcaaagaaaaacgc

SEQ ID NO: 204975 - DNA, 1809 bp, Zea Mays
ggaagcgtcgctgggtcagctagtagcttctcccttccgttccgttccattccgttggtggcctcctctcctcctccaatctctttctctatagtagtagtactcgttagttgtgtctcttctctcggttccctccctagtccctcccgctatatatcaaggctctctcgcttggctcaaggctcaccttctcctacctctcgcctagcctgcctcgctcctccgttcaggcaggctttcagctaccgccgcgcggccgcgaccggcggcctcctttagcggctacgtacgacgtatataccgggcaggcgggcaccggccacggccaacgctagctgctgccaggttgctggaaagagcagctaagagagataattcaggagtgggatcgagacgacatgagggacatgggagagaagaggagacacgggcatggacatggacatggacatcttgttgggtttggagctggaggggttgttggacatgccgcagagcatgaggagaagcgcatggagcagaagaagctggacatgagcagcatgtccatggacaccctgccacatctcaccacgcctcttggcaacatcactaccctggatctctccaacaacaacctacagagcattccggagtccataatcgcgaggctcctgaacgtggtggtgctggacgtgcgctccaaccagctcaagtcgctgcccaactccatcggctgcctctcaaagctcaaggtcctcaacgtctccggcaacctgctccaagaactcccggccaccatcgaggaatgccgtgcgctggaggagctgaacgccaacttcaaccagctgacgaggctgccggacacgctgggcttcgagctccacggcctccggcggctgtccgtcaactccaacaagctcgcgtacctgccgtcgtccacctcccacatgacggcgctgcggtcgctggacgcgcgcctcaactgcctccgcgcgctgcccgacgggctggagaacctcggcggcctcgaggcgctcaacgtgagccagaacttccagtacctgcgggagctgccctacggcatcggcctcctcgtctcgctccgggagctggacgtcagctacaactccatcgccgcgctcccggactccatgggctgcctcaccaagctcgccaggttcagcgccgcgggcaacccgctggtgtgcccgcccatggacgtcgtcgagcagagcctcgacgccatgcgcgcctacctcagcgcgcggatgaacggcaccgccaaggccaagaagaagagctgggtgcccaagctggtcaagtacagcaccttctcggcggggatgatgacgcccggccgcaccaaggtgcacgggaacaacaccgacggcctccacatgtcggattaccggtcgctcgacggcggcggcgttgcgtcgtcggcgtttctcagcatgctgtcgccccggcgtctcttctcgccgcggagaaattcggccaagcactagtagcttagcagtggccactggttcggcgggctatacatgtgtgctccctccttattgctggctatttgcttgctgcttcgatgttcatatgacatgcacgtactgtagcgcaagctgaagctaatgatcttgctactgcagttgtatatgctttgaagagaggtatatatgaagtgtgtatagtagcacgtagtgcaatagggcattaatgtacataagaattaagggtgtctttctttccattgtttacatttgcgttagtgcttatgctggagtagtctttttgaaggaaattgtgtcatcactacagtaaacggaa

SEQ ID NO: 204976 - DNA, 1820 bp, Zea Mays
tgatttcaacgctctagctctttctcttcggtgggtgatgtggtggggagaacatgcatctatatctatcaagtgctcctccatttttgttttgttgttcttggacagctcgcctatccaaagaactaaaaatgtttatattagcttagtattttccctggagctatgaagttgatactggaagactatgtaatatgttttgtctcattaagtttcacagaccctagagcaagaaatactacagttaataaaacccatccttttctggggaggacctttcgacggtgctgatctaatttgtgccacttgtgccttctctctcaccaattaaaccatattttcatggccatagcattccgccagctgattgtaacgcccgcaatcaataccagagtgggatcgagacgacatgagggacatgggagagaagaggagacacgggcatggacatggacatggacatcttgttgggtttggagctggaggggttgttggacatgccgcagagcatgaggagaagcgcatggagcagaagaagctggacatgagcagcatgtccatggacaccctgccacatctcaccacgcctcttggcaacatcactaccctggatctctccaacaacaacctacagagcattccggagtccataatcgcgaggctcctgaacgtggtggtgctggacgtgcgctccaaccagctcaagtcgctgcccaactccatcggctgcctctcaaagctcaaggtcctcaacgtctccggcaacctgctccaagaactcccggccaccatcgaggaatgccgtgcgctggaggagctgaacgccaacttcaaccagctgacgaggctgccggacacgctgggcttcgagctccacggcctccggcggctgtccgtcaactccaacaagctcgcgtacctgccgtcgtccacctcccacatgacggcgctgcggtcgctggacgcgcgcctcaactgcctccgcgcgctgcccgacgggctggagaacctcggcggcctcgaggcgctcaacgtgagccagaacttccagtacctgcgggagctgccctacggcatcggcctcctcgtctcgctccgggagctggacgtcagctacaactccatcgccgcgctcccggactccatgggctgcctcaccaagctcgccaggttcagcgccgcgggcaacccgctggtgtgcccgcccatggacgtcgtcgagcagagcctcgacgccatgcgcgcctacctcagcgcgcggatgaacggcaccgccaaggccaagaagaagagctgggtgcccaagctggtcaagtacagcaccttctcggcggggatgatgacgcccggccgcaccaaggtgcacgggaacaacaccgacggcctccacatgtcggattaccggtcgctcgacggcggcggcgttgcgtcgtcggcgtttctcagcatgctgtcgccccggcgtctcttctcgccgcggagaaattcggccaagcactagtagcttagcagtggccactggttcggcgggctatacatgtgtgctccctccttattgctggctatttgcttgctgcttcgatgttcatatgacatgcacgtactgtagcgcaagctgaagctaatgatcttgctactgcagttgtatatgctttgaagagaggtatatatgaagtgtgtatagtagcacgtagtgcaatagggcattaatgtacataagaattaagggtgtctttctttccattgtttacatttgcgttagtgcttatgctggagtagtctttttgaaggaaattgtgtcatcactacagtaaacggaa

SEQ ID NO: 204977 - DNA, 2085 bp, Zea Mays
ccggctcctacacctttgatacgaactaattcatcaataccaaaccaaccttcccaagaagaacctgttatagaatcagaaacattaggtgttgaggagggacaagcatcattagagacagaaggtagcaatgcaaatgaatcaatgggtttaagagatagcaatatcaataatgtcgatcaagttatagccgatcctggtcttcgcatgccaattgagcaaattgatgcaaacattagggatgctgtcagaagagcatatattgcgaagggtccatgccaaccaaaaggtcataagtatcctaaaagaatgataagcaatcgcaataggtcttttcatgatgaatggtatgtaaataatccatggttggagtatagcattgctaaggatgcggctttttgtttttattgctacctttttaaacaacaaagagctgaaaattatggtgttgatgccttcacggttgttgggtttcgtcgatggaaagatggacgtgaaaccattggagctcatggtaatggcatagatcacaataagtctagaaggtcctatgaggactacaaaaatcagaggcaaagtgtgtctcatgtgatgaatcgagggggtaaaaagatggaagaggaatataaaggtcgtttgcttgtcatattgggagttgtaagatttcttttattgcaagcacttgcttttcgtgggcatgatgaatcctctacctcaagcaataagggaaactttttagagttgctacattggtacaaagacaaggataaaaatgtagcaaatttgcttcgtactaatcagatgacttcacctgatatccaaaaagacatttgtagagcttgtgcagagcagaccaccaaagctattatttcagatattgggaatagaaacttttccattcttgttgatgaggctcgagatgtatcaaggagcaaatggcggttgttttgaggtatgtcaacgaacgaggtgaagtgattgagagatttattgggttacaagagaaaagatcagaatattgtccttgctgttggattgattggagccacattgcggaatattagtgaagtacgtgatagtggatgggaagaattgtttgaggaggtaaagaccttttgtaaccaacataacattattgtaccaaagatggatgacacaattactgttcgaggtcgctcaagggggcgtggaggtcaattagtgacttactatcatcatttcaaaaatgagatatttattgttgtgtatgatcaagttattgtggaattaaacaaccgtttcactgaaagatctactcaattattgagatgcatttcgtgtctagatccaagaaattcatttgccagctatgacaaagctcagctgatagaattggctaagatttattctgcagacttctctcaatatgacctcttgatccttagagaccaactcgatatatttattgttgatgtgaggggtaattctgattttgcaaattgtgaagaccttggtaatctggctattaagatggtgcaaaccgagagacacctagtttttgcattggtttatcgtctcattgaattagccttaattttgcctgttgcaactgccacggttgaaagagccttctcagctatgaaaatcatcaagacagaattgagaaataagatgggaaatgattggttaaatcatagaatggtatgctatatagaaagagatatctttgcaagaattcaaagtgatgatattttatatcattttcaagaattgaagagtcgtatgaaaaagctacctccacaaagttcaagtggtatatttttgtgctcacttatacatttttgcattcattagttatattgtcatgttgtatctctcattttatacaaatatttaacttgcaatgtgtaggttcaaattcacgtgctaatgttgatgaagttattagaggcggggaaggaccaaatcatctctaattaggtatttttaaatttttttaccaagtttattgtatttttagatgctgaattgaagtaaatactatcttagtctatgtttgtggtatattttgttttagcggtatatttagccgcacaatatattaga

SEQ ID NO: 204978 - DNA, 1423 bp, Zea Mays
ctcttttctcctatccgttcaacgcttccctcctacccgttcaacgcttcccgccacccagccgctaaacaaaacgccgcgcgctgcacgtccatttctctttctccattaatccgacagtttgatttatcgatcgagaaaaccggtttctcagtgatttctcatcccggacggctgcgggaagcatttcatggtgattcgggctcatcgcgcactatgacaaaccaaaaccctaataaaacaagcccggagcccgtgaacacaacaaaacgtttattctccgccgaaaggaaccatccccaaagacaaagagggcatcggtccggcccatagctctggttctgtgcatggtgcgctggcgcaccttgtggtgcatgcacagcagagagcgcggcgtctcttctccctgccgcccgtgagcatccactcacgggacgaatacgaccaaaacgcgcacgcccccctcccaccaccctggcctgtaaatcagcgccgccaggcagtcacagcggcaagtccgcaccgcaactgcagttggaaaaccagctcgccgccactagataatctcgtctcgccagggacgggaacggcaggccgtgccgtcacgagactcctagcgaccgagagagagagagagcgcgcacgcgcgtggtggaagagacttcgttctagagctcccgcgaggatggagcgcggcagttcctggcgactcccggcggtggtcgtcggcatccttgtctgcgcggccctcttctcgccgcccgccgccgcgctcaacatcggcatccagtccgccggcgacggggtgtggactacctgagcacggcttgcaacgaggccctgctggactgcctggccaggctgcgggagggcacgtccacgttcaacgggaacaagtgcatgatcgacgaggtcatcgacgtgatctcgctcgtcatagaggccgccgtcgtcgccggcagggtactgcacaagccgtagccgcgccgcgcgcagggacatgtgaacagcagcctgcggttggtgggcgatacatctttttcgtgcttggtttagggcgtcctttccggctggccggggcccgggctctgcgtcggctcacatggcggcatgtgtgctactagctggcgagctcccaggctcccaacccggccaaaactgacgacaaggtatatggagattattaaagatatagcttgtttggttttgagcatctcgtgttcctatcactgtattaccgtacaaaataagtataagaaagtttcctcatgctgcttttcgcttcttggacaatgtaatctacactcgtgtagcttacgttgttgcaaatgacgaataatacagactacactcgtgtatcttgtacgcgctgccgccggaacgatttcgtgatcgcgcgatttgtttgttcctgggactgaat

SEQ ID NO: 204979 - DNA, 1807 bp, Zea Mays
tgcccactgcggctcactccgcttcccccgataccttctctccccgacttttccttcccttcctcgcacgacgagtgacgacgaccatcccccaaccccacgccgcggagccgcaccaaatctcaccccgcatcctttagggttagggttctgcccgcacctgtgaattccgttgcgaaatctctcatctcctgagtcgagaatcgcagtttcccgctcggctcgtttggggaaatcggttattttcgtccggccgcgtgggctctctgaagcgtttgggctgtcggctatttgccccgagttttcaggtttgaaaaatcgtcgtaatttgttcatcacgcggctgccgaactttaagtggtggtggaagtttcgtgcctcggcgtggcccccgtgctccgattcctgatcacctgcccgccccgcacgctatgagcgcagggcgcgcgggctggggctcttgctgctcgggcacgcgcgcggggtccccgtgttaatgcctcggttgtcctgcaagttcgcggaccccgacagcgccgtttcctccgctccggtggcgcgccgcgtgcggtcagacacgatgagctgcggcagcgacgtgtgccgggacggcggcagcagcagcggcagcgaggagttcaggcggccgcggcccagcaaggtcgccgctgatgattcggtggcgcccgcccggagctcggatgccgcggcgccggcgtcgtggatcgacaggaagctgcttgttgatccaaagatgctgttcgttggggacaagattggggagggagctcatggcaaggtctacaaggggaagtacggtgatcaaattgtagcgataaaggttcttaaccgtggcagcacccctgaagaaaaagcaacacttgaagcccgtttcatccgagaagtaaatatgatgtgtaaagtgaaacatgagaatcttgtcaagataatttattgcttacagcaaatcgcaagaagctaaaacttactgattttggacttgcacgtgaagaaactgtgactgaaatgatgactgctgaaactgggacttaccgatggatggccccagagctatacagcacagtcacacttcgacgtggtgagaaaaagcattacacaaataaagtggatgtgtacagctttggcattgttttgtgggaattattgaccaatagaatgccatttgaaggcatgtcgaatctacaagctgcatatgctgctgcttttcagcaaaagcgcccagctctccctgaggagaccccccaggagcttgtgttcatagtacaatcatgctgggttgaggatcctgccatgcgacccagtttcagccagatcatccgaatgcttgaaactttcattatgacaatacatccacctccgctttcagagccaaacgaaggcgaggaatcggaagaaacgaggtcgtcactgagcagtaggagctcctctggctcctcgctcgtttctcgcgcgacaagcaagctctcggtcgtccgccacctcttcgtctcaaagaagacaggcaatgggaaggcgtgatgcgccatgccctgagacgcttttcttcggtgctgtaaagatgctagcctaggtgatgcgcaatacaagagggaacttgttcagtgtagagtagctgttgtattgatgttacaaaaggggaaagttgaagtgcagcttttgcaagctatgtatagctcgcagctcctttactttactgaaagtccaaacagccggctttaatccgaagcgaaccgagatatatattaaatcaaacaaccgactttaattcgaagaacagagatatata

SEQ ID NO: 204980 - DNA, 937 bp, Zea Mays
atgttcctcttcttgtatccttcgtttccgttcctatccaagctgctaacaaactagtatcagattaggcgattccttgctctgtcccatggcgccgccatctccatctgatgatgcgtccctcactcttgccttggaaaaccaaacccgggaggtccttgccaaattggataaacggctccaaaccctcgacaacaaatgggagacgggggtggcgctctcgaatccgcggcgacggatgcggctcgatccgtcaccaacttctccaccgggctccgcgctgatgtcgaagctcacctcacggcgtccgacgcggctactgatgcccgcctgcgccagatcgaggtggataccggctctcgtctcaccgccatagagtccgcagtccagctgttcgactgctggcgcccccgagtggactcctccctcgacgccatgaagacgaacctggatcggctctgttcggaggcgtccaggatggaggtcgtaggcttccaaggtgtgttcggcgggtttccgggcgtactcggatctcccggttccggcgcgacttcgtcaggcctcctcggatccccgccttccttcgctcctaccggagcggtaccggtgcgcccatctgccaccgtcgaccactccgacgcctatcgttttgggcccagctacgaaaactatctccgagacagtgggcttcggtatcctgactgccgatggccgcttcccggtcacgggattagtcgtcttgtgtcttcaacattacgaagtgatgatggccttctttttcctgaaaggtgttgtttgtggcgtttaaatctctacttaagtcacttagggtatcatacacagtttgggttctttggtagtaatccaattgcacgatgatgactatcttgctcctctccaagctgatcgagaaaaagaggtgaagcttgtgcaatag

SEQ ID NO: 204981 - DNA, 1688 bp, Zea Mays
cgcggctaaagcagccaagtaaaaaaaaaatacaagagctagtaacagctcaagaaccttctttagagcgagtgcgtagagcgaagcgccgaagcgaggggacctgccagtgccacggcctcgagtgcagcagcagccagcagggatggctggcgcggtcgctgtgtggctgctgggggcgttcgccaagagtggacgcctgccggaggcgccggcgcaggctgctgccgatgcggaagacgcgcggcgccaccgcggagatgatggcgttggcgcggttgcgcgcgtcagcaacggtcgacgagtccaggagaagaggcggcgggatagcggcgcgctctccggctcggaggagaccgtcgtgtgcatgctcatggacctctacgccccggcgtgacgtacgtgtaacgtgcgggggacggcggtgttgtttctgggcgcgtagcgcttatgaatctacatctcataagctgggtttcattcagcaaaggtctccagttactacaggaatgatggtttcatttgcaaaaaatgttgctgatttcataaatagcatcgggaagaaccatattgtcattatatcaagtttagattctggaaagaggagagtgattgatgcatccagtgacatgcaggtgtattacctttcaagttgcaatgaagatggttctgatccagaatatgagaaattggggtggaaaaagcttgaggattatgatccatctcagaaacggtggaattgtcttgctagcctagttgagggtggtggtctttcagaagatctggatgatgatactgatgagatgacaataaatgattactatgcaagcctgccatttgcagcactattctctgcctgcaaggctaaaggcttgaaagtttcttgtgtactgtgctactgctcggaaggcgacaacatgccagaatctttccagttagctgaagcaatatgcaaacttctaggtcatggccctgagaaattccatggaaatgggtcaaatggatggatcgttcccttgtcatggaaatcagtatatggaccaccacctgatatgtctatcttttagtgttgaattatgatcaggtgaagttgccatcacggaaaatgctgagtagaatcgaggatgttgaactcttaatttagacagtgtaccagaagtatccaggagggtgagttgcagacgtttgtagtcagttggtaaaggattactaaacactcaaggatggaacttctgcaggcaccatgatacttaacccttaaatgcatgaatcagaatatttttgtaactggtactgtggctactaagagtcagatctttgtcaactcaggtctgctaggtgcttacgcatgttgcttaccatcataccatgtgccgtttccattctaaccatggaattccaagcttctcgtctgccgttttggcagttttgcccatttggtttggttgattttgatgtggtggaagaatctttgctagtgcgtacccctttatgaaaagttgctactgaatggtggaactgttcggtgaggcaattccgtcggcgatgcctggttgtctgtgttaagtaaccctagttagggttatgtgggcaaataccgactttgcccctgaggggtctcatatctctatataaggaacctgtacaccccttcataagatagagaacagaaagaggccagaggccca

SEQ ID NO: 204982 - DNA, 1655 bp, Zea Mays
gctaaagcagccaagtaaaaaaaaaatacaagagctagtaacagctcaagaaccttctttagagcgagtgcgtagagcgaagcgccgaagcgaggggacctgccagtgccacggcctcgagtgcagcagcagccagcagggatggctggcgcggtcgctgtgtggctgctgggggcgttcgccaagagtggacgcctgccggaggcgccggcgcaggctgctgccgatgcggaagacgcgcggcgccaccgcggagatgatggcgttggcgcggttgcgcgcgtcagcaacggtcgacgagtccaggagaagaggcggcgggatagcggcgcgctctccggctcggaggagaccgtcgtgtgcatgctcatggacctctacgccccggcgtgacgtacgtgtaacgtgcgggggacggcggtgttgtttctgggcgcgtagcggtacgtacgcacacaactacacaaggggcagcttatgaatctacatctcataagctgggtttcattcagcaaaggtctccagttactacaggaatgatggtttcatttgcaaaaaatgttgctgatttcataaatagcatcgggaagaaccatattgtcattatatcaagtttagattctggaaagaggagagtgattgatgcatccagtgacatgcaggtgtattacctttcaagttgcaatgaagatggttctgatccagaatatgagaaattggggtggaaaaagcttgaggattatgatccatctcagaaacggtggaattgtcttgctagcctagttgagggtggtggtctttcagaagatctggatgatgatactgatgagatgacaataaatgattactatgcaagcctgccatttgcagcactattctctgcctgcaaggctaaaggcttgaaagtttcttgtgtactgtgctactgctcggaaggcgacaacatgccagaatctttccagttagctgaagcaatatgcaaacttctaggtcatggccctgagaaattccatggaaatgggtcaaatggatggatcgttcccttgtcatggaaatcagtatatggaccaccacctgatatgtctatcttttagtgttgaattatgatcagttttataggtgaagttgccatcacggaaaatgctgagtagaatcgaggatgttgaactcttaatttagacagtgtaccagaagtatccaggagggcaccatgatacttaacccttaaatgcatgaatcagaatatttttgtaactggtactgtggctactaagagtcagatctttgtcaactcaggtctgctaggtgcttacgcatgttgcttaccatcataccatgtgccgtttccattctaaccatggaattccaagcttctcgtctgccgttttggcagttttgcccatttggtttggttgattttgatgtggtggaagaatctttgctagtgcgtacccctttatgaaaagttgctactgaatggtggaactgttcggtgaggcaattccgtcggcgatgcctggttgtctgtgttaagtaaccctagttagggttatgtgggcaaataccgactttgcccctgaggggtctcatatctctatataaggaacctgtacaccccttcataagatagagaacagaaagaggccagaggccca

SEQ ID NO: 204983 - DNA, 1721 bp, Zea Mays
aaagccaagttccaccaggccgaaacgtttctttagtctttaccctaaccttccagcgaaggcacacagccgccgccgtttcttcatcttctcgcagcgccggcgctccatcttcccctcccttccgtactcgcgctcggcacgcgggcaacggcagcggcgctcaggctctcagcgacggcgtcagcggcttcccctcccgactctcgccagtcgcctcgcgccctagcctccgatcctccgcacaccggccggtgacccagcgttcagttagtggtccattgaagtgtagctgtattgcgatcttcaactgctggggccatggcctacgagattagtgagatcaaaaagattggcataggtctggtggggtttggcatcctattctcattccttggtgttatccttttcttcgataggggcttgttagctctgggtaatattttctttttaactggagtgggtctgttactcggttggcaatctatgtggcagcttttcacaaagaaggcaaaccttaaggtactctagacgtgcatagatacaggatcacttttctgaagtttgtcttttccattattgatcctcataaatttttatttctgttctaaacatgaagttgtgttgtataatacttgaactgatgaagttcctagtgtttgggcatctttgtgatggtggctgttgcagtataccatcaaaatgtggaagcagaaagataactttgacaggattattatagttttatttcatccttgaaatatggttttaggtgatagttatttttgtttattattccatcttcgccaaattaataacttcttgatttgtccgatttcagttgaagctaaccttctgaatgtgtgttgatgcaacaacttctcttagcataattttataagcaaacaaataatttattatgaggatgtatttatttaggggaacaacgctgagatatggttgtgttctctcaatggcaattagtatctttgtgttattcaatgttgcttgtgtgttatgttctttagtgaacatgtgtgttaagttggtcttaagcctacaccaacttgattggggcttggggcctttgttgttaggctaaagttgagccatatgcaagtccaggagacaaggacacacatgatatagtattgtagaatgcatactctgtggcagcaatttctatctagcaagtccaagtgctttggcattagaacgtctcttgatcggtatcaactaatatatagcttctcttttgaacgccgacctcagttatttgtctcatatttgaagtggtaacgttgttcaaccacagggatcagtgcctttcttcattggtttgtttcttctgtttgtccgttggcctgttgctggtataatcatggaactatatggatcttttgtgctcttcagtggttatgggcctcctatccaggccttcctgtatcaaataccaatcattggttggattctgcagtacccattccagctgcttggtcagttgaggcgtaaacgcacctgaaatgttctgcaactgccaagatactctttgactcttcatggttaaagacctcagtgccttttggtcatcacaacaacaatggggccagagtgatcacacctgatttatttctgattctggaatctggacacaatttgacaaattattttgcaagttgcacggacggaacccttgaagaaaactagagaaaacaaaatct

SEQ ID NO: 204984 - DNA, 2032 bp, Zea Mays
aaagccaagttccaccaggccgaaacgtttctttagtctttaccctaaccttccagcgaaggcacacagccgccgccgtttcttcatcttctcgcagcgccggcgctccatcttcccctcccttccgtactcgcgctcggcacgcgggcaacggcagcggcgctcaggctctcagcgacggcgtcagcggcttcccctcccgactctcgccagtcgcctcgcgccctagcctccgatcctccgcacaccggccggtgacccagcttagtggtccattgaagtgtagctgtattgcgatcttcaactgctggggccatggcctacgagattagtgagatcaaaaagattggcataggtctggtggggtttggcatcctattctcattccttggtgttatccttttcttcgataggggcttgttagctctgggtaatattttctttttaactggagtgggtctgttactcggttggcaatctatgtggcagcttttcacaaagaaggcaaaccttaaggtactctagacgtgcatagatacaggatcacttttctgaagtttgtcttttccattattgatcctcataaatttttatttctgttctaaacatgaagttgtgttgtataatacttgaactgatgaagttcctagtgtttgggcatctttgtgatggtggctgttgcagtataccatcaaaatgtggaagcagaaagataactttgacaggattattatagttttatttcatccttgaaatatggttttaggtgatagttatttttgtttattattccatcttcgccaaattaataacttcttgatttgtccgatttcagttgaagctaaccttctgaatgtgtgttgatgcaacaacttctcttagcataattttataagcaaacaaataatttattatgaggatgtatttatttaggggaacaacgctgagatatggttgtgttctctcaatggcaattagtatctttgtgttattcaatgttgcttgtgtgttatgttctttagtgaacatgtgtgttaagttggtcttaagcctacaccaacttgattggggcttggggcctttgttgttaggctaaagttgagccatatgcaagtccaggagacaaggacacacatgatatagtattgtagaatgcatactctgtggcagcaatttctatctagcaagtccaagtgctttggcattagaacgtctcttgatcggtatcaactaatatatagcttctcttttgaacgccgacctcagttatttgtctcatatttgaagtggtaacgttgttcaaccacagggatcagtgcctttcttcattggtttgtttcttctgtttgtccgttggcctgttgctggtataatcatggaactatatggatcttttgtgctcttcagtggttatgggcctcctatccaggccttcctgtatcaaataccaatcattggttggattctgcagtacccattccagctgcttggtcagttgaggcgtaaacgcacctgaaatgttctgcaactgccaagatactctttgactcttcatggttaaagctatggtttattgttcatatttagacaataagagttcataagttgatggatgctccgactcttgaagcaggacctcagtgccttttggtcatcacaacaacaatggggccagagtgatcacacctgatttatttctgattctggaatctggacacaatttgacaaattattttgcaagttgcacggacggaacccttgaagaaaactagagaaaacaaaatcttacagtggagcttgatagcccacctgatgaataccacgcgtgatctgcttcatttttttgtcagatgcaatgttcatatgattaggataaaaggctatcaacctcgggtacacatcacacctggtgaagttactgccaacttgttagtataaaaggctattacaaggactgatttattgacaagagaaatgaagtggatttttgggaagaagtcccctttctatccaaaattgaatagctagcgat

SEQ ID NO: 204985 - DNA, 1239 bp, Zea Mays
aaagccaagttccaccaggccgaaacgtttctttagtctttaccctaaccttccagcgaaggcacacagccgccgccgtttcttcatcttctcgcagcgccggcgctccatcttcccctcccttccgtactcgcgctcggcacgcgggcaacggcagcggcgctcaggctctcagcgacggcgtcagcggcttcccctcccgactctcgccagtcgcctcgcgccctagcctccgatcctccgcacaccggccggtgacccagcttagtggtccattgaagtgtagctgtattgcgatcttcaactgctggggccatggcctacgagattagtgagatcaaaaagattggcataggtctggtggggtttggcatcctattctcattccttggtgttatccttttcttcgataggggcttgttagctctgggtaatattttctttttaactggagtgggtctgttactcggttggcaatctatgtggcagcttttcacaaagaaggcaaaccttaagggatcagtgcctttcttcattggtttgtttcttctgtttgtccgttggcctgttgctggtataatcatggaactatatggatcttttgtgctcttcagtggttatgggcctcctatccaggccttcctgtatcaaataccaatcattggttggattctgcagtacccattccagctgcttggtcagttgaggcgtaaacgcacctgaaatgttctgcaactgccaagatactctttgactcttcatggttaaagctatggtttattgttcatatttagacaataagagttcataagttgatggatgctccgactcttgaagcaggacctcagtgccttttggtcatcacaacaacaatggggccagagtgatcacacctgatttatttctgattctggaatctggacacaatttgacaaattattttgcaagttgcacggacggaacccttgaagaaaactagagaaaacaaaatcttacagtggagcttgatagcccacctgatgaataccacgcgtgatctgcttcatttttttgtcagatgcaatgttcatatgattaggataaaaggctatcaacctcgggtacacatcacacctggtgaagttactgccaacttgttagtataaaaggctattacaaggactgatttattgacaagagaaatgaagtggatttttgggaagaagtcccctttctatccaaaattgaatagctagcgat

SEQ ID NO: 204986 - DNA, 1245 bp, Zea Mays
aaagccaagttccaccaggccgaaacgtttctttagtctttaccctaaccttccagcgaaggcacacagccgccgccgtttcttcatcttctcgcagcgccggcgctccatcttcccctcccttccgtactcgcgctcggcacgcgggcaacggcagcggcgctcaggctctcagcgacggcgtcagcggcttcccctcccgactctcgccagtcgcctcgcgccctagcctccgatcctccgcacaccggccggtgacccagcgttcagttagtggtccattgaagtgtagctgtattgcgatcttcaactgctggggccatggcctacgagattagtgagatcaaaaagattggcataggtctggtggggtttggcatcctattctcattccttggtgttatccttttcttcgataggggcttgttagctctgggtaatattttctttttaactggagtgggtctgttactcggttggcaatctatgtggcagcttttcacaaagaaggcaaaccttaagggatcagtgcctttcttcattggtttgtttcttctgtttgtccgttggcctgttgctggtataatcatggaactatatggatcttttgtgctcttcagtggttatgggcctcctatccaggccttcctgtatcaaataccaatcattggttggattctgcagtacccattccagctgcttggtcagttgaggcgtaaacgcacctgaaatgttctgcaactgccaagatactctttgactcttcatggttaaagctatggtttattgttcatatttagacaataagagttcataagttgatggatgctccgactcttgaagcaggacctcagtgccttttggtcatcacaacaacaatggggccagagtgatcacacctgatttatttctgattctggaatctggacacaatttgacaaattattttgcaagttgcacggacggaacccttgaagaaaactagagaaaacaaaatcttacagtggagcttgatagcccacctgatgaataccacgcgtgatctgcttcatttttttgtcagatgcaatgttcatatgattaggataaaaggctatcaacctcgggtacacatcacacctggtgaagttactgccaacttgttagtataaaaggctattacaaggactgatttattgacaagagaaatgaagtggatttttgggaagaagtcccctttctatccaaaattgaatagctagcgat

SEQ ID NO: 204987 - DNA, 2142 bp, Zea Mays
ccggcgttcatcttccgctctctcccttactcgcgctcggcagtcggcacaggcgacggcggcggcgctcgggctctcagcgacggcggcagcggcttcccctctcgcctcgcgccctcgcctccggtcctccgcacaccggtcggtgaccctgtgtgcgtgcctctctctctcctcccccctctagtggatcgtcaacggcttccggccccggaggcttcgccgcgcgcggactgagggcagcgggagccagcagccgctgctccaccaaggcgatcgcgccgctttgagagctcatgccccaaagcgaagcgttacccatccttttagcgcttcagcaggctcaagggtgcgcttagtgctgccttttggaattatcgttcctggccaatttgtcatcagatcaccatacatgacaagggtcatccatgactccggagatggcatgcagaaggaggcacttgatttggtctcatctgatgttaactttcccaagggctgtttcccagactataggattggaccaaacaaccaaatcattgatccagaggaaacgcatgaggccgtacctctcaaggaggttgttgcaaaggaaacagcgcagctgctagagcagcacaggcgcctttctgtgcgtgatctcaaggagaagtttgagaagggtctatctagcgcttccaagctttctgaagaggctaagcgtcgagaagctgcttcattagacaggcaggttcttttgaagaagctcagagatgttttagacacactgaaaggtcgtgtggctggtcgaaataaagacgatgctgaggaagctatctcactggtggaggcactagctgtccagctgacacaacgagaaggggagttaatttatgagaaggctgaagtaaaaaaattggctaacttccttaagcaggctactgtagatgcacgcaaagtagctgaagaggaaagggctcttgcacttgctgaaattgaaaaggctagagctgcaatcgaaaaagtcgagaaagcatttcatgtgcatgattctacgaaaagcagcagagaggaggaaatagaagaacttaggaaagaggtccgagaggctaggaggataaaaatgctacaccagccaatcaaggtcatggacatggagtttgagcttcaggcactgcggactctcatctcacagaagactcagctatgcaatcagctaaataaagagcttgccacgatcaagaggttagaagtagatagttctgacctctttgagcttgaaggttctaatacccttggatcgcagttttgtattattcctcgagttgatggtgctccaaacattgcgaactgtccaattcagtggtatcgtgtaatttctggtggcagtagaggactcatatcgggagcaacaaaatttacgtatgccccagaaccgtttgatgttggtcgattattacaagcagagattattttgaatgcagataaaatcatagttcagacggatggccctatagataatggacttgaacattatgtggactcactcatgaaacggacggatattgagttcaacgtagtagtaacccaaatgaatgggaaggattactcgtcgaattctgtccatgtttttcatattggaaagctgagaataaaacttcaaaaaggatggtctacaaaagcaagagagttatattccaccacgatgaagttatgtgggagccgtggtggtggtaatgctgcagctagggcagttttctggcaagctaggaaaggcctgtcctacactctagcattcgaaacagacagggacaggaatgctgcaattatgattgctcgcaaatttgcttcgaattgcaatatcgctctcgctggcccaggtgaccaagacacctgatgaagtgatcatgcgtgttttgacagagacactgtacataatcaggtgtagattggctgatttttttgggagtctatttgtgtgcttgtgagggtagaggttgtacaccgcgtgacggtaatccccccttccatatatcttatggaggcattgtttttgtttgcctgtttgcagcattagcgacgttctcgaaacgtgatgtacaaattgatcactgttcttgtgcgtcacatctgtaataatatcactgttcttatcgcttcttt

SEQ ID NO: 204988 - DNA, 2052 bp, Zea Mays
cggcagtcggcacaggcgacggcggcggcgctcgggctctcagcgacggcggcagcggcttcccctctcgcctcgcgccctcgcctccggtcctccgcacaccggtcggtgaccctgtgtgcgtgcctctctctctcctcccccctctagtggatcgtcaacggcttccggccccggaggcttcgccgcgcgcggactgagggcagcgggagccagcagccgctgctccaccaaggcgatcgcgccgctttgagagctcatgccccaaagcgaagcgttacccatccttttagcgcttcagcaggctcaagggtgcgcttagtgctgccttttggaattatcgttcctggccaatttgtcatcagatcaccatacatgacaagggtcatccatgactccggagatggcatgcagaaggaggcacttgatttggtctcatctgatgttaactttcccaagggctgtttcccagactataggattggaccaaacaaccaaatcattgatccagaggaaacgcatgaggccgtacctctcaaggaggttgttgcaaaggaaacagcgcagctgctagagcagcacaggcgcctttctgtgcgtgatctcaaggagaagtttgagaagggtctatctagcgcttccaagctttctgaagaggctaagcgtcgagaagctgcttcattagacaggcaggttcttttgaagaagctcagagatgttttagacacactgaaaggtcgtgtggctggtcgaaataaagacgatgctgaggaagctatctcactggtggaggcactagctgtccagctgacacaacgagaaggggagttaatttatgagaaggctgaagtaaaaaaattggctaacttccttaagcaggctactgtagatgcacgcaaagtagctgaagaggaaagggctcttgcacttgctgaaattgaaaaggctagagctgcaatcgaaaaagtcgagaaagcatttcatgtgcatgattctacgaaaagcagcagagaggaggaaatagaagaacttaggaaagaggtccgagaggctaggaggataaaaatgctacaccagccaatcaaggtcatggacatggagtttgagcttcaggcactgcggactctcatctcacagaagactcagctatgcaatcagctaaataaagagcttgccacgatcaagaggttagaagtagatagttctgacctctttgagcttgaaggttctaatacccttggatcgcagttttgtattattcctcgagttgatggtgctccaaacattgcgaactgtccaattcagtggtatcgtgtaatttctggtggcagtagaggactcatatcgggagcaacaaaatttacgtatgccccagaaccgtttgatgttggtcgattattacaagcagagattattttgaatgcagataaaatcatagttcagacggatggccctatagataatggtagtagtaacccaaatgaatgggaaggattactcgtcgaattctgtccatgtttttcatattggaaagctgagaataaaacttcaaaaaggatggtctacaaaagcaagagagttatattccaccacgatgaagttatgtgggagccgtggtggtggtaatgctgcagctagggcagttttctggcaagctaggaaaggcctgtcctacactctagcattcgaaacagacagggacaggaatgctgcaattatgattgctcgcaaatttgcttcgaattgcaatatcgctctcgctggcccaggtgaccaagacacctgatgaagtgatcatgcgtgttttgacagagacactgtacataatcaggtgtagattggctgatttttttgggagtctatttgtgtgcttgtgagggtagaggttgtacaccgcgtgacggtaatccccccttccatatatcttatggaggcattgtttttgtttgcctgtttgcagcattagcgacgttctcgaaacgtgatgtacaaattgatcactgttcttgtgcgtcacatctgtaataatatcactgttcttatcgcttcttt

SEQ ID NO: 204989 - DNA, 2020 bp, Zea Mays
cggtcctccgcacaccggtcggtgaccctgtgtgcgtgcctctctctctcctcccccctctagtggatcgtcaacggcttccggccccggaggcttcgccgcgcgcggactgagggcagcgggagccagcagccgctgctccaccaaggcgatcgcgccgctttgagagctcatgccccaaagcgaagcgttacccatccttttagcgcttcagcaggctcaagggtgcgcttagtgctgccttttggaattatcgttcctggccaatttgtcatcagatcaccatacatgacaagggtcatccatgactccggagatggcatgcagaaggaggcacttgatttggtctcatctgatgttaactttcccaagggctgtttcccagactataggattggaccaaacaaccaaatcattgatccagaggaaacgcatgaggccgtacctctcaaggaggttgttgcaaaggaaacagcgcagctgctagagcagcacaggcgcctttctgtgcgtgatctcaaggagaagtttgagaagggtctatctagcgcttccaagctttctgaagaggctaagcgtcgagaagctgcttcattagacaggcaggttcttttgaagaagctcagagatgttttagacacactgaaaggtcgtgtggctggtcgaaataaagacgatgctgaggaagctatctcactggtggaggcactagctgtccagctgacacaacgagaaggggagttaatttatgagaaggctgaagtaaaaaaattggctaacttccttaagcaggctactgtagatgcacgcaaagtagctgaagaggaaagggctcttgcacttgctgaaattgaaaaggctagagctgcaatcgaaaaagtcgagaaagcatttcatgtgcatgattctacgaaaagcagcagagaggaggaaatagaagaacttaggaaagaggtccgagaggctaggaggataaaaatgctacaccagccaatcaaggtcatggacatggagtttgagcttcaggcactgcggactctcatctcacagaagactcagctatgcaatcagctaaataaagagcttgccacgatcaagaggttagaagtagatagttctgacctctttgagcttgaaggttctaatacccttggatcgcagttttgtattattcctcgagttgatggtgctccaaacattgcgaactgtccaattcagtggtatcgtgtaatttctggtggcagtagaggactcatatcgggagcaacaaaatttacgtatgccccagaaccgtttgatgttggtcgattattacaagcagagattattttgaatgcagataaaatcatagttcagacggatggccctatagataatgctgcaggacttgaacattatgtggactcactcatgaaacggacggatattgagttcaactagtaacccaaatgaatgggaaggattactcgtcgaattctgtccatgtttttcatattggaaagctgagaataaaacttcaaaaaggatggtctacaaaagcaagagagttatattccaccacgatgaagttatgtgggagccgtggtggtggtaatgctgcagctagggcagttttctggcaagctaggaaaggcctgtcctacactctagcattcgaaacagacagggacaggaatgctgcaattatgattgctcgcaaatttgcttcgaattgcaatatcgctctcgctggcccaggtgaccaagacacctgatgaagtgatcatgcgtgttttgacagagacactgtacataatcaggtgtagattggctgatttttttgggagtctatttgtgtgcttgtgagggtagaggttgtacaccgcgtgacggtaatccccccttccatatatcttatggaggcattgtttttgtttgcctgtttgcagcattagcgacgttctcgaaacgtgatgtacaaattgatcactgttcttgtgcgtcacatctgtaataatatcactgttcttatcgcttcttt

SEQ ID NO: 204990 - DNA, 1662 bp, Zea Mays
cgcacaccggtcggtgaccctgtactataggattggaccaaacaaccaaatcattgatccagaggaaacgcatgaggccgtacctctcaaggaggttgttgcaaaggaaacagcgcagctgctagagcagcacaggcgcctttctgtgcgtgatctcaaggagaagtttgagaagggtctatctagcgcttccaagctttctgaagaggctaagcgtcgagaagctgcttcattagacaggcaggttcttttgaagaagctcagagatgttttagacacactgaaaggtcgtgtggctggtcgaaataaagacgatgctgaggaagctatctcactggtggaggcactagctgtccagctgacacaacgagaaggggagttaatttatgagaaggctgaagtaaaaaaattggctaacttccttaagcaggctactgtagatgcacgcaaagtagctgaagaggaaagggctcttgcacttgctgaaattgaaaaggctagagctgcaatcgaaaaagtcgagaaagcatttcatgtgcatgattctacgaaaagcagcagagaggaggaaatagaagaacttaggaaagaggtccgagaggctaggaggataaaaatgctacaccagccaatcaaggtcatggacatggagtttgagcttcaggcactgcggactctcatctcacagaagactcagctatgcaatcagctaaataaagagcttgccacgatcaagaggttagaagtagatagttctgacctctttgagcttgaaggttctaatacccttggatcgcagttttgtattattcctcgagttgatggtgctccaaacattgcgaactgtccaattcagtggtatcgtgtaatttctggtggcagtagaggactcatatcgggagcaacaaaatttacgtatgccccagaaccgtttgatgttggtcgattattacaagcagagattattttgaatgcagataaaatcatagttcagacggatggccctatagataatgctgcaggacttgaacattatgtggactcactcatgaaacggacggatattgagttcaacgtagtagtaacccaaatgaatgggaaggattactcgtcgaattctgtccatgtttttcatattggaaagctgagaataaaacttcaaaaaggatggtctacaaaagcaagagagttatattccaccacgatgaagttatgtgggagccgtggtggtggtaatgctgcagctagggcagttttctggcaagctaggaaaggcctgtcctacactctagcattcgaaacagacagggacaggaatgctgcaattatgattgctcgcaaatttgcttcgaattgcaatatcgctctcgctggcccaggtgaccaagacacctgatgaagtgatcatgcgtgttttgacagagacactgtacataatcaggtgtagattggctgatttttttgggagtctatttgtgtgcttgtgagggtagaggttgtacaccgcgtgacggtaatccccccttccatatatcttatggaggcattgtttttgtttgcctgtttgcagcattagcgacgttctcgaaacgtgatgtacaaattgatcactgttcttgtgcgtcacatctgtaataatatcactgttcttatcgcttcttt

SEQ ID NO: 204991 - DNA, 1455 bp, Zea Mays
ctttttcgtatctaatttacttttcaagtggaggcactagctgtccagctgacacaacgagaaggggagttaatttatgagaaggctgaagtaaaaaaattggctaacttccttaagcaggctactgtagatgcacgcaaagtagctgaagaggaaagggctcttgcacttgctgaaattgaaaaggctagagctgcaatcgaaaaagtcgagaaagcatttcatgtgcatgattctacgaaaagcagcagagaggaggaaatagaagaacttaggaaagaggtccgagaggctaggaggataaaaatgctacaccagccaatcaaggtcatggacatggagtttgagcttcaggcactgcggactctcatctcacagaagactcagctatgcaatcagctaaataaagaggtacctcctgtcagatatagggcagagtttggactagtagggtcttcaaattttagtaatgttgagctatctgataatcaccgcccaactatttcatttgtagcttgccacgatcaagaggttagaagtagatagttctgacctctttgagcttgaaggttctaatacccttggatcgcagttttgtattattcctcgagttgatggtgctccaaacattgcgaactgtccaattcagtggtatcgtgtaatttctggtggcagtagaggactcatatcgggagcaacaaaatttacgtatgccccagaaccgtttgatgttggtcgattattacaagcagagattattttgaatgcagataaaatcatagttcagacggatggccctatagataatgctgcaggacttgaacattatgtggactcactcatgaaacggacggatattgagttcaacgtagtagtaacccaaatgaatgggaaggattactcgtcgaattctgtccatgtttttcatattggaaagctgagaataaaacttcaaaaaggatggtctacaaaagcaagagagttatattccaccacgatgaagttatgtgggagccgtggtggtggtaatgctgcagctagggcagttttctggcaagctaggaaaggcctgtcctacactctagcattcgaaacagacagggacaggaatgctgcaattatgattgctcgcaaatttgcttcgaattgcaatatcgctctcgctggcccaggtgaccaagacacctgatgaagtgatcatgcgtgttttgacagagacactgtacataatcaggtgtagattggctgatttttttgggagtctatttgtgtgcttgtgagggtagaggttgtacaccgcgtgacggtaatccccccttccatatatcttatggaggcattgtttttgtttgcctgtttgcagcattagcgacgttctcgaaacgtgatgtacaaattgatcactgttcttgtgcgtcacatctgtaataatatcactgttcttatcgcttcttt

SEQ ID NO: 204992 - DNA, 604 bp, Zea Mays
aagcagtggctagaaaggtagtagtaacccaaatgaatgggaaggattactcgtcgaattctgtccatgtttttcatattggaaagctgagaataaaacttcaaaaaggatggtctacaaaagcaagagagttatattccaccacgatgaagttatgtgggagccgtggtggtggtaatgctgcagctagggcagttttctggcaagctaggaaaggcctgtcctacactctagcattcgaaacagacagggacaggaatgctgcaattatgattgctcgcaaatttgcttcgaattgcaatatcgctctcgctggcccaggtgaccaagacacctgatgaagtgatcatgcgtgttttgacagagacactgtacataatcaggtgtagattggctgatttttttgggagtctatttgtgtgcttgtgagggtagaggttgtacaccgcgtgacggtaatccccccttccatatatcttatggaggcattgtttttgtttgcctgtttgcagcattagcgacgttctcgaaacgtgatgtacaaattgatcactgttcttgtgcgtcacatctgtaataatatcactgttcttatcgcttcttt

SEQ ID NO: 204993 - DNA, 604 bp, Zea Mays; identical to SEQ ID NO: 204992

SEQ ID NO: 204994 - DNA, 779 bp, Zea Mays
cttcacgtatgtcttgagctgtagctgctgcatttatgggtcgttttctggttctagcatagctttctgtctgagtctgcgaggaggaaccggcacctgcagcagcagcagtcctaggcaaatttcggccacggggaccctaagttgcacctagagcttcatccacagcaccacaaatgttatcaccatcaggtagtagtaacccaaatgaatgggaaggattactcgtcgaattctgtccatgtttttcatattggaaagctgagaataaaacttcaaaaaggatggtctacaaaagcaagagagttatattccaccacgatgaagttatgtgggagccgtggtggtggtaatgctgcagctagggcagttttctggcaagctaggaaaggcctgtcctacactctagcattcgaaacagacagggacaggaatgctgcaattatgattgctcgcaaatttgcttcgaattgcaatatcgctctcgctggcccaggtgaccaagacacctgatgaagtgatcatgcgtgttttgacagagacactgtacataatcaggtgtagattggctgatttttttgggagtctatttgtgtgcttgtgagggtagaggttgtacaccgcgtgacggtaatccccccttccatatatcttatggaggcattgtttttgtttgcctgtttgcagcattagcgacgttctcgaaacgtgatgtacaaattgatcactgttcttgtgcgtcacatctgtaataatatcactgttcttatcgcttcttt

SEQ ID NO: 204995 - DNA, 3200 bp, Zea Mays
gcttgacggcgtgacaggcagcaaacggccgcccccttctccttccctccacccctcttcgtctcgtctcggcctctttccttcctctgttcctcatcttcgtctcggcctcacccccgacgaccccgcaccgatccctccacgcgctcgcgcgcagcacgggcggagttgggcgaactccgtgctcgttcaacccgtactctagtacctccagggttcgggtcgggtctgccttcctcttcgtatggcttccgccgccgcggaaaccctcgcctcgttcccaatcgcatccccgtcccgctcgctcctacgccccttccccaggcgaccagccggcgctaggacaggcgcaccgtcgatccggatatccgccgtgccgccgcggggcctcgggctcgcgctcgtacaccgccgctgcccgccagcggcgcgcgcgaatgttgagcgcgacggcgacggcgcctccgggaacggcgagccgtcgtcctcgtctggggatggcgaccgcgacgcggctgcggagtcggggggcgatagcaccagcacgagcaccacgagcacggccgcgacaccgccgccgccctcgtcgaagaggaacgaaaataagtggcggcggaggctgactaagggaggcggcgtggggcggtggctatgggagcccatagtccagggacgggagatgggcttcctcctgctccagctgggcttcgccatatttgcgctacgcatgcttcgcccagagatcgcgttgcccggttcagagccccgcccacagacgacgtacgtcagtgtaccatacagcgacttcctggccagcataaacaaggaccaggtgaagaaggttgaggtggacggggtgcatatcatgttccgactccgcccagaggtggagtcccaggtccgtgttgagcagacaccgacacagcgcggagcagattatgtcattgataatgctggagtttcaaggagaattgtgttcacgacgactcgtccagtggacataaagacaccatacgagaagatggtggaaaacatggttgaatttgggtcaccggacaagaggtctggcggcatgctcaattctgccctggtaggtcttatctatgttgtattgattgcggtagttttgcagcgcctgccaataagcttttctcagcaatcacccggtcagttgaggaataggaagaattctaattccggcggagcaaaagtttctgaaagttcggatatagttacatttgctgatgtggctggagtagatgaggcaaaagaagagcttgaagaaattgtggagttcttaaggaacccagaaagatatatcccattcataagttgctctgctagtgaatttgttgagctatatgtaggcatgggagcagctcgagtacgtgacctatttgctaaggccaaaaaggaatcgccatcgattatttttatcgatgagattgatgccgttgcaaaaagccgtgatagtcgatatcgcattgtcagtaatgatgaacgtgagcagacattaaaccaattgctcacggaaatggatggctttgataccaactcggctgtcattgtattgggggcaacaaatcgagctgatgttttggatcctgcccttaggcgccctgggagatttgaccgtgtggttatggttgaagctcctgataggtttggaagagaatcaattctaaaagttcatgtgaaaagaagagagcttccactgagtaaagatgtagatctagccaatattgctgcaatgacaactggttttactggagcagaccttgcaaacttggtaaacgaagctgctctgttggctgggcgattaaataaagaaatagtggaaaaggttgacttcatccgtgcggttgagcgatctatagcagggatagagaaaaagcatgcaaaattgaagggtaatgaaaaagctgttgttgcgcggcatgaagtaggtcatgcactcgtgggaactgctgtagcaaacctccttcctggacagccacgtgtggagaaattgagtatattgccaagatctggaggtgcattaggcttcacgtacacccctcccgtcacagaggatagatatttactctttgttgatgaactacgtggccgtttagtaacactactgggtgggagggcagcagaggaagttgttttagcaggacgggtttcgactggtgcacttgatgacataagacgtgctactgacatggcctacaaagctgtagcagaatacggtcttagtcagcgcatcgggccaatatcacttgctacactgtcaaatggtggtttagatgactctggtggctctccatggggaaaggaccagggacatctagttgatctcgttcagagggaagtaaaagcgcttttacagtcgtcactggaagtagctctttcagttattcgtgctaatcctgcagttttggaaggcctcggagcatacttagaagagaaagaaaaggttgaaggcgaggagcttcaagagtggctaaaatcggttgttgcatcaaaagagttgacctcttttatcagaggacagcaagagcaagttcttcagctggaagcaggctcctagcgtcaggagtatgcaccgggctcttaaaattaattacttaacaaaagtgactcagcaattagaacatacaatatgagacacaaggtatgcaatggaaaccttcatatactgggaagagacctgtggccatgtgtggtgggttgtatgaacccccacccattcatgctaagacaaaccgggtctgctaagacaaactggtcggatgcccaccctttgttcggtgaatcatgagatcgagccctatacgagaattcaggaaaaaaaaagaaaatctacatgcccgagtgaccatgtaaatatctatcattgcagttcctgaacccttgactacaaaaaaagaaatccagagatgattcatattgagctgtaacattgtacgatcaacctcaggaatattgtaagtgattcagcttcacatgttgttccatagattaggtcggtgttacacatgtaaaagattcttttttggcaatatattcttgtactcaccctattggaagttgttttcctctatataccatcctagaaatgatcaataggataatgcttatacggactatggttcctgtattgagaattgttcttcagaaatcagaatagtgatcgctttttgaaagaataaaaa

SEQ ID NO: 204996 - DNA, 3181 bp, Zea Mays
caggcagcaaacggccgcccccttctccttccctccacccctcttcgtctcgtctcggcctctttccttcctctgttcctcatcttcgtctcggcctcacccccgacgaccccgcaccgatccctccacgcgctcgcgcgcagcacgggcggagttgggcgaactccgtgctcgttcaacccgtactctagtacctccagggttcgggtcgggtctgccttcctcttcgtatggcttccgccgccgcggaaaccctcgcctcgttcccaatcgcatccccgtcccgctcgctcctacgccccttccccaggcgaccagccggcgctaggacaggcgcaccgtcgatccggatatccgccgtgccgccgcggggcctcgggctcgcgctcgtacaccgccgctgcccgccagcggcgcgcgcgaatgttgagcgcgacggcgacggcgcctccgggaacggcgagccgtcgtcctcgtctggggatggcgaccgcgacgcggctgcggagtcggggggcgatagcaccagcacgagcaccacgagcacggccgcgacaccgccgccgccctcgtcgaagaggaacgaaaataagtggcggcggaggctgactaagggaggcggcgtggggcggtggctatgggagcccatagtccagggacgggagatgggcttcctcctgctccagctgggcttcgccatatttgcgctacgcatgcttcgcccagagatcgcgttgcccggttcagagccccgcccacagacgacgtacgtcagtgtaccatacagcgacttcctggccagcataaacaaggaccaggtgaagaaggttgaggtggacggggtgcatatcatgttccgactccgcccagaggtggagtcccaggtccgtgttgagcagacaccgacacagcgcggagcagattatgtcattgataatgctggagtttcaaggagaattgtgttcacgacgactcgtccagtggacataaagacaccatacgagaagatggtggaaaacatggttgaatttgggtcaccggacaagaggtctggcggcatgctcaattctgccctggtaggtcttatctatgttgtattgattgcggtagttttgcagcgcctgccaataagcttttctcagcaatcacccggtcagttgaggaataggaagaattctaattccggcggagcaaaagtttctgaaagttcggatatagttacatttgctgatgtggctggagtagatgaggcaaaagaagagcttgaagaaattgtggagttcttaaggaacccagaaagatatatcccattcataagttgctctgctagtgaatttgttgagctatatgtaggcatgggagcagctcgagtacgtgacctatttgctaaggccaaaaaggaatcgccatcgattatttttatcgatgagattgatgccgttgcaaaaagccgtgatagtcgatatcgcattgtcagtaatgatgaacgtgagcagacattaaaccaattgctcacggaaatggatggctttgataccaactcggctgtcattgtattgggggcaacaaatcgagctgatgttttggatcctgcccttaggcgccctgggagatttgaccgtgtggttatggttgaagctcctgataggtttggaagagaatcaattctaaaagttcatgtgaaaagaagagagcttccactgagtaaagatgtagatctagccaatattgctgcaatgacaactggttttactggaccttgcaaacttggtaaacgaagctgctctgttggctgggcgattaaataaagaaatagtggaaaaggttgacttcatccgtgcggttgagcgatctatagcagggatagagaaaaagcatgcaaaattgaagggtaatgaaaaagctgttgttgcgcggcatgaagtaggtcatgcactcgtgggaactgctgtagcaaacctccttcctggacagccacgtgtggagaaattgagtatattgccaagatctggaggtgcattaggcttcacgtacacccctcccgtcacagaggatagatatttactctttgttgatgaactacgtggccgtttagtaacactactgggtgggagggcagcagaggaagttgttttagcaggacgggtttcgactggtgcacttgatgacataagacgtgctactgacatggcctacaaagctgtagcagaatacggtcttagtcagcgcatcgggccaatatcacttgctacactgtcaaatggtggtttagatgactctggtggctctccatggggaaaggaccagggacatctagttgatctcgttcagagggaagtaaaagcgcttttacagtcgtcactggaagtagctctttcagttattcgtgctaatcctgcagttttggaaggcctcggagcatacttagaagagaaagaaaaggttgaaggcgaggagcttcaagagtggctaaaatcggttgttgcatcaaaagagttgacctcttttatcagaggacagcaagagcaagttcttcagctggaagcaggctcctagcgtcaggagtatgcaccgggctcttaaaattaattacttaacaaaagtgactcagcaattagaacatacaatatgagacacaaggtatgcaatggaaaccttcatatactgggaagagacctgtggccatgtgtggtgggttgtatgaacccccacccattcatgctaagacaaaccgggtctgctaagacaaactggtcggatgcccaccctttgttcggtgaatcatgagatcgagccctatacgagaattcaggaaaaaaaaagaaaatctacatgcccgagtgaccatgtaaatatctatcattgcagttcctgaacccttgactacaaaaaaagaaatccagagatgattcatattgagctgtaacattgtacgatcaacctcaggaatattgtaagtgattcagcttcacatgttgttccatagattaggtcggtgttacacatgtaaaagattcttttttggcaatatattcttgtactcaccctattggaagttgttttcctctatataccatcctagaaatgatcaataggataatgcttatacggactatggttcctgtattgagaattgttcttcagaaatcagaatagtgatcgctttttgaaagaataaaaa

SEQ ID NO: 204997 - DNA, 3232 bp, Zea Mays
cagcaaacggccgcccccttctccttccctccacccctcttcgtctcgtctcggcctctttccttcctctgttcctcatcttcgtctcggcctcacccccgacgaccccgcaccgatccctccacgcgctcgcgcgcagcacgggcggagttgggcgaactccgtgctcgttcaacccgtactctagtacctccagggttcgggtcgggtctgccttcctcttcgtatggcttccgccgccgcggaaaccctcgcctcgttcccaatcgcatccccgtcccgctcgctcctacgccccttccccaggcgaccagccggcgctaggacaggcgcaccgtcgatccggatatccgccgtgccgccgcggggcctcgggctcgcgctcgtacaccgccgctgcccgccagcggcgcgcgcgaatgttgagcgcgacggcgacggcgcctccgggaacggcgagccgtcgtcctcgtctggggatggcgaccgcgacgcggctgcggagtcggggggcgatagcaccagcacgagcaccacgagcacggccgcgacaccgccgccgccctcgtcgaagaggaacgaaaataagtggcggcggaggctgactaagggaggcggcgtggggcggtggctatgggagcccatagtccagggacgggagatgggcttcctcctgctccagctgggcttcgccatatttgcgctacgcatgcttcgcccagagatcgcgttgcccggttcagagccccgcccacagacgacgtacgtcagtgtaccatacagcgacttcctggccagcataaacaaggaccaggtgaagaaggttgaggtggacggggtgcatatcatgttccgactccgcccagaggtggagtcccaggtccgtgttgagcagacaccgacacagcgcggagcagattatgtcattgataatgctggagtttcaaggagaattgtgttcacgacgactcgtccagtggacataaagacaccatacgagaagatggtggaaaacatggttgaatttgggtcaccggacaagaggtctggcggcatgctcaattctgccctggtaggtcttatctatgttgtattgattgcggtagttttgcagcgcctgccaataagcttttctcagcaatcacccggtcagttgaggaataggaagaattctaattccggcggagcaaaagtttctgaaagttcggatatagttacatttgctgatgtggctggagtagatgaggcaaaagaagagcttgaagaaattgtggtcgtggtgtcttattggtgggtcttccagggactggaaagacacttcttgcaaaagccgtagcaggagaagcagaagtcccattcataagttgctctgctagtgaatttgttgagctatatgtaggcatgggagcagctcgagtacgtgacctatttgctaaggccaaaaaggaatcgccatcgattatttttatcgatgagattgatgccgttgcaaaaagccgtgatagtcgatatcgcattgtcagtaatgatgaacgtgagcagacattaaaccaattgctcacggaaatggatggctttgataccaactcggctgtcattgtattgggggcaacaaatcgagctgatgttttggatcctgcccttaggcgccctgggagatttgaccgtgtggttatggttgaagctcctgataggtttggaagagaatcaattctaaaagttcatgtgaaaagaagagagcttccactgagtaaagatgtagatctagccaatattgctgcaatgacaactggttttactggagcagaccttgcaaacttggtaaacgaagctgctctgttggctgggcgattaaataaagaaatagtggaaaaggttgacttcatccgtgcggttgagcgatctatagcagggatagagaaaaagcatgcaaaattgaagggtaatgaaaaagctgttgttgcgcggcatgaagtaggtcatgcactcgtgggaactgctgtagcaaacctccttcctggacagccacgtgtggagaaattgagtatattgccaagatctggaggtgcattaggcttcacgtacacccctcccgtcacagaggatagatatttactctttgttgatgaactacgtggccgtttagtaacactactgggtgggagggcagcagaggaagttgttttagcaggacgggtttcgactggtgcacttgatgacataagacgtgctactgacatggcctacaaagctgtagcagaatacggtcttagtcagcgcatcgggccaatatcacttgctacactgtcaaatggtggtttagatgactctggtggctctccatggggaaaggaccagggacatctagttgatctcgttcagagggaagtaaaagcgcttttacagtcgtcactggaagtagctctttcagttattcgtgctaatcctgcagttttggaaggcctcggagcatacttagaagagaaagaaaaggttgaaggcgaggagcttcaagagtggctaaaatcggttgttgcatcaaaagagttgacctcttttatcagaggacagcaagagcaagttcttcagctggaagcaggctcctagcgtcaggagtatgcaccgggctcttaaaattaattacttaacaaaagtgactcagcaattagaacatacaatatgagacacaaggtatgcaatggaaaccttcatatactgggaagagacctgtggccatgtgtggtgggttgtatgaacccccacccattcatgctaagacaaaccgggtctgctaagacaaactggtcggatgcccaccctttgttcggtgaatcatgagatcgagccctatacgagaattcaggaaaaaaaaagaaaatctacatgcccgagtgaccatgtaaatatctatcattgcagttcctgaacccttgactacaaaaaaagaaatccagagatgattcatattgagctgtaacattgtacgatcaacctcaggaatattgtaagtgattcagcttcacatgttgttccatagattaggtcggtgttacacatgtaaaagattcttttttggcaatatattcttgtactcaccctattggaagttgttttcctctatataccatcctagaaatgatcaataggataatgcttatacggactatggttcctgtattgagaattgttcttcagaaatcagaatagtgatcgctttttgaaagaataaaaa

SEQ ID NO: 204998 - DNA, 3484 bp, Zea Mays
aacggccgcccccttctccttccctccacccctcttcgtctcgtctcggcctctttccttcctctgttcctcatcttcgtctcggcctcacccccgacgaccccgcaccgatccctccacgcgctcgcgcgcagcacgggcggagttgggcgaactccgtgctcgttcaacccgtactctagtacctccagggttcgggtcgggtctgccttcctcttcgtatggcttccgccgccgcggaaaccctcgcctcgttcccaatcgcatccccgtcccgctcgctcctacgccccttccccaggcgaccagccggcgctaggacaggcgcaccgtcgatccggatatccgccgtgccgccgcggggcctcgggctcgcgctcgtacaccgccgctgcccgccagcggcgcgcgcgaatgttgagcgcgacggcgacggcgcctccgggaacggcgagccgtcgtcctcgtctggggatggcgaccgcgacgcggctgcggagtcggggggcgatagcaccagcacgagcaccacgagcacggccgcgacaccgccgccgccctcgtcgaagaggaacgaaaataagtggcggcggaggctgactaagggaggcggcgtggggcggtggctatgggagcccatagtccagggacgggagatgggcttcctcctgctccagctgggcttcgccatatttgcgctacgcatgcttcgcccagagatcgcgttgcccggttcagagccccgcccacagacgacgtacgtcagtgtaccatacagcgacttcctggccagcataaacaaggaccaggtgaagaaggttgaggtggacggggtgcatatcatgttccgactccgcccagaggtggagtcccaggtccgtgttgagcagacaccgacacagcgcggagcagattatgtcattgataatgctggagtttcaaggagaattgtgttcacgacgactcgtccagtggacataaagacaccatacgagaagatggtggaaaacatggttgaatttgggtcaccggacaagaggtctggcggcatgctcaattctgccctggtaggtcttatctatgttgtattgattgcggtagttttgcagcgcctgccaataagcttttctcagcaatcacccggtcagttgaggaataggaagaattctaattccggcggagcaaaagtttctgaaagttcggatatagttacatttgctgatgtggctggagtagatgaggcaaaagaagagcttgaagaaattgtggcgtggtgtcttattggtgggtcttccagggactggaaagacacttcttgcaaaagccgtagcaggagaagcagaagtcccattcataagttgctctgctagtgaatttgttgagctatatgtaggcatgggagcagctcgagtacgtgacctatttgctaaggccaaaaaggaatcgccatcgattatttttatcgatgagattgatgccgttgcaaaaagccgtgatagtcgatatcgcattgtcagtaatgatgaacgtgagcagacattaaaccaattgctcacggtaggacagtgccctttcttatttcttgagcattcaccaaattagcttcatcgcaagttgggacccaattaaagcttatacttgtatttttattggctgataattgattttttgctcttggtaaaacttaaaaggggtttgagccacactctacttcactactaaggatactgctttatcatgcaatatttgtttttgagaaagggcggaaatggtattattattggtttagctgccttgattttgggttctccccaggaaatggatggctttgataccaactcggctgtcattgtattgggggcaacaaatcgagctgatgttttggatcctgcccttaggcgccctgggagatttgaccgtgtggttatggttgaagctcctgataggtttggaagagaatcaattctaaaagttcatgtgaaaagaagagagcttccactgagtaaagatgtagatctagccaatattgctgcaatgacaactggttttactggagcagaccttgcaaacttggtaaacgaagctgctctgttggctgggcgattaaataaagaaatagtggaaaaggttgacttcatccgtgcggttgagcgatctatagcagggatagagaaaaagcatgcaaaattgaagggtaatgaaaaagctgttgttgcgcggcatgaagtaggtcatgcactcgtgggaactgctgtagcaaacctccttcctggacagccacgtgtggagaaattgagtatattgccaagatctggaggtgcattaggcttcacgtacacccctcccgtcacagaggatagatatttactctttgttgatgaactacgtggccgtttagtaacactactgggtgggagggcagcagaggaagttgttttagcaggacgggtttcgactggtgcacttgatgacataagacgtgctactgacatggcctacaaagctgtagcagaatacggtcttagtcagcgcatcgggccaatatcacttgctacactgtcaaatggtggtttagatgactctggtggctctccatggggaaaggaccagggacatctagttgatctcgttcagagggaagtaaaagcgcttttacagtcgtcactggaagtagctctttcagttattcgtgctaatcctgcagttttggaaggcctcggagcatacttagaagagaaagaaaaggttgaaggcgaggagcttcaagagtggctaaaatcggttgttgcatcaaaagagttgacctcttttatcagaggacagcaagagcaagttcttcagctggaagcaggctcctagcgtcaggagtatgcaccgggctcttaaaattaattacttaacaaaagtgactcagcaattagaacatacaatatgagacacaaggtatgcaatggaaaccttcatatactgggaagagacctgtggccatgtgtggtgggttgtatgaacccccacccattcatgctaagacaaaccgggtctgctaagacaaactggtcggatgcccaccctttgttcggtgaatcatgagatcgagccctatacgagaattcaggaaaaaaaaagaaaatctacatgcccgagtgaccatgtaaatatctatcattgcagttcctgaacccttgactacaaaaaaagaaatccagagatgattcatattgagctgtaacattgtacgatcaacctcaggaatattgtaagtgattcagcttcacatgttgttccatagattaggtcggtgttacacatgtaaaagattcttttttggcaatatattcttgtactcaccctattggaagttgttttcctctatataccatcctagaaatgatcaataggataatgcttatacggactatggttcctgtattgagaattgttcttcagaaatcagaatagtgatcgctttttgaaagaataaaaa

SEQ ID NO: 204999 - DNA, 3187 bp, Zea Mays
ctcgtctcggcctctttccttcctctgttcctcatcttcgtctcggcctcacccccgacgaccccgcaccgatccctccacgcgctcgcgcgcagcacgggcggagttgggcgaactccgtgctcgttcaacccgtactctagtacctccagggttcgggtcgggtctgccttcctcttcgtatggcttccgccgccgcggaaaccctcgcctcgttcccaatcgcatccccgtcccgctcgctcctacgccccttccccaggcgaccagccggcgctaggacaggcgcaccgtcgatccggatatccgccgtgccgccgcggggcctcgggctcgcgctcgtacaccgccgctgcccgccagcggcgcgcgcgaatgttgagcgcgacggcgacggcgcctccgggaacggcgagccgtcgtcctcgtctggggatggcgaccgcgacgcggctgcggagtcggggggcgatagcaccagcacgagcaccacgagcacggccgcgacaccgccgccgccctcgtcgaagaggaacgaaaataagtggcggcggaggctgactaagggaggcggcgtggggcggtggctatgggagcccatagtccagggacgggagatgggcttcctcctgctccagctgggcttcgccatatttgcgctacgcatgcttcgcccagagatcgcgttgcccggttcagagccccgcccacagacgacgtacgtcagtgtaccatacagcgacttcctggccagcataaacaaggaccaggtgaagaaggttgaggtggacggggtgcatatcatgttccgactccgcccagaggtggagtcccaggtccgtgttgagcagacaccgacacagcgcggagcagattatgtcattgataatgctggagtttcaaggagaattgtgttcacgacgactcgtccagtggacataaagacaccatacgagaagatggtggaaaacatggttgaatttgggtcaccggacaagaggtctggcggcatgctcaattctgccctggtaggtcttatctatgttgtattgattgcggtagttttgcagcgcctgccaataagcttttctcagcaatcacccggtcagttgaggaataggaagaattctaattccggcggagcaaaagtttctgaaagttcggatatagttacatttgctgatgtggctggagtagatgaggcaaaagaagagcttgaagaaattgtggcgtggtgtcttattggtgggtcttccagggactggaaagacacttcttgcaaaagccgtagcaggagaagcagaagtcccattcataagttgctctgctagtgaatttgttgagctatatgtaggcatgggagcagctcgagtacgtgacctatttgctaaggccaaaaaggaatcgccatcgattatttttatcgatgagattgatgccgttgcaaaaagccgtgatagtcgatatcgcattgtcagtaatgatgaacgtgagcagacattaaaccaattgctcacggaaatggatggctttgataccaactcggctgtcattgtattgggggcaacaaatcgagctgatgttttggatcctgcccttaggcgccctgggagatttgaccgtgtggttatggttgaagctcctgataggtttggaagagaatcaattctaaaagttcatgtgaaaagaagagagcttccactgagtaaagatgtagatctagccaatattgctgcaatgacaactggttttactggagcagaccttgcaaacttggtaaacgaagctgctctgttggctgggcgattaaataaagaaatagtggaaaaggttgacttcatccgtgcggttgagcgatctatagcagggatagagaaaaagcatgcaaaattgaagggtaatgaaaaagctgttgttgcgcggcatgaagtaggtcatgcactcgtgggaactgctgtagcaaacctccttcctggacagccacgtgtggagaaattgagtatattgccaagatctggaggtgcattaggcttcacgtacacccctcccgtcacagaggatagatatttactctttgttgatgaactacgtggccgtttagtaacactactgggtgggagggcagcagaggaagttgttttagcaggacgggtttcgactggtgcacttgatgacataagacgtgctactgacatggcctacaaagctgtagcagaatacggtcttagtcagcgcatcgggccaatatcacttgctacactgtcaaatggtggtttagatgactctggtggctctccatggggaaaggaccagggacatctagttgatctcgttcagagggaagtaaaagcgcttttacagtcgtcactggaagtagctctttcagttattcgtgctaatcctgcagttttggaaggcctcggagcatacttagaagagaaagaaaaggttgaaggcgaggagcttcaagagtggctaaaatcggttgttgcatcaaaagagttgacctcttttatcagaggacagcaagagcaagttcttcagctggaagcaggctcctagcgtcaggagtatgcaccgggctcttaaaattaattacttaacaaaagtgactcagcaattagaacatacaatatgagacacaaggtatgcaatggaaaccttcatatactgggaagagacctgtggccatgtgtggtgggttgtatgaacccccacccattcatgctaagacaaaccgggtctgctaagacaaactggtcggatgcccaccctttgttcggtgaatcatgagatcgagccctatacgagaattcaggaaaaaaaaagaaaatctacatgcccgagtgaccatgtaaatatctatcattgcagttcctgaacccttgactacaaaaaaagaaatccagagatgattcatattgagctgtaacattgtacgatcaacctcaggaatattgtaagtgattcagcttcacatgttgttccatagattaggtcggtgttacacatgtaaaagattcttttttggcaatatattcttgtactcaccctattggaagttgttttcctctatataccatcctagaaatgatcaataggataatgcttatacggactatggttcctgtattgagaattgttcttcagaaatcagaatagtgatcgctttttgaaagaataaaaa

SEQ ID NO: 205000 - DNA, 3314 bp, Zea Mays
ctcggcctctttccttcctctgttcctcatcttcgtctcggcctcacccccgacgaccccgcaccgatccctccacgcgctcgcgcgcagcacgggcggagttgggcgaactccgtgctcgttcaacccgtactctagtacctccagggttcgggtcgggtctgccttcctcttcgtatggcttccgccgccgcggaaaccctcgcctcgttcccaatcgcatccccgtcccgctcgctcctacgccccttccccaggcgaccagccggcgctaggacaggcgcaccgtcgatccggatatccgccgtgccgccgcggggcctcgggctcgcgctcgtacaccgccgctgcccgccagcggcgcgcgcgaatgttgagcgcgacggcgacggcgcctccgggaacggcgagccgtcgtcctcgtctggggatggcgaccgcgacgcggctgcggagtcggggggcgatagcaccagcacgagcaccacgagcacggccgcgacaccgccgccgccctcgtcgaagaggaacgaaaataagtggcggcggaggctgactaagggaggcggcgtggggcggtggctatgggagcccatagtccagggacgggagatgggcttcctcctgctccagctgggcttcgccatatttgcgctacgcatgcttcgcccagagatcgcgttgcccggttcagagccccgcccacagacgacgtacgtcagtgtaccatacagcgacttcctggccagcataaacaaggaccaggtgaagaaggttgaggtggacggggtgcatatcatgttccgactccgcccagaggtggagtcccaggtccgtgttgagcagacaccgacacagcgcggagcagattatgtcattgataatgctggagtttcaaggagaattgtgttcacgacgactcgtccagtggacataaagacaccatacgagaagatggtggaaaacatggttgaatttgggtcaccggacaagaggtctggcggcatgctcaattctgccctggtaggtcttatctatgttgtattgattgcggtagttttgcagcgcctgccaataagcttttctcagcaatcacccggtcagttgaggaataggaagaattctaattccggcggagcaaaagtttctgaaagttcggatatagttacatttgctgatgtggctggagtagatgaggcaaaagaagagcttgaagaaattgtggagttcttaaggaacccagaaagatatatcccattcataagttgctctgctagtgaatttgttgagctatatgtaggcatgggagcagctcgagtacgtgacctatttgctaaggccaaaaaggaatcgccatcgattatttttatcgatgagattgatgccgttgcaaaaagccgtgatagtcgatatcgcattgtcagtaatgatgaacgtgagcagacattaaaccaattgctcacgctgccttgattttgggttctccccaggaaatggatggctttgataccaactcggctgtcattgtattgggggcaacaaatcgagctgatgttttggatcctgcccttaggcgccctgggagatttgaccgtgtggttatggttgaagctcctgataggtttggaagagaatcaattctaaaagttcatgtgaaaagaagagagcttccactgagtaaagatgtagatctagccaatattgctgcaatgacaactggttttactgggtaaaatttattttatcaatttcttgaccttgtagagatttcaaattgacatgtcaaaaaaacttatactgtacagagcagaccttgcaaacttggtaaacgaagctgctctgttggctgggcgattaaataaagaaatagtggaaaaggttgacttcatccgtgcggttgagcgatctatagcagggatagagaaaaagcatgcaaaattgaagggtaatgaaaaagctgttgttgcgcggcatgaagtaggtcatgcactcgtgggaactgctgtagcaaacctccttcctggacagccacgtgtggaggtttgaacttaagcaattactgatagaacaatctgataaaaaaggatctaatttggctttttaatgttgaatttaacagaaattgagtatattgccaagatctggaggtgcattaggcttcacgtacacccctcccgtcacagaggatagatatttactctttgttgatgaactacgtggccgtttagtaacactactgggtgggagggcagcagaggaagttgttttagcaggacgggtttcgactggtgcacttgatgacataagacgtgctactgacatggcctacaaagctgtagcagaatacggtcttagtcagcgcatcgggccaatatcacttgctacactgtcaaatggtggtttagatgactctggtggctctccatggggaaaggaccagggacatctagttgatctcgttcagagggaagtaaaagcgcttttacagtcgtcactggaagtagctctttcagttattcgtgctaatcctgcagttttggaaggcctcggagcatacttagaagagaaagaaaaggttgaaggcgaggagcttcaagagtggctaaaatcggttgttgcatcaaaagagttgacctcttttatcagaggacagcaagagcaagttcttcagctggaagcaggctcctagcgtcaggagtatgcaccgggctcttaaaattaattacttaacaaaagtgactcagcaattagaacatacaatatgagacacaaggtatgcaatggaaaccttcatatactgggaagagacctgtggccatgtgtggtgggttgtatgaacccccacccattcatgctaagacaaaccgggtctgctaagacaaactggtcggatgcccaccctttgttcggtgaatcatgagatcgagccctatacgagaattcaggaaaaaaaaagaaaatctacatgcccgagtgaccatgtaaatatctatcattgcagttcctgaacccttgactacaaaaaaagaaatccagagatgattcatattgagctgtaacattgtacgatcaacctcaggaatattgtaagtgattcagcttcacatgttgttccatagattaggtcggtgttacacatgtaaaagattcttttttggcaatatattcttgtactcaccctattggaagttgttttcctctatataccatcctagaaatgatcaataggataatgcttatacggactatggttcctgtattgagaattgttcttcagaaatcagaatagtgatcgctttttgaaagaataaaaa

SEQ ID NO: 205001 - DNA, 3439 bp, Zea Mays
ctcggcctctttccttcctctgttcctcatcttcgtctcggcctcacccccgacgaccccgcaccgatccctccacgcgctcgcgcgcagcacgggcggagttgggcgaactccgtgctcgttcaacccgtactctagtacctccagggttcgggtcgggtctgccttcctcttcgtatggcttccgccgccgcggaaaccctcgcctcgttcccaatcgcatccccgtcccgctcgctcctacgccccttccccaggcgaccagccggcgctaggacaggcgcaccgtcgatccggatatccgccgtgccgccgcggggcctcgggctcgcgctcgtacaccgccgctgcccgccagcggcgcgcgcgaatgttgagcgcgacggcgacggcgcctccgggaacggcgagccgtcgtcctcgtctggggatggcgaccgcgacgcggctgcggagtcggggggcgatagcaccagcacgagcaccacgagcacggccgcgacaccgccgccgccctcgtcgaagaggaacgaaaataagtggcggcggaggctgactaagggaggcggcgtggggcggtggctatgggagcccatagtccagggacgggagatgggcttcctcctgctccagctgggcttcgccatatttgcgctacgcatgcttcgcccagagatcgcgttgcccggttcagagccccgcccacagacgacgtacgtcagtgtaccatacagcgacttcctggccagcataaacaaggaccaggtgaagaaggttgaggtggacggggtgcatatcatgttccgactccgcccagaggtggagtcccaggtccgtgttgagcagacaccgacacagcgcggagcagattatgtcattgataatgctggagtttcaaggagaattgtgttcacgacgactcgtccagtggacataaagacaccatacgagaagatggtggaaaacatggttgaatttgggtcaccggacaagaggtctggcggcatgctcaattctgccctggtaggtcttatctatgttgtattgattgcggtagttttgcagcgcctgccaataagcttttctcagcaatcacccggtcagttgaggaataggaagaattctaattccggcggagcaaaagtttctgaaagttcggatatagttacatttgctgatgtggctggagtagatgaggcaaaagaagagcttgaagaaattgtgcgtggtgtcttattggtgggtcttccagggactggaaagacacttcttgcaaaagccgtagcaggagaagcagaagtcccattcataagttgctctgctagtgaatttgttgagctatatgtaggcatgggagcagctcgagtacgtgacctatttgctaaggccaaaaaggaatcgccatcgattatttttatcgatgagattgatgccgttgcaaaaagccgtgatagtcgatatcgcattgtcagtaatgatgaacgtgagcagacattaaaccaattgctcacggtaggacagtgccctttcttatttcttgagcattcaccaaattagcttcatcgcaagttgggacccaattaaagcttatacttgtatttttattggctgataattgattttttgctcttggtaaaacttaaaaggggtttgagccacactctacttcactactaaggatactgctttatcatgcaatatttgtttttgagaaagggcggaaatggtattattattggtttagctgccttgattttgggttctccccaggaaatggatggctttgataccaactcggctgtcattgtattgggggcaacaaatcgagctgatgttttggatcctgcccttaggcgccctgggagatttgaccgtgtggttatggttgaagctcctgataggtttggaagagaatcaattctaaaagttcatgtgaaaagaagagagcttccactgagtaaagatgtagatctagccaatattgctgcaatgacaactggttttactggagcagaccttgcaaacttggtaaacgaagctgctctgttggctgggcgattaaataaagaaatagtggaaaaggttgacttcatccgtgcggttgagcgatctatagcagggatagagaaaaagcatgcaaaattgaagggtaatgaaaaagctgttgttgcgcggcatgaagtaggtcatgcactcgtgggaactgctgtagcaaacctccttcctggacagccacgtgtggagaaattgagtatattgccaagatctggaggtgcattaggcttcacgtacacccctcccgtcacagaggatagatatttactctttgttgatgaactacgtggccgtttagtaacactactgggtgggagggcagcagaggaagttgttttagcaggacgggtttcgactggtgcacttgatgacataagacgtgctactgacatggcctacaaagctgtagcagaatacggtcttagtcagcgcatcgggccaatatcacttgctacactgtcaaatggtggtttagatgactctggtggctctccatggggaaaggaccagggacatctagttgatctcgttcagagggaagtaaaagcgcttttacagtcgtcactggaagtagctctttcagttattcgtgctaatcctgcagttttggaaggcctcggagcatacttagaagagaaagaaaaggttgaaggcgaggagcttcaagagtggctaaaatcggttgttgcatcaaaagagttgacctcttttatcagaggacagcaagagcaagttcttcagctggaagcaggctcctagcgtcaggagtatgcaccgggctcttaaaattaattacttaacaaaagtgactcagcaattagaacatacaatatgagacacaaggtatgcaatggaaaccttcatatactgggaagagacctgtggccatgtgtggtgggttgtatgaacccccacccattcatgctaagacaaaccgggtctgctaagacaaactggtcggatgcccaccctttgttcggtgaatcatgagatcgagccctatacgagaattcaggaaaaaaaaagaaaatctacatgcccgagtgaccatgtaaatatctatcattgcagttcctgaacccttgactacaaaaaaagaaatccagagatgattcatattgagctgtaacattgtacgatcaacctcaggaatattgtaagtgattcagcttcacatgttgttccatagattaggtcggtgttacacatgtaaaagattcttttttggcaatatattcttgtactcaccctattggaagttgttttcctctatataccatcctagaaatgatcaataggataatgcttatacggactatggttcctgtattgagaattgttcttcagaaatcagaatagtgatcgctttttgaaagaataaaaa

SEQ ID NO: 205002 - DNA, 1975 bp, Zea Mays
gctatcccccaccgcccaccggccgccccctctgctgctgccagcaagacgagccttcgaaccttccagttccatccatcgccgccctcctcctgaggagcatccgaaacaagagcagcggcagccgccaacgcccgcgcccgccatcccgacgatgcgccgacccacactctcgctcgcgctcgggctcgggctcgggctctccctcgtcgccctcttcgcggcccggggcgcccacgcctcaatccacgagtacggcggcggcgacttcgcgccgcgggccaactccttcttcttccacggtgggagcgaggggctctacgcgtctgaccactcgtccaactcctccgcatccttcatcagatttgacaccgttgtatttcgtcgcaccctggagtcagcatctaggcatgaggagatgcaacaaaagacaggattggtggaggctataattgttgagatacaggatagaggcaaaattggaggttcatatctgcactctgatgcaatatgttgcacacctgagcttgataaggagaaatcttgtagagtaggtgaggtgatcatacgtccaaatcctgagaaccccgactggcctaagaggatccagacattctttgatggtaaaaatgaagaaaccactatggtaactcaaattgtgtcgataaacaaaactgggatgtattacctctattttatgttctgtgatcctcaacttaagggattgaagattacaggaagaactgtttggagaaatccacagggttaccttcctggtaaaatggctccaatgatgacattttatggtttcatgtcacttgcatatcttgtacttggacttctatggttcattcagtttgtgcgatgctggaaggacattttgcagctgcattaccatataacagctgttattgctcttggcatgtgtgaaatggctttttggtattttgagtatgctaactttaattcaactggaacaagacctatgggcattaccttgtgggcagttacatttacagctgtgaagaagactgtttctcggcttcttctattagtagtttcaatgggctatggtgttgttctacccacattgggtggcataacatcaagagttgctgctcttggtttcatctattttgttgcttcagaagctcttgaacttgttgaaaatctgggaaatatcaatgacttctctggaaagacaaggctattcctagtgttgcctgtcgctgtacttgatgctacctttatcatctggatattttcatccctctctagaactttggagaagctgcagctgcggagaagcatggcaaaacttgaattatatagaaagtttacaaattctctggctgtgtcagtgcttatctcaatcgcttggattggctacgaggtatcttttatcaactctaaagttcatttatgtggtccatgtaatgtagatatgataaaacggtcaaaggcaatggaaagcaattgcatcatgggaatgagcggaggagcaagagccaagttttatgtcgttttccctcttctatgtggtgatcataaaataggtttggagatgtccatagacacttcattttagccattgtaatcatagatctgcttgataaatgtttgagaaaaaaaccctaaaacagtacctttttttctgcaattcatattgactatggcctggcttgtttttgtcttgaatcagctatatttcaatgcaactgacccgttgagtgaactttggcaacgggcttggatcatcccctccttttggaatgtcctttcctatgccctcctcggcatcatatgcatcctttggtctccatctcgcaatccaacaggttaccctgtgaagaaggcagcacaagcatatattctgaaacagatttacaaacgtattctttataatattcataatgaactttgctgtaaagcaacttctatcttccatgaagatgttccctgttcaactatatat

SEQ ID NO: 205003 - DNA, 3789 bp, Zea Mays
cccctatcctctctcctcgcccaccggaaacgcaacgcaacgcaacgcaaccagagggggaggggggggggggggaaagccggagccgactgcccgcaccacccacaggaacgccgcggggcaggggggcaggaggaagacgccggcggcggcggcttaaaagggcagggcgccattacctgcttccctgtcttccccttcccctcatgtactatagtactgcgctgcgccctttcatttacccggagtagtaaacgagaagaggaataattgtgtcgcaaactaatccgtttcgccgctgcctgctgcttgagccaatcttccgcgggtcggggccgatgacctgccaactggtactgcttgccccctccccctttcctattgctacgatttagcttcatatatgtgattttgctgcaactattatgtacgtaagctatctcggaccgattgaattaagctatctcggaccgattgaattaagctatctcggaccgattgccccctccccctttcctattgctacgatttagcttcatatatgtgattttgctgcaactattatgtacgtaagctatctcggaccgattgaattaagctatctcggaccgattgaattaaggaattctgtccgtgccatatagacgatcttttagtgctcattacatgtattagactctgtttgaatgtactagagctaatagttagctactaaaattagcttaaagatatccaaataatctagctaatagttcagctattagctacttttagcaaattagctaatagttagttatctatttgttagccacctatttccactaataattttttagtcaactaactattagctttagtgcattcaaacacggccttattgtcgccttggtggagtttctattgggttgtcatatactagtcgcttcttgtttccgcatacataccctattttcacctgtcatgagtcgtcatgctttgcgtttggtgcctcatggtaggctcaacaacattctaggccgatttattttgatgtacaaacaaagcaaaaggaaagcgatttttgcccccagtgatgagttatgaacgattctagtgtacttgttatcgtcctaggcgtgactctagcagtgccgatttatcatacatcatctcgccaatattatgcaatagcgttccacgatactatatttgtcaagtgcacaactgatttgaaactggtctttaacaaaaagaagatcggacaggtgatctgtaactgagtgcagtatttcttttctatttactataagtaccagcgacactctggtcatcagcgttcaactgttaattagaaaactattttagtacatgttctagagaagtgtttgtaaagtttattgttaaatgctacaattctggcctaacgagcataacaagctttgcacgtcagggaccccagggtcgtcgtcatctatctatatttgaggtttttgcgtcaacatgacaagggttggcttctgtctgttatggtgttctgctgcctccccgtgtggctgtggcagccatcagctctaccaggagcagctgtatccagagatggtgtgaagcacacacaattctactctgcgcagggtctgtttcacttgccattttggataggatcgctcgttttggaattaactttatgctaacagaatctaggtgtcattaagctagattaagcttgctgcttgacttagtagtgtaaatctgtaaagaaaattacctggtttgggtttagtctctataaaagaaatggaacagaggaatgttctggcattgggtgaacatgttctaaaagctactgtttggaagcggaagcataagactgctatggagcaccctgaaggcaatgatgtgatggtgttctctcagcatgatcaaagaaagcaccctgtgatatttgacgacagagctaaattgggctgcctgtgcgcgtgcttttctaccaacatggtgactggagtgattttccagaggatgttgtaaatctagcacaacaggacttccagttgaagaagccaattacaactgctgtgttccagaacaagcacatcctgttggacttcattcacatgatttgcatagattatgagatgaccatagacaaaccactagcatgggttgatgataatggcaaacgcttctttccagatttatctgctgggctctacacatctaaaccatctcagcatgagaatggtgaagctgatgagtgtgatggaacgcctacaagtgtagctgaaagttctagttcggtatctgttggtgaagtagtttctcatggtaagaggatcaatgatattgcagaggacaacatgagagcacataacatattgtatgaagctgttggtgaaaatatttcaggtccttcattccatttgaatgaatattctagtggaaccatacaagctactggcaagccaaacgattgtcgacgtattgattcagctgtgcggaatttgttgctcaaaggattaggtcagccgtttagtgaggaagatattattggtatctatagaacaccactgctagatcagcgagggcaagttcgttgtggtctcttccagaaggagatcgaagagaccaggagtcgtcgggggaatgcaaatgtacgttatgcttggcttccttgctcaagatataccatggagcagatggcaatgcggggtgctctggaaatcgcgaagcctcataaggggtccatttgtggtgttgggacttgtcttgctcctgcaaactgtacaaattcatgtgccagatattctgattttcatgaagatggcatcatcagaatgatgttgtgccgtgtaataatgggtaatgttgaggttgttttgcctggatcaaagcaatttcagccatccaatggaagttttgataatggtgtggatgatcttcaaaatccacagaattacatcgtatgggatgctaatgtgcataaacacatatatgctgaatatgctgttattgtccaagcacctctcgtgaccaatgaatgttcgggcttgaaggatagcgtgcccaacatatctgagatcataagttctggttctcgagacaatctaaccaaggaggataggttcgcgccttgtggtgtcgaacaagaagcacctaggctggggcgtgctccaagggccccctcctcaccatggatgcccttttcgatgctttttgctgctatttccacgaaagtgcctcgttcggacatggagttggtcatcagatactatgaagaattcaagaggaagaggatgagccggagcgacctggtggtacggatgaggcaaatagtcggtgataagatattggtttctacaataatgaggcttcaccaccagaagaagcccccatcgatggcagcagcagcagctgggctagcaagagcactcgcaaggggggaagagggagggggagtagccgagtaagattagtttaagccgccttgtcttttgagaaatttatggagcacatatgctttgtcgacatggccagacccaaggtgtcaaaagggagggagatgagctgagcaactgttgtagtgtagtctcaaactcaaagcgtttaggtcttgacatttgacaaactaaaactcagaaacattatcatgagtagtgtttttttttcgtttctctttcctggatttaactattgttattgctatttcgtggatatctgggcactgaaggccgtgctattgttggttaatgatggtatgattaagggtgcgcttgccattttaaccctttgaccacatccaaacaatcacgg

SEQ ID NO: 205004 - DNA, 2520 bp, Zea Mays
cccctatcctctctcctcgcccaccggaaacgcaacgcaacgcaacgcaaccagagggggaggggggggggggggaaagccggagccgactgcccgcaccacccacaggaacgccgcggggcaggggggcaggaggaagacgccggcggcggcggcttaaaagggcagggcgccattacctgcttccctgtcttccccttcccctcatgtactatagtactgcgctgcgccctttcatttacccggagtagtaaacgagaagaggaataattgtgtcgcaaactaatccgtttcgccgctgcctgctgcttgagccaatcttccgcgggtcggggccgatgacctgccaactggtctgtttcacttgccattttggataggatcgctcgttttggaattaactttatgctaacagaatctaggtgtcattaagctagattaagcttgctgcttgacttagtagtgtaaatctgtaaagaaaattacctggtttgggtttagtctctataaaagaaatggaacagaggaatgttctggcattgggtgaacatgttctaaaagctactgtttggaagcggaagcataagactgctatggagcaccctgaaggcaatgatgtgatggtgttctctcagcatgatcaaagaaagcaccctgtgatatttgacgacagagctaaatgtaagaagtctaaattaatttcctgtgggagtggagttatattggagtcatattggaactttaagacaagtgggctgcctgtgcgcgtgcttttctaccaacatggtgactggagtgattttccagaggatgttgtaaatctagcacaacaggacttccagttgaagaagccaattacaactgctgtgttccagaacaagcacatcctgttggacttcattcacatgatttgcatagattatgagatgaccatagacaaaccactagcatgggttgatgataatggcaaacgcttctttccagatttatctgctgggctctacacatctaaaccatctcagcatgagaatggtgaagctgatgagtgtgatggaacgcctacaagtgtagctgaaagttctagttcggtatctgttggtgaagtagtttctcatggtccttcattccatttgaatgaatattctagtggaaccatacaagctactggcaagccaaacgattgtcgacgtattgattcagctgtgcggaatttgttgctcaaaggattaggtcagccgtttagtgaggaagatattattggtatctatagaacaccactgctagatcagcgagggcaagttcgttgtggtctcttccagaaggagatcgaagagaccaggagtcgtcgggggaatgcaaatgtacgttatgcttggcttccttgctcaagatataccatggagcagatggcaatgcggggtgctctggaaatcgcgaagcctcataaggggtccatttgtggtgttgggacttgtcttgctcctgcaaactgtacaaattcatgtgccagatattctgattttcatgaagatggcatcatcagaatgatgttgtgccgtgtaataatgggtaatgttgaggttgttttgcctggatcaaagcaatttcagccatccaatggaagttttgataatggtgtggatgatcttcaaaatccacagaattacatcgtatgggatgctaatgtgcataaacacatatatgctgaatatgctgttattgtccaagcacctctcgtgaccaatgaatgttcgggcttgaaggatagcgtgcccaacatatctgagatcataagttctggttctcgagacaatctaaccaaggaggataggttcgcgccttgtggtgtcgaacaagaagcacctaggctggggcgtgctccaagggccccctcctcaccatggatgcccttttcgatgctttttgctgctatttccacgaaagtgcctcgttcggacatggagttggtcatcagatactatgaagaattcaagaggaagaggatgagccggagcgacctggtggtacggatgaggcaaatagtcggtgataagatattggtttctacaataatgaggcttcaccaccagaagaagcccccatcgatggcagcagcagcagctgggctagcaagagcactcgcaaggggggaagagggagggggagtagccgagtaagattagtttaagccgccttgtcttttgagaaatttatggagcacatatgctttgtcgacatggccagacccaaggtgtcaaaagggagggagatgagctgagcaactgttgtagtgtagtctcaaactcaaagcgtttaggtcttgacatttgacaaactaaaactcagaaacattatcatgagtagtgtttttttttcgtttctctttcctggatttaactattgttattgctatttcgtggatatctgggcactgaaggccgtgctattgttggttaatgatggtatgattaagggtgcgcttgccattttaaccctttgaccacatccaaacaatcacgg

SEQ ID NO: 205005 - DNA, 2921 bp, Zea Mays
cccctatcctctctcctcgcccaccggaaacgcaacgcaacgcaacgcaaccagagggggaggggggggggggggaaagccggagccgactgcccgcaccacccacaggaacgccgcggggcaggggggcaggaggaagacgccggcggcggcggcttaaaagggcagggcgccattacctgcttccctgtcttccccttcccctcatgtactatagtactgcgctgcgccctttcatttacccggagtagtaaacgagaagaggaataattgtgtcgcaaactaatccgtttcgccgctgcctgctgcttgagccaatcttccgcgggtcggggccgatgacctgccaactgggtcgtcgtcatctatctatatttgaggtttttgcgtcaacatgacaaggtgcttttactctcaccaaaccgttactggggttgtccctgtgtctgtcatttctttgtcctaggcaatggccacagagaagagccaaagacatgatgggtattttttacaacacggacgtgctggtaatgtctgtggcggaggcagggttggcttctgtctgttatggtgttctgctgcctccccgtgtggctgtggcagccatcagctctaccaggagcagctgtatccagagatggtgtgaagcacacacaattctactctgcgcagggtctgtttcacttgccattttggataggatcgctcgttttggaattaactttatgctaacagaatctaggtgtcattaagctagattaagcttgctgcttgacttagtagtgtaaatctgtaaagaaaattacctggtttgggtttagtctctataaaagaaatggaacagaggaatgttctggcattgggtgaacatgttctaaaagctactgtttggaagcggaagcataagactgctatggagcaccctgaaggcaatgatgtgatggtgttctctcagcatgatcaaagaaagcaccctgtgatatttgacgacagagctaaatgtaagaagtctaaattaatttcctgtgggagtggagttatattggagtcatattggaactttaagacaagtgggctgcctgtgcgcgtgcttttctaccaacatggtgactggagtgattttccagaggatgttgtaaatctagcacaacaggacttccagttgaagaagccaattacaactgctgtgttccagaacaagcacatcctgttggacttcattcacatgatttgcatagattatgagatgaccatagacaaaccactagcatgggttgatgataatggcaaacgcttctttccagatttatctgctgggctctacacatctaaaccatctcagcatgagaatggtgaagctgatgagtgtgatggaacgcctacaagtgtagctgaaagttctagttcggtatctgttggtgaagtagtttctcatggtaagaggatcaatgatattgcagaggacaacatgagagcacataacatattgtatgaagctgttggtgaaaatatttcaggtccttcattccatttgaatgaatattctagtggaaccatacaagctactggcaagccaaacgattgtcgacgtattgattcagctgtgcggaatttgttgctcaaaggattaggtcagccgtttagtgaggaagatattattggtatctatagaacaccactgctagatcagcgagggcaagttcgttgtggtctcttccagaaggagatcgaagagaccaggagtcgtcgggggaatgcaaatgtacgttatgcttggcttccttgctcaagatataccatggagcagatggcaatgcggggtgctctggaaatcgcgaagcctcataaggggtccatttgtggtgttgggacttgtcttgctcctgcaaactgtacaaattcatgtgccagatattctgattttcatgaagatggcatcatcagaatgatgttgtgccgtgtaataatgggtaatgttgaggttgttttgcctggatcaaagcaatttcagccatccaatggaagttttgataatggtgtggatgatcttcaaaatccacagaattacatcgtatgggatgctaatgtgcataaacacatatatgctgaatatgctgttattgtccaagcacctctcgtgaccaatgaatgttcgggcttgaaggatagcgtgcccaacatatctgagatcataagttctggttctcgagacaatctaaccaaggaggataggttcgcgccttgtggtgtcgaacaagaagcacctaggctggggcgtgctccaagggccccctcctcaccatggatgcccttttcgatgctttttgctgctatttccacgaaagtgcctcgttcggacatggagttggtcatcagatactatgaagaattcaagaggaagaggatgagccggagcgacctggtggtacggatgaggcaaatagtcggtgataagatattggtttctacaataatgaggcttcaccaccagaagaagcccccatcgatggcagcagcagcagctgggctagcaagagcactcgcaaggggggaagagggagggggagtagccgagtaagattagtttaagccgccttgtcttttgagaaatttatggagcacatatgctttgtcgacatggccagacccaaggtgtcaaaagggagggagatgagctgagcaactgttgtagtgtagtctcaaactcaaagcgtttaggtcttgacatttgacaaactaaaactcagaaacattatcatgagtagtgtttttttttcgtttctctttcctggatttaactattgttattgctatttcgtggatatctgggcactgaaggccgtgctattgttggttaatgatggtatgattaagggtgcgcttgccattttaaccctttgaccacatccaaacaatcacgg

SEQ ID NO: 205006 - DNA, 2943 bp, Zea Mays
cccctatcctctctcctcgcccaccggaaacgcaacgcaacgcaacgcaaccagagggggaggggggggggggggaaagccggagccgactgcccgcaccacccacaggaacgccgcggggcaggggggcaggaggaagacgccggcggcggcggcttaaaagggcagggcgccattacctgcttccctgtcttccccttcccctcatgtactatagtactgcgctgcgccctttcatttacccggagtagtaaacgagaagaggaataattgtgtcgcaaactaatccgtttcgccgctgcctgctgcttgagccaatcttccgcgggtcggggccgatgacctgccaactgctttgcacgtcagggaccccagggtcgtcgtcatctatctatatttgaggtttttgcgtcaacatgacaaggtgcttttactctcaccaaaccgttactggggttgtccctgtgtctgtcatttctttgtcctaggcaatggccacagagaagagccaaagacatgatgggtattttttacaacacggacgtgctggtaatgtctgtggcggaggcagggttggcttctgtctgttatggtgttctgctgcctccccgtgtggctgtggcagccatcagctctaccaggagcagctgtatccagagatggtgtgaagcacacacaattctactctgcgcagggtctgtttcacttgccattttggataggatcgctcgttttggaattaactttatgctaacagaatctaggtgtcattaagctagattaagcttgctgcttgacttagtagtgtaaatctgtaaagaaaattacctggtttgggtttagtctctataaaagaaatggaacagaggaatgttctggcattgggtgaacatgttctaaaagctactgtttggaagcggaagcataagactgctatggagcaccctgaaggcaatgatgtgatggtgttctctcagcatgatcaaagaaagcaccctgtgatatttgacgacagagctaaatgtaagaagtctaaattaatttcctgtgggagtggagttatattggagtcatattggaactttaagacaagtgggctgcctgtgcgcgtgcttttctaccaacatggtgactggagtgattttccagaggatgttgtaaatctagcacaacaggacttccagttgaagaagccaattacaactgctgtgttccagaacaagcacatcctgttggacttcattcacatgatttgcatagattatgagatgaccatagacaaaccactagcatgggttgatgataatggcaaacgcttctttccagatttatctgctgggctctacacatctaaaccatctcagcatgagaatggtgaagctgatgagtgtgatggaacgcctacaagtgtagctgaaagttctagttcggtatctgttggtgaagtagtttctcatggtaagaggatcaatgatattgcagaggacaacatgagagcacataacatattgtatgaagctgttggtgaaaatatttcaggtccttcattccatttgaatgaatattctagtggaaccatacaagctactggcaagccaaacgattgtcgacgtattgattcagctgtgcggaatttgttgctcaaaggattaggtcagccgtttagtgaggaagatattattggtatctatagaacaccactgctagatcagcgagggcaagttcgttgtggtctcttccagaaggagatcgaagagaccaggagtcgtcgggggaatgcaaatgtacgttatgcttggcttccttgctcaagatataccatggagcagatggcaatgcggggtgctctggaaatcgcgaagcctcataaggggtccatttgtggtgttgggacttgtcttgctcctgcaaactgtacaaattcatgtgccagatattctgattttcatgaagatggcatcatcagaatgatgttgtgccgtgtaataatgggtaatgttgaggttgttttgcctggatcaaagcaatttcagccatccaatggaagttttgataatggtgtggatgatcttcaaaatccacagaattacatcgtatgggatgctaatgtgcataaacacatatatgctgaatatgctgttattgtccaagcacctctcgtgaccaatgaatgttcgggcttgaaggatagcgtgcccaacatatctgagatcataagttctggttctcgagacaatctaaccaaggaggataggttcgcgccttgtggtgtcgaacaagaagcacctaggctggggcgtgctccaagggccccctcctcaccatggatgcccttttcgatgctttttgctgctatttccacgaaagtgcctcgttcggacatggagttggtcatcagatactatgaagaattcaagaggaagaggatgagccggagcgacctggtggtacggatgaggcaaatagtcggtgataagatattggtttctacaataatgaggcttcaccaccagaagaagcccccatcgatggcagcagcagcagctgggctagcaagagcactcgcaaggggggaagagggagggggagtagccgagtaagattagtttaagccgccttgtcttttgagaaatttatggagcacatatgctttgtcgacatggccagacccaaggtgtcaaaagggagggagatgagctgagcaactgttgtagtgtagtctcaaactcaaagcgtttaggtcttgacatttgacaaactaaaactcagaaacattatcatgagtagtgtttttttttcgtttctctttcctggatttaactattgttattgctatttcgtggatatctgggcactgaaggccgtgctattgttggttaatgatggtatgattaagggtgcgcttgccattttaaccctttgaccacatccaaacaatcacgg

SEQ ID NO: 205007 - DNA, 1434 bp, Zea Mays
aaagccaaccacgaaccgagaggcgagcggacccaccccgcccgactgtcgttatccggattccggtccctcccaagtcccaactgttcacctcccgccgccccctcgcgccgtcaaggcctccggaaccggtcgcaagcggcgtaggacccccgccgctacagagccctcgtccgtcgcacttcgccgccgcgtcggagtcatccagctcgtcgacgcctggcggggagatccccagtgcgaggggaacctccacgacgcgagtacttctctacttcctgtcacaaaaaaaagatttgcaatctagcatatttatggaagcctttgctctggataaaatttgcgggtcagggagatcagcggtcaccacccaagaaagagtgatggaagcccaaagtagtacttgcttttcaaaagtcgtgggacctaacttatggtatggcgatcgcacaagacttacgcccaagcaagaagaagctgcgcttggtttgtcacgtgcctgtggctctggcattccagcatacatttgcaccatgaagaagtctaatgttgtcaagagacagatggcagggacctggtcggcagtaagctcaacttctcaatgatccatggagaactaaggcttcttggtggatggcccctctttgtgaagagccaccgtatcgaagcaggacacgtgtgtgctttcatgttccaggaagaggaagaggaagagggcgaactgtcacttagggtgcacgtgctgggtactatgccagtgccaacaatctagcctttgcttgtttcgttgatgaggcacgggatgaacgtcgctaacgaattatgcatcagacattagtattggaaacagcagcatgtggctatcttgctctggaattagttgttgttgttctatctagataactatgtatggacatattgttcttttgtgttggagagagtaagcgttagtgttttaagacacaaagattgttatttttagactgaccgctccagttgtgcaaataggaactgaattagtggcattgttagcatgtacatgaaaacgtgatttgtgcagtgctgggattagcttgggaatgtcgtccaaggatggccttatattgtttcctcgcaatttgtggttggatttttctatcccatctttaaagtacatttggaatgtttctaattcttcttggaagatgtttgagaagtgtaagatacagctatgtacgactatgattcctttcattgttttcatcaagttggtgtgaaattacccacctttgccatcgactacacaccttaccttggaaaacaaattattttttactgggtctcctgtccatcttgcacgtaccatctcactggcggcaatcatgcctgaccgttcatctcatcggtgctctggctatggcgacgagacgcgcgtccgcctacgctctgtactac

SEQ ID NO: 205008 - DNA, 969 bp, Zea Mays
cccctccccaaaagctcaacccccccgcagtcgggctgtcccataccacctaccccctccatccatttgaatctctccccctccccgatcatcgcaggccgatcgatcggcggctgcggcggcgatggggcggaggaatgacgacatcgactggaagagcgtgtttctgtcctacttctctcatggcgcctcctccgaccccgccgcgacgcgggcgtcgggcgtcgcgatggcggcgtcatcggacgacgacgagcgacggcgggggtctccgggcctccaccaacggtccgaggagccgcgcagcgagctggagcggcgcttcggcaagtgctgccgccccggcgcgcaggttgatggcggggcgcaggcgcagcactgccgagtcacccgtgcggcggccaaggctgctgttggtttgggaccggatgtttcttctgcttctaacgttgtatatgacctcagtccaataaatgatgacaaagaaggggaacatgtccatgacaaaaactattctaagttatctcccaagtttagcgagaagaagaattatggccaggtacccttgagcaaacagaaaagtcaaggccatggtggaaaaaggaaatctataccggtggccaagatttactcaagccaaccaaattcaacaactcatgccattgatttaaaggagcctgatcatcaaagttcacttcccagtaaattctctaagaggaggaagcaacaactccaaaaatcatcttctatttattctcgaaaggttggtatctgatactaattgttagaatgacattatgctggacattactagtattcctatttatcatttccgtccctaatattagaccatatatgtatgtaattttatagcctataataattatgctagagaatatttttgtattctttattttgcatgtacactgactattgtataagtacaccctataataatacagaatttat

SEQ ID NO: 205009 - DNA, 474 bp, Zea Mays
cttggatccactgtacctgcactcaattggaaaacttcaaccacagaaataaggattggtgaagatggaatatgggattcattatcggtgtttggtgctttgaggctataagaaaagcttcagtggagatgagatttgattgcatagttgtgaaagttagtaggtggtcaaagtaagaaccagaaatgtatttttggaggggttctagctattatccggtctagtttttgttctattctatcaagtcgagttcgttgatcgctaaccgcatccgtgcctagtttttgatatatcaaacgcacatttattgtaatgctagtattttgaaatactaggtagtacccaattgttgtatggagctagttgtcttttcattctaatgtatagaattaccattctttttaccaccgagcgtgtggaccgatgttgaggccctttttactctcttgattacataatccatctaataaatct

SEQ ID NO: 205010 - DNA, 864 bp, Zea Mays
gcattggaaaaaggggattttatctctagtctatcccaaacttggttgggactaaaaggctgttattattggcctccaggagaacagatttagatactcccaaacatcagtcatatatgtgctttaaaccagatgcatcttttatttggatgttaagttgttaactaaatgtgccccctcctattgtgtcctgtcctgcctcatcccatgaagcaaacactagaataattttggtcttcttggtgtgcttcgatgtagttaaatatcacagcagtctttactgacaatatgtatttacaggtctattcaacttcagttgcaatgcttctgacagcagttgtatctgtcttcttgttcaacttccatttatccctcgcattcttccttggatccacagttgtttccgtctcagtgtacctgcactcaattggaaaacttcaaccacagaaataagatggaatatgggattcattatcggtgtttggtgctttgaggctataagaaaagcttcagtggagatgagatttgattgcatagttgtgaaagttagtaggtggtcaaagtaagaaccagaaatgtatttttggaggggttctagctattatccggtctagtttttgttctattctatcaagtcgagttcgttgatcgctaaccgcatccgtgcctagtttttgatatatcaaacgcacatttattgtaatgctagtattttgaaatactaggtagtacccaattgttgtatggagctagttgtcttttcattctaatgtatagaattaccattctttttaccaccgagcgtgtggaccgatgttgaggccctttttactctcttgattacataatccatctaataaatct

SEQ ID NO: 205011 - DNA, 1056 bp, Zea Mays
gtacagatctgcactggagcaacttcaggtccatctcaccaaattccccagccttccgccctcatttgagcagacacctaaagccgtggaggagctcaaacttgcaagggacatttatgagcatgctgttgtttttgagtgtgaaacttgaggaccaagatgcatttgaacgtgatttctgtcagctaaagccttattacatggatacatgtggcataattcccccctcaccagaggagtacccaattttgggactcaatcttctgaggctgttggttcagaatagaattgctgagttccatactgagctggagcttttacctgtcaaggcacttgagcacccttgcatcaagcatgctgtagagcttgagcaatccttcatggagggtgcctacaaccgagtgttaagcgctcggcaagctgtgccacatgagacctatgtttacttcatggaccttctcgccaagacagttagagatgagatcgctgggtgcagcgaaaaggggtatgattccctatctgtaagtgatgcaaaacaaatgcttatgttcagttctgaccaagatctgcacgagtacatcacagaggagcacccggaatgggagcttaagaacggtgccgtcttcttccagaaggcaaaggagtcacagccctacaaggagatcccatccttgcagctcatcaaccagacgctcagctatgcgagggagctggagcgtattgtatgatttaatttcacagtaatccctggttgatgtttatttctgtggtcacttggcatggcatgtactgtcctttacatttgagatcagctctgatcgcagctcatgtcagctctgatcaatctctgaagggcttgatctctgcggcattgtttcaccacattaactgcattgcttgaaagatgcctgtcatccattgctgctgttaacttttgatgggcttaatattgaattattacatcgaaattgcactgattgtctttttttatttaaaaaaagacaaattatgttgacaagattagtcatactggaaaacagagattgctcattcaag

SEQ ID NO: 205012 - DNA, 939 bp, Zea Mays
ccactcatgtgggagacttcagttcagcacgcggacgtggcatcaaagattatgtcattttcccagcatggaacacacggagtttgtgttctttcagcaaatggctccatatcaaatgtaacgcttcgtcagactgctacatcaggcagaactgtaacatacgagggtcaattcgagatactgtcgctgtcggggtcattcttcctggctgaggatggtgtccagcgcagccgaaacggaagcctcagcgtgtcgctggctggtcctgatggccgtctgttgggtggtggggtcgcaggacttctagtagcggcttcaccggttcagtactgggaagcttcaattctggaggcggaaaggagccacaaaagcaggctccttcagaacccacatcggctccaccgagggttgctccgacagccgggatgggaggacccagcagcccttcttcaagaggcacattgagcgagtcatccggtggcgctggaagcccaccgccactgcatcgagccatggctgctagtgctagcaatagtaaccagccaccgttcttgtccagcatgccttggagatgagtttgcagcttgcattctcttggccaattccaggcaggatgtagcaatctgcgctttcagtagcgcccgttgtgtgagtagctgtgtgtagtacaagccagaagcttgggtgggaatagaattgcgtctggtaaatctgtagctctgttgtaggttccaccctgaattcctgtgctaggtgtgttgagctgtgtaagcaatgtaatcctttcagcgttatcaaatgctatttagttaaatgtttctaccaaggcatgtcgatttgaatcataagatatcaatttgctgtttgcgtctcgggcaacttctgttctagagaacgttctactcactgaaatttgagcctgttgccaagtttgaaaac

SEQ ID NO: 205013 - DNA, 2369 bp, Zea Mays
aacgaaccaaacatgccctctccattgacatctctacttgtagccaaacaataccatatgctagcagctagtggggatctcgaagtaaaatagcacaattgctggggccaaatgaggtagaccgtcgcatccatgacccatctacttccctccccttcttatctgctactgcaataatcacccgaggcaattttggcgtgctttacttccgcttccaatatacctttttttccgcgacaaaaatcatttttgttaattgcgaaaaggaaagagcccgtgtgaacaggaggggtgaggagaagagggggaaaagagagagaaatcggagggcattagcaagaaaccatgagttctaggttagctgaaatctcctttgatctttaatctgttcatctccttgcgtgagtctgtggcgttagcgtgatgccttctccaagttcatgaacttcccggtctggagctttgcttactcagttacccttttttgacccgtatttttttctctccattccgcaactgttggctcccaaattctggtgatttgttgggtatccccctgcgaaatccgggcaaaagtggggatctgcagcttctgtggcttgtcggctttaagcctacctttttcttggaccttttaccattttcttttgcccatttttaatcccccatttccgtcagtaatttacttttattttcatgtctacttatttccgccgtaaaactgtgtttgtcgcgtgaaagatcgcgtacttgagcagtgaagggttttatggttttttttgcaggttcgcaatccctagtcgtcttgtcctgatcttacttgagtgctcgtgagctctttccagtggctaatgactgcagatttgagttctggcccaagaaccgcgtgctagcccgccatggaggtgaggtccgagcaagggctgatggcggggagggatctattcggcttgacgaagagcccgccggcgcccgcgccgccgtcgtccgccgccatgcagagcgtgcgcatggcgtacaccgcggacggcaccgccgtgttcgctccggtgagctcttcgcctgcgacgccgtcttaccagccgcagggcgcagcccacggcgctagcatgtccgcggcgacggtcgttggaggcaatggcgctccagctgcgccgagcatgggtgagccgctggccaagaagaagcgcggacgaccaaggaagtacgggcccgacgggtccatggcgctggcaatggtgcctgcttcggcggcttcagggtcgccggcgacagggcagggtttttctgggccgttctcaccgcctgcgttaaatccggcgagctctctggtggtggcgtcgccagacggattcaagaagcggggccggcctaagggttctaccaacaagccacgcgtggacgctgctgggtcatcaggagctggatttacacctcatgttatcacagttcaagctggggaggacgtggcatcaaagattatgtcattttcccagcatggaacacacggagtttgtgttctttcagcaaatggctccatatcaaatgtaacgcttcgtcagactgctacatcaggcagaactgtaacatacgagggtcaattcgagatactgtcgctgtcggggtcattcttcctggctgaggatggtgtccagcgcagccgaaacggaagcctcagcgtgtcgctggctggtcctgatggccgtctgttgggtggtggggtcgcaggacttctagtagcggcttcaccggttcagtactgggaagcttcaattctggaggcggaaaggagccacaaaagcaggctccttcagaacccacatcggctccaccgagggttgctccgacagccgggatgggaggacccagcagcccttcttcaagaggcacattgagcgagtcatccggtggcgctggaagcccaccgccactgcatcgagccatggctgctagtgctagcaatagtaaccagccaccgttcttgtccagcatgccttggagatgagtttgcagcttgcattctcttggccaattccaggcaggatgtagcaatctgcgctttcagtagcgcccgttgtgtgagtagctgtgtgtagtacaagccagaagcttgggtgggaatagaattgcgtctggtaaatctgtagctctgttgtaggttccaccctgaattcctgtgctaggtgtgttgagctgtgtaagcaatgtaatcctttcagcgttatcaaatgctatttagttaaatgtttctaccaaggcatgtcgatttgaatcataagatatcaatttgctgtttgcgtctcgggcaacttctgttctagagaacgttctactcactgaaatttgagcctgttgccaagtttgaaaac

SEQ ID NO: 205014 - DNA, 2379 bp, Zea Mays
gttcgtgttgacatccgcccccttcccctcttcgactcacggcccacccactgcacgcgcaagcgagaggacggctccgcctccgtcccatggatggccgccggcgccacctcatggtgttcacggtcgcggtcactgctaggtggtggtccggcgtgctagatctcacgcctccagggcaggctccctcgcatgggtcgccgtttcctcatggtgttcacggtcgcgctcatcgctcgcagcgcggaggcgtcgatctgcatctatgatcaggagcccttctgcgaggtggacaatgcctcctcctctctggccaatacttctctgccagtcgcctgctcccaaggggaggggcgctggaatacgggcccgcagatggcgtcggctgtgcaggcggccatgatcgacgaagcctcctcagatctgtgctcatcgccaccagggtgataacctttgtatctcgatcctgctcagcatctcggtggtcgtgcggtgccagctggttcggtcggggcagcaggcgctcctggcacccgcctatccccgagggcgcgaccaaagggagtccacgacgaggaagcgacagggccgaaatcagatatgaatgccattggaggggtgcccaccggccggcgaggccccggctgcccgaccggccagccagtcggagtcgggccgggtggtctccgtcgcagggctatcaactttagatcttgaacatgggacccaaatcactggcctggagcacaatacgaagaaaactagcttatgattgcagatctcacccatgggttcaatgagtcaaaaaatcgaaattttcacggaagatgagatcgcaagtcgatgatgaggtatatgatgctttagccgtcaccttctttctatcttggaggatattgaaaatttgattcaaagtcggcgtcgtcctcgtcgctggcgccggcggacgtgtcgtcggcgtcgggtccggtgccctcgctgtcggagaggcgcgcgagccagcagctgccgtggaggtggccgctgacgcagacgaagtactcgagccggccctcgtaggcgccgagcctgcgggacgcgctgcgcggggcgagacccgcggcggccatgctccagacgcgcgcgccgcagtaggggcatcgcgcgcgggggtccagcgcggcgcggtggcccaccagccacgcccgcgtccgggaccgcatgaagccgcggaacacgccgcggtagacgccgacgtcgtcggcgcccgccacggcgtgctcgcaggggtccgacacgtacagcaggtcccccgcgcagcggcgcggcaggaagctccgcccggacgtcttggagaagcgggagaccggggcgaagtggcccgtcacgcccgcgcccgcggcgccgcagcagaagagcagcagcttcgccagcgccggccacccgccgccgacgcgcccggccgccggcgccgagcccgcggggcctcccgtcagcgccgccaccatccgcggcgcccgcgagacgcagagctcccgccacagcacccgctccgccacggcgcgcaggcgccggctcacccgcgccaccgcgcacagcgactgcgggtcccagttgagcgccaggaacacgagctgcagcaccttctcgtccatgagccccacgttgacgccccggatgcgcgccgcattgccgccgccgccgcctcctcctccccaggtgccgaccgcgcaagagctagctcccgcattgccgccgccgttcgacggcccgctcagccgccttatggtcaaggcgctctcgctcatccctccgcgcccatcaacctcacctcacgcaccggcaccgcgagcgaagcgctgagcgcaggaggccgcgaccgacaactggcgagctgctcacttgcctaaactggtgctcgcagctcgctcattcggtgtccaatatcggcgtgccgcaattttcacaggccgtagccggttatatacgcccgtccgctgccggcggtcaggtgcagtgcgctgtgcgcggacacggacacggacacggacccgattcgcgtcgtgtttgtgtctttatggacgcgcgacaaggggaccaatccctcccaggcatcgaacgcactccacccctctaaatatctcgactattacgcgctaatccctccctgtgcgagcgccgcgctgagcactgacggtgggcgttggccgactgccccccgtgctgttgttccctggacgagacgaaacgcaagcggaaaaaacaaagggtgtttgtttggttgcggtggtgcaccattgatccaaacagcctaaaagcttctggaacagtctcgcggcgtcgcgatcccgaaccagcctagccgtactactgtgtcctgttcctgctgccctggtcggc

SEQ ID NO: 205015 - DNA, 1150 bp, Zea Mays
cgtgttgacatccgcccccttcccctcttcgactcacggcccacccactgcacgcgcaagcgagaggacggctccgcctccgtcccatggatggccgccggcgccacctcatggtgttcacggtcgcggtcactgctaggtggtggtccggcgtgctagatctcacgcctccagggcaggctccctcgcatgggtcgccgtttcctcatggtgttcacggtcgcgctcatcgctcgcagcgcggaggcgtcgatctgcatctatgatcaggagcccttctgcgaggtggacaatgcctcctcctctctggccaatacttctctgccagtcgcctgctcccaaggggaggggcgctggaatacgggcccgcagatggcgtcggctgtgcaggcggccatgatcgacgaagcctcctcagatctgtgctcatcgccaccagggtgataacctttgtatctcgatcctgctcagcatctcggtggtcgtgcggtgccagctggttcggtcggggcagcaggcgctcctggcacccgcctatccccgagggcgcgaccaaagggagtccacgacgaggaagcgacagggccgaaatcagatatgaatgccattggagggttagtactaaattcttgttgatatttatagttttctctatttacataggtacaataagccggcgaagtttcgtggtggaatcagcagggtgcccaccggccggcgaggccccggctgcccgaccggccagccagtcggagtcgggccgggtggtctccgtcgcagggctatcaactttagatcttgaacatgggacccaaatcactggcctggagcacaatacgaagaaaactagcttatgattgcagatctcacccatgggttcaatgagtcaaaaaatcgaaattttcacggaagatgagatcgcagtcgatgatgaggtatatgatgctttagccgtcaccttctttctatcttggaggatattgaaaatttgattcaaaggcgcctgaatgggcgccgcctgatctagtaataaggaaaggccgtggcccatgtgaaataccgaggcaccgagcagaccacggtggctagtgctcaagcacgaagtgggttgcagtgaaatgcaatgcagcaatagccaacagggcaagtg

SEQ ID NO: 205016 - DNA, 1839 bp, Zea Mays
cgtgttgacatccgcccccttcccctcttcgactcacggcccacccactgcacgcgcaagcgagaggacggctccgcctccgtcccatggatggccgccggcgccacctcatggtgttcacggtcgcggtcactgctaggtggtggtccggcgtgctagatctcacgcctccagggcaggctccctcgcatgggtcgccgtttcctcatggtgttcacggtcgcgctcatcgctcgcagcgcggaggcgtcgatctgcatctatgatcaggagcccttctgcgaggtggacaatgcctcctcctctctggccaatacttctctgccagtcgcctgctcccaaggggaggggcgctggaatacgggcccgcagatggcgtcggctgtgcaggcggccatgatcgacgaagcctcctcagatctgtgctcatcgccaccagggtgataacctttgtatctcgatcctgctcagcatctcggtggtcgtgcggtgccagctggttcggtcggggcagcaggcgctcctggcacccgcctatccccgagggcgcgaccaaagggagtccacgacgaggaagcgacagggccgaaatcagatatgaatgccattggaggtttcgtggtggaatcagcagggtgcccaccggccggcgaggccccggctgcccgaccggccagccagtcggagtcgggccgggtggtctccgtcgcagggtacgtttccctatctgaatctctctgtctgtcttcttctccgagacgcaggaaaccatttcgtcgagataattttagagctttttttgttttgttttgccccaaccgtcaatctttgtgcagagtggtgtgatacgtaatgctcgagtagagttgttgagacgtacctgggatgttgggggtaatttcttgagatttagaactaggaggaaactgaaagtcgccaacttgcctatgaagtttgagttcccaggttgcctatgaattacatatttgcatccattaggtggctccattttattttgtaggaataccagagattttccttcggagcatccaatcggctcagctgagcaaaacctgcgattcgaattcctactgaaaactaactagataacccttttggattgctggtgttcttaaacaaaacgaagatgaaagatagtagtacattgcagctggggtgacaagtgttggataaacccatgaattggcctcgttgaattccttaaattctcaacaaaatgttataggattctacagaagcacataggtgataggtcgaatttcgttcatgtctccttaaacaaaagggcaaatatttttcattacgttgtgcgctatgctaactgaaatgttcaggtcttgtaggaaactaatagcaaatacagtaccctctgcacatgacagatggaagttagatgaatcaacatttacctcgtcttgaaagtaacgacaccgatttttttctatcaggctatcaactttagatcttgaacatgggacccaaatcactggcctggagcacaatacgaagaaaactagcttatgattgcagatctcacccatgggttcaatgagtcaaaaaatcgaaattttcacggaagatgagatcgcaagtcgatgatgaggtatatgatgctttagccgtcaccttctttctatcttggaggatattgaaaatttgattcaaaggcgcctgaatgggcgccgcctgatctagtaataaggaaaggccgtggcccatgtgaaataccgaggcaccgagcagaccacggtggctagtgctcaagcacgaagtgggttgcagtgaaatgcaatgcagcaatagccaacagggcaagtg

SEQ ID NO: 205017 - DNA, 1930 bp, Zea Mays
cgtgttgacatccgcccccttcccctcttcgactcacggcccacccactgcacgcgcaagcgagaggacggctccgcctccgtcccatggatggccgccggcgccacctcatggtgttcacggtcgcggtcactgctaggtggtggtccggcgtgctagatctcacgcctccagggcaggctccctcgcatgggtcgccgtttcctcatggtgttcacggtcgcgctcatcgctcgcagcgcggaggcgtcgatctgcatctatgatcaggagcccttctgcgaggtggacaatgcctcctcctctctggccaatacttctctgccagtcgcctgctcccaaggggaggggcgctggaatacgggcccgcagatggcgtcggctgtgcaggcggccatgatcgacgaagcctcctcagatctgtgctcatcgccaccagggtgataacctttgtatctcgatcctgctcagcatctcggtggtcgtgcggtgccagctggttcggtcggggcagcaggcgctcctggcacccgcctatccccgagggcgcgaccaaagggagtccacgacgaggaagcgacagggccgaaatcagatatgaatgccattggaggggtgcccaccggccggcgaggccccggctgcccgaccggccagccagtcggagtcgggccgggtggtctccgtcgcagggtacgtttccctatctgaatctctctgtctgtcttcttctccgagacgcaggaaaccatttcgtcgagataattttagagctttttttgttttgttttgccccaaccgtcaatctttgtgcagagtggtgtgatacgtaatgctcgagtagagttgttgagacgtacctgggatgttgggggtaatttcttgagatttagaactaggaggaaactgaaagtcgccaacttgcctatgaagtttgagttcccaggttgcctatgaattacatatttgcatccattaggtggctccattttattttgtaggaataccagagattttccttcggagcatccaatcggctcagctgagcaaaacctgcgattcgaattcctactgaaaactaactagataacccttttggattgctggtgttcttaaacaaaacgaagatgaaagatagtagtacattgcagctggggtgacaagtgttggataaacccatgaattggcctcgttgaattccttaaattctcaacaaaatgttataggattctacagaagcacataggtgataggtcgaatttcgttcatgtctccttaaacaaaagggcaaatatttttcattacgttgtgcgctatgctaactgaaatgttcaggtcttgtaggaaactaatagcaaatacagtaccctctgcacatgacagatggaagttagatgaatcaacatttacctcgtcttgaaagtaacgacaccgatttttttctatcaggctatcaactttagatcttgaacatgggacccaaatcactggcctggagcacaatacgaagaaaactagcttatgattgcagatctcacccatgggttcaatgagtcaaaaaatcgaaattttcacggaagatgagatcgcaagtattactagcaattatagcactcttattgatcttctcagctttgaacattattaatgtttatactattgaatgattggcatactgataaaattcgatgttaaacttgaaggtcgatgatgaggtatatgatgctttagccgtcaccttctttctatcttggaggatattgaaaatttgattcaaaggcgcctgaatgggcgccgcctgatctagtaataaggaaaggccgtggcccatgtgaaataccgaggcaccgagcagaccacggtggctagtgctcaagcacgaagtgggttgcagtgaaatgcaatgcagcaatagccaacagggcaagtg

SEQ ID NO: 205018 - DNA, 1413 bp, Zea Mays
cgtgttgacatccgcccccttcccctcttcgactcacggcccacccactgcacgcgcaagcgagaggacggctccgcctccgtcccatggatggccgccggcgccacctcatggtgttcacggtcgcggtcactgctaggtggtggtccggcgtgctagatctcacgcctccagggcaggctccctcgcatgggtcgccgtttcctcatggtgttcacggtcgcgctcatcgctcgcagcgcggaggcgtcgatctgcatctatgatcaggagcccttctgcgaggtggacaatgcctcctcctctctggccaatacttctctgccagtcgcctgctcccaaggggaggggcgctggaatacgggcccgcagatggcgtcggctgtgcaggcggccatgatcgacgaagcctcctcagatctgtgctcatcgccaccagggtgataacctttgtatctcgatcctgctcagcatctcggtggtcgtgcggtgccagctggttcggtcggggcagcaggcgctcctggcacccgcctatccccgagggcgcgaccaaagggagtccacgacgaggaagcgacagggccgaaatcagatatgaatgccattggaggggtgcccaccggccggcgaggccccggctgcccgaccggccagccagtcggagtcgggccgggtggtctccgtcgcagggctatcaactttagatcttgaacatgggacccaaatcactggcctggagcacaatacgaagaaaactagcttatgattgcagatctcacccatgggttcaatgagtcaaaaaatcgaaattttcacggaagatgagatcgcagtcgatgatgaggtatatgatgctttagccgtcaccttctttctatcttggaggatattgaaaatttgattcaaagtaagcctttcctgttggtgctgtttcgggacattgatcgttgcatggtcatgttcttctattgtagacttgcagttatcaaagctgggttggttttgaatgtcctgcactaggacatgttaatttttgaacatcgccaatcatgtttgtggtctggttgctttcactcttaattttaattttaaaaaacatagttggcttgtactgtccaaccttttttttggtcaagcgtactaaactactaatttgcttccaagagaatctgtagcggttgttcagttatctagcttgggaatagataaatatattcaagaaagtctatatagccaccagatgtctataaactacagagatgagactgtttaggatatagttttgaagaaaacatcgtatcattcatttttttcacaatgataataataaaaagattaccgtttgttttcatgtacatgcatgttttttcacatcgttgtactgtatattgttacttgtatacaatattt

SEQ ID NO: 205019 - DNA, 3334 bp, Zea Mays
gaggagcctgcgttggccgccaccgccgccgccgccggtacgaacacacatgctgcgctagggaacccatcttcttcttccccgcgctgcctgctgcctgctcgagcttggagatggcgttggtgcggcgatgcctctgtggatccgaggaagactgcagagggagttctaagagacggcactgaatttgccgcgaaggttctgtcctcggaatccgagcaggggatcaaggagttcctagctgagatcgagagcatatcccaggtgaagcacgcgaacctcgtcaggcttctgggctgctgcgtacagaggaaaaaaaggatactggtgtacgagtaccttgcgaacaacagcctcgatcatgcgctcaaaggagcagcagcagatctaccctggagcacgaggtcgggcatctgcttgggcaccgccaaggggctgagctacctgcacgaggagcacgagccgaacatcgtgcacagggacatcaaagccagcaatgttcttctcgaccgagactacctgccaaagatcggagatttcgggctcgcgaagctgttcccggacaacatcacccacatcagcaccgcagtggtcggaacgagtggatacttggcgcctgaatacttcgtgcatgggcagctgaccaagaaagccgacgtctacagcttcggggtgcttgtcctggagatcgtcagcgggaggagggtctcgcaaacgatccagtcggacatgttcccggtgcgagaggcatggatgatgtaccagcaaggcaggctgctagagatcgtggacgcgagcatggggagctacccggagaaggaggtgctccggtacatcaaggtggggctggcctgcacgcaggccacgcccagcagccgccccacgatgcgccagagcgagtgggacacaaccagaaaagggacaacagaattagaggcacagattcccaagaaacgggggcatattctattacaagatgactacaacatactataattatatatatagtaaatgaatgctgtcagctactggattcatgttgcctgcctaggctgctaatgaagatgactacataaacaatgtaacggtaacactgtcaagtactcaattctgtgctataacttataacttgcctaaaaacttagcactaataaaactggctacatgctaaggctccaacctactggggtccaactttcaactgaaccagagcacgggaaaaaaaagtgtccaactacagcgctgccctttgatccatggattcctggcatacacccagaaatgaaatggagccgcaagcctgcatcaatccctggttcaaccataaaacttccaggtcaacaattatgccaagttgacagcatggggtaacactggcgactggtcaacggcagtgaaattctgtatgaagtcatggccaccattcatacttcacagtttcttggcccttccataaatatattcgtcggtactctcatggccagtggtggcctgtgagagccttggaagcccacaagaagccaagaatccagggcttgtattcaatttgtggagacctcacagttcaaagcttcgtccactttcaaaatgtagtgcccaggcacatcattcatgcaggcatctaaggagcatggccttcgattctagaatatgttccataaggaactctttgcacggtccttggaaaatctggcttgaaccgcttgttaaaattcggtgccaatgacctagggtaaatggtaactggtcattagaatcatacaaagctcatataacctataatataaacataaatactgtgacgggaatatagttcacacaaatacaaaaacgattgtccgaatgttgactggaacatgaaatgtttattccacatacatgacccaacacagctaaggcactaacttcttcttggtcacctcttaggcgtaagggcttcctagccgtaatccacaatagtaactgagaactagtttagtcaagagtcaaaaagcacacgaacaaatactccaattttccatccctatcaaatttgatcactactctgctacatggcaacactgtagaaatgcactttgaattcatactataaggtagtttttcatattaataataaatgtcgcagttatgcagcaccataagacaacaaataatcaccttggagagccagatcgtctatgaccaagttgacctagcatggatcttaaagttccaagagcctcatcagcagcctacaaagtaaaaacccatgtgaaaattgaagttgggaaaatatcaactgaagcaacccaatcaagaaaaactcattgcatgttttttagaagttccatttatgcatgctttgttcactagtcgcaggctcgcagctcaaaacctcatatctaaaattattatctagagtgagcactgcaacgaatgtaatgcttcagacattggctttctgaaaattcaagatggtttggttgaaaaaacaaattgcatgttagggcacttgaattaacctaagccatttaacttgagtacctgccacagttagtgtcatctgccaacaagatccatgtcatatactcatattgccatcagttttcagtttgtagagctccactccctgattggagtgattctatcggatttgtaggagggagcagggtatagggagctgatgatccccaccaaaatataacaagcagggtgaagcggttttttagctcccagctcctaatgtagatgaagaagtgattctctcctcatccccccacatgaatcagttggtgttttgagtgtttggctggttgggagtaattctcttcggaaaagctgaagctagagctctcccccacttagctttttctcaactcctattcccatgaccatcatcctcaatccttagtgcctccctctactacccccatggtgccacactaccacggcagtggctgtgtcaaattcagtttcttgcttcgtttttaggtggagcaaaattattatctacatgacaaatcatcgtgcagtcaaagagactaacatgagggcttgattagaccttactggatagtttgagtttttatgtcaaaaaagaaacaagagctgattgagcaaaacatgcccgttgaaggaaatagtacataagtccagtttacatatcaaaaatttaaacccacacaagaaaacaaaatgaagcatgaccatccttgatgctgatttaaatgcaaacagagatattctctgggtttactaaatgaatccagattttcttaaggcaaggaaaataaggtaacagtaggaaaacaaagtcagtcagtattagactgctcattacctggagcttggcctc

SEQ ID NO: 205020 - DNA, 3517 bp, Zea Mays
ccgccaccacactcctcggctttgccgccataaattctggataggctcctgccagtgtccagtgcaggtgcagtgcacaagaggagcctgcgttggccgccaccgccgccgccgccgtgctgcgctagggaacccatcttcttcttccccgcgctgcctgctgcctgctcgagcttggagatggcgttggtgcggcgatgcctctgtggatccgaggaagactgcagagcgcttttgggcatggaaaatctccggctgttctcctacagagagatcagagcaggcacaaacaacttcgatcagagtaacaagcttggacgaggtggttttggaactgtctacaagggagttctaagagacggcactgaatttgccgcgaaggttctgtcctcggaatccgagcaggggatcaaggagttcctagctgagatcgagagcatatcccaggtgaagcacgcgaacctcgtcaggcttctgggctgctgcgtacagaggaaaaaaaggatactggtgtacgagtaccttgcgaacaacagcctcgatcatgcgctcaaaggagcagcagcagatctaccctggagcacgaggtcgggcatctgcttgggcaccgccaaggggctgagctacctgcacgaggagcacgagccgaacatcgtgcacagggacatcaaagccagcaatgttcttctcgaccgagactacctgccaaagatcggagatttcgggctcgcgaagctgttcccggacaacatcacccacatcagcaccgcagtggtcggaacgagtggatacttggcgcctgaatacttcgtgcatgggcagctgaccaagaaagccgacgtctacagcttcggggtgcttgtcctggagatcgtcagcgggaggagggtctcgcaaacgatccagtcggacatgttcccggtgcgagaggcatggatgatgtaccagcaaggcaggctgctagagatcgtggacgcgagcatggggagctacccggagaaggaggtgctccggtacatcaaggtggggctggcctgcacgcaggccacgcccagcagccgccccacgatgcgccagagcgagtgggacacaaccagaaaagggacaacagaattagaggcacagattcccaagaaacgggggcatattctattacaagatgactacaacatactataattatatatatagtaaatgaatgctgtcagctactggattcatgttgcctgcctaggctgctaatgaagatgactacataaacaatgtaacggtaacactgtcaagtactcaattctgtgctataacttataacttgcctaaaaacttagcactaataaaactggctacatgctaaggctccaacctactggggtccaactttcaactgaaccagagcacgggaaaaaaaagtgtccaactacagcgctgccctttgatccatggattcctggcatacacccagaaatgaaatggagccgcaagcctgcatcaatccctggttcaaccataaaacttccaggtcaacaattatgccaagttgacagcatggggtaacactggcgactggtcaacggcagtgaaattctgtatgaagtcatggccaccattcatacttcacagtttcttggcccttccataaatatattcgtcggtactctcatggccagtggtggcctgtgagagccttggaagcccacaagaagccaagaatccagggcttgtattcaatttgtggagacctcacagttcaaagcttcgtccactttcaaaatgtagtgcccaggcacatcattcatgcaggcatctaaggagcatggccttcgattctagaatatgttccataaggaactctttgcacggtccttggaaaatctggcttgaaccgcttgttaaaattcggtgccaatgacctagggtaaatggtaactggtcattagaatcatacaaagctcatataacctataatataaacataaatactgtgacgggaatatagttcacacaaatacaaaaacgattgtccgaatgttgactggaacatgaaatgtttattccacatacatgacccaacacagctaaggcactaacttcttcttggtcacctcttaggcgtaagggcttcctagccgtaatccacaatagtaactgagaactagtttagtcaagagtcaaaaagcacacgaacaaatactccaattttccatccctatcaaatttgatcactactctgctacatggcaacactgtagaaatgcactttgaattcatactataaggtagtttttcatattaataataaatgtcgcagttatgcagcaccataagacaacaaataatcaccttggagagccagatcgtctatgaccaagttgacctagcatggatcttaaagttccaagagcctcatcagcagcctacaaagtaaaaacccatgtgaaaattgaagttgggaaaatatcaactgaagcaacccaatcaagaaaaactcattgcatgttttttagaagttccatttatgcatgctttgttcactagtcgcaggctcgcagctcaaaacctcatatctaaaattattatctagagtgagcactgcaacgaatgtaatgcttcagacattggctttctgaaaattcaagatggtttggttgaaaaaacaaattgcatgttagggcacttgaattaacctaagccatttaacttgagtacctgccacagttagtgtcatctgccaacaagatccatgtcatatactcatattgccatcagttttcagtttgtagagctccactccctgattggagtgattctatcggatttgtaggagggagcagggtatagggagctgatgatccccaccaaaatataacaagcagggtgaagcggttttttagctcccagctcctaatgtagatgaagaagtgattctctcctcatccccccacatgaatcagttggtgttttgagtgtttggctggttgggagtaattctcttcggaaaagctgaagctagagctctcccccacttagctttttctcaactcctattcccatgaccatcatcctcaatccttagtgcctccctctactacccccatggtgccacactaccacggcagtggctgtgtcaaattcagtttcttgcttcgtttttaggtggagcaaaattattatctacatgacaaatcatcgtgcagtcaaagagactaacatgagggcttgattagaccttactggatagtttgagtttttatgtcaaaaaagaaacaagagctgattgagcaaaacatgcccgttgaaggaaatagtacataagtccagtttacatatcaaaaatttaaacccacacaagaaaacaaaatgaagcatgaccatccttgatgctgatttaaatgcaaacagagatattctctgggtttactaaatgaatccagattttcttaaggcaaggaaaataaggtaacagtaggaaaacaaagtcagtcagtattagactgctcattacctggagcttggcctc

SEQ ID NO: 205021 - DNA, 1830 bp, Zea Mays
tttcatgtttctactgacatcagcattccttggctttcctgaaaatgcacgatgaatcaaataagcgacagaaggttgatgatgatgtccaagagggtgctcttcctccttatccactcgattgtgatcagacacagcgtgccaaggtggattactgtttttggcttctctcagctaattactgcctctgttacaaatcataggccacttcgattgttgttggttcataaattttgttatgtaaaaaaagtcgaagtgacataatctggaacagagggggtggtatgatacagtaacgttttaagtcaaagcgacataatttggaacagagggagtatgatacagtaacgttttatggccctgtgggatgtgattcatccaaagtctgattcaaatgtaatgttctccatttacttgttatcatattgtgcaagctaattctgaaaggagctgcatccagtttcctatgatgactgaacatggttggaggcctcctgtgttagcagctgttgtatgcctgtatctacatgaattttctcctgactactattggttcatggaggataaataaaaatagctggaaagagcccattgcatttctgtctactactcttttggaagcagatgatcgtgctgttcgaatggctgctggtgaagcattggctttgtgctttgagttaaatctgcttgatgtttcttctcgtgaggatgatggtgttaacacaggaggaacaactggttctaagaacaagcttttcttggatatgcaagcattaaaagccaaaatatcaggtctggccactaatctctctactgaggctcgggtgcaaggtgcagaaccagagaagatcatcatgttaaagtacgtaagcagaactcagtaactgaagatggaagactaagatgacatttatggagactattctgatacattgtcgagcactaagtttgacattatgaacatctcaacatactgagacatggaagaacaccatcattgtttaatgatgaggaggacagtgatttctcttaagtatagtgcttgctagagtgtgcgacatgccagatcatccaacagattggcaagtgatgtgtgtatggttgattcatttaattttgttatgcattttggtcactataagaatgcattctttatgtgtgctgatatgacatccttggacctaacgcttcaattttcaaattggttattgttgtatccttttatatgaagagggaatggataagacatgatttgaataaattccagtagttaatttttttgtacattcacaatattgatgccattgttgtgttggtttgttcaggcgtggctaaccccgtgaacttgccgtcgggaagtccagctgctgcggtttttgtggcgagcctttgcagttcgttcttcagtgtaaccggcaacatcagctctgcaagaaccccagaataaaccctgacatcaagacactccactgatcactcttgtgctgctcctaccaatggagcaagagcatctccacctgacaatggtccactcgttgtattcatcactaagtccgctcgattccaccaataggtgttcatgcttacagttgaattggcaaactgagggaggtgccgggggagcaaaattttctcagtttggcgctgatttatcaatgtacgtacatgcttgtgttcagtttgcttgttgttcagtgcttgcttgagcctaaatacaaaatcaactgtactgaaaaaatgtattgaaatgacatacttgatgccaatgtgttcagtgtgcttgttgttcaatgtgcatggtgttcagtgctagatgttatttgattgttt

SEQ ID NO: 205022 - DNA, 644 bp, Zea Mays
aaaaaaaagaaactcctgcctcggactctcggtgcttctcggcactcggcagactggtaaatggaaacacacccagacaccctacagtttcagttcgattaacaaacgcaatacgccaatgaggcaactcatggcgggtcccccaggcttggccatggcccctctacaacttccctctctctctctctctctcctgagaggcggatcggcgacagaggggagacgctcagtctacacacatcggcaaagggcactcgagtgggtggagtgtggcgaggagggggacgacggcgccattgcgacggagcgaggggacaggtcacaggttctccatattgcaactactgctcaggagaagatgaagtcgtggtggaggatttccaggagttccaagagtacgatgagttctaggcgtggattagcggtaaacccccagtcggctgcctgtgaaggccgtgtttagctacgtttcgtttttgcactttgatatatgttaatgactatgtggatgtctcggacatcatgatgtaataaactattaccctcttttatgttattatttgagcactgtgtgatgatgttcggttatgtaactgctgtgtacgtgaattgctgatcctgacacgtacatggtttgcattcgg

SEQ ID NO: 205023 - DNA, 453 bp, Zea Mays
aaaaaaagaaactcctgcctcggactctcggtgcttctcggcactcggcagactggtaaatggaaacacacccagacaccctacagtttcagttcgattaacaaacgcaatacgccaatgaggcaactcatggcgggtcccccaggcttggccatggcccctctacaacttccctctctctctctctctctcctgagaggcggatcggcgacagaggggagacgctcagtctacacacatcggcaaagggcactcgagtgggtggagtgtggcgaggagggggacgacggcgccattgcgacggagcgaggggacaggtcacaggtgaagagcagatgcccccgaggaggactactatgacgagttcgacgagatctaggtgtcgtctaccagtcagcttgatggcgtcgtggaataataatcttagtttgatttatttattatcagttattt

SEQ ID NO: 205024 - DNA, 565 bp, Zea Mays
aaatggaaacacacccagacaccctacagtttcagttcgattaacaaacgcaatacgccaatgaggcaactcatggcgggtcccccaggcttggccatggcccctctacaacttccctctctctctctctctctcctgagaggcggatcggcgacagaggggagacgctcagtctacacacatcggcaaagggcactcgagtgggtggagtgtggcgaggagggggacgacggcgccattgcgacggagcgaggggacaggtcacagtccagggacctgaccctctgcactggtggacaagcccatgaaatcccaggaatgggtggtgcgcagtcgcctctttgtgtttgggaacaccgagacgacgccaggcatctctgaagaaattgaagacgcgcatcagaattattaggcgcctttttggcatcacagctagctagactcatttaggggccgtctgtttgggaaatgaaacccgtataatctactcagactatgatgtaatctaacttgttttggaccaagattaaattctaaaagagtagcctgtgttgtgaaactaatt

SEQ ID NO: 205025 - DNA, 664 bp, Zea Mays
cgccaatgaggcaactcatggcgggtcccccaggcttggccatggcccctctacaacttccctctctctctctctctctcctgagaggcggatcggcgacagaggggagacgctcagtctacacacatcggcaaagggcactcgagtgggtggagtgtggcgaggagggggacgacggcgccattgcgacggagcgaggggacaggtcacagggggatcaactcggtcaggccttgccagaagtctgtagtttcactaccagcggcatcgtcacgcgagcatcacttccatttccatgccaagacaaagagccaaaaacgtaacctcgaggaggcacatccacgtgttctccatattgcaactactgctcaggagaagatgaagtcgtggtggaggatttccaggagttccaagagtacgatgagttctaggcgtggattagcggtaaacccccagtcggctgcctgtgaaggccgtgtttagctacgtttcgtttttgcactttgatatatgttaatgactatgtggatgtctcggacatcatgatgtaataaactattaccctcttttatgttattatttgagcactgtgtgatgatgttcggttatgtaactgctgtgtacgtgaattgctgatcctgacacgtacatggtttgcattcgg

SEQ ID NO: 205026 - DNA, 491 bp, Zea Mays
ctcatggcgggtcccccaggcttggccatggcccctctacaacttccctctctctctctctctctcctgagaggcggatcggcgacagaggggagacgctcagtctacacacatcggcaaagggcactcgagtgggtggagtgtggcgaggagggggacgacggcgccattgcgacggagcgaggggacaggtcacagggacctgaccctctgcactggtggacaagcccatgaaatcccaggaatgggtggtgcgcagtcgcctctttgtgtttgggaacaccgagacgacgccaggcatctctgaagaaattgaagacgcgcatcagaattattaggcgcctttttggcatcacagctagctagactcatttaggggccgtctgtttgggaaatgaaacccgtataatctactcagactatgatgtaatctaacttgttttggaccaagattaaattctaaaagagtagcctgtgttgtgaaactaatt

SEQ ID NO: 205027 - DNA, 2332 bp, Zea Mays
ctcccacttgcaaacgcgtagccccctccatccaccatgccgatgccgtccacgaccacgggcggcggccatgatagatgtgtataacgtaactggagaagccaagcgcttagctggtgtctgttccgggagcacgttttcgccaccgaactgagagacgatcggatatcccacacatatatatacacgtattccgaccgagctaaagggcgaaagagagagagagagagagagagcagtgtgcttgtggtggccatgggcaactgctttggctccaacgtggcggaggtgggggccgtcaaggcgatggcgcaagcccatcacgcgcacccgcaagtggcgctggcgaagcacgtcgtcatgtccgccgcgccgtccagtgctgcccaatcccatcacgccgcggcgaggcaccagggggtgcccgtgcccgtgcccgggaagttgccgccgccggccacggccacggccacgggaggcgccggcggcagcaggcccccagcagctgcgggcgggggcagcgatcgtcagccggacgggaggatcctggaggctcccaacctccgtgtgttcacgttcgcggagctcaaggcggccacccggagcttcaagccggacaccgtgctcggcgagggagggttcgggcgggtgtacaagggctgggtcgacgagcggaccatgggccccgcgcggaacgacagcggcggcctgcccgtcgccgtcaagaagctcaaccccgagagcttgcagggcgcgcaggaatggcaggtacgtactccctccgtttcttttttttttgtcgctggatagtgtaaaattgcactatccagcgacaaataaaaagaaacggagggagtacgacgtacgctttgcttggtattcagtcagtcattctagacgctctgccaccgcgtccacacatgcccatgatgcttggtatattcagtcaaccgcgcgagcatgcataattctcaactgctgcgtagctgtgaacttcgtcttcgtttttttttttaaaaaaaaatcatggatctcaaatcaccggcaaatggtaccccacgttcgcacgacaagcgcaccaacaaagaaactcagctcgagttgacgttggtggttgagaccgagatgtcaggcgcttctagtagtagtgcagtggtcgtcacgacgttggtggtgatgacttttgtatgcagtccgaggtgaacttcctcgggaggctttcgcatcccaatctggtgaggctgctggggtactgctgggaggacaaggagctcctgctggtgtacgagtacatggccaagggcagtctggagaaccacctcttcggaagcgagccacgcaaaggcggcggaggagccgtgcagccacttccgtggagcctccggctgcgcatcgtgaccggcgccgcccgcgggctggccttcctccactcgtcggagaagcacgtcatctaccgggacttcaaggcctccaacatccttctggacacgcacttcaacgccaagctctccgacctggggctcgccaaggacggccccgccggcggcagtagccacgtcaccacccgcgtcatgggaacctacgggtacgcggccccagagtacgtcgccacaggccacctgtacgtgaagagcgacgtctacggcttcggcgtggtgctgctggaggtcctgaccggcctgcgcgcgctggacacggaccggccgacggcgcagcacagcctggtggactgggccaagccctacctggcggaccgcaggaagctggcgcgcctcatggacccgcggctcgaggggcaatacccgtcgcggggcgcgcagcgcgcggcgcagctcacgctgcgctgcctcgccgccgaccataagaaccggccctccatgcgggaagtcgtggcggtgctcgaggagatcgagtccatgtcgtccagggcggcaacgaggctggatggctcggcgtccccgcgccccacgccgctgcggaacggccacagccagcgccccgggtcgtcgggctctaccttggactgggctggcccggctccggctccgtctgctagagtgacaaggtagacagttatagtacgtttgagcttgagctaagcattttcaatgtgctcttgtatttgcggcgcatagtaccccacatcaagaactggactgcagtaatggagcctattgcagctgatgataatccatacccgttttgaattaaaccaagtgcatctgattgactaattgaatatctatgcgaagtattaatcccttcgttatttcttatttgatgcagtttagtttagaaataaactaacgagccacaaatatttaataacgaa

SEQ ID NO: 205028 - DNA, 1622 bp, Zea Mays
tcattctcaagactaacctggagataatgaggaatggatgctcaagtggcttatgggtttcaccaattacgtgatgaaaagccatttcttgcaagtggacctttatccaataagttgatttacgcaggatatacctgcaagcaaggatggttctttacgcaatgtattagtgatcctgagttaaggggattgaggaacattatctgtttatcaatcaagaggatggacagctctgagtgggagaacattcctgtcccatcgagtgtgagggcaatcgttgcattaaatcttcacaattatgcaagtggaagaaacccttggggaaatttgaagcctgaatatttggagaaaagaggatttgttgaagcccaatcagatgatggtcttcttgagatatttggactgaagcaagggtggcatgcatctctcgtgatggttgaacttatatctgccaagcacatagctcaggcagcggcaatacggatagagatcaaaggtgggtattggcacgacgcgttcatgcaaatggacggggagccatggaagcaaccacttagctccgagtattcaacatttgtggacatcaagaaggtgccttacccctcactaatcatcaatggtggagaccgttagctggaaaccatatttgtggcatgcatgacctaggcggatcggagcggccaagaaaatattttcagcttccagcttgatgaactgcaggcacagcacaacctttttatcgcggttgcatgcagctctaactgtatattgagttgagcttgtgcgtggaacaacgtaatgcaatggtgtctccactgtcccttgatcgcaattctatttgaaattcagtacattgcaactatctgatgcatacttgcaaatttgaggattgtagtgattagtatcagatgcaagagatgtgattgccaggctgtcaccctgcttcctttatggacgggcaaggcaatcgtgcagacgacccagattctgtgtttttttttttgctactattgtttgcgaaagcaatagagatagcgctaaatagttgattgattgattacctaccttgggatggcttaacaaaaatcataaatagcttaacaattaacaaagatttgttaagtcatttcagggtgaaagatcatcatctaatatgacgaatatcgctgatgtctgtatatatacacactatataatgtcggtgacacataaattatcaataaaatactagtgcacaataattataacaacgcatattctggaaacaatcacgcgcgattcctcctcgttgaaacgaatcacaaacacaagcaaaagcctcagaagattcacttcaccaagagcaggtccttatctttggttatccgtagagcagtgggcagcacgaccgtctgccttacaaccctaccaccaccgactccacctctcgtccagcaagaccaccatgcccacctccaccagccgctcgtgccggtcccgcccatccgcgcccaagtcaacccgacaacgctgatgcataggcacgcgcgagtggtgatcttgcgcgatctatttgaggagttagataagccttatctagaagaggggaataaccatacacacttgtcacacccgggttttag

SEQ ID NO: 205029 - DNA, 1638 bp, Zea Mays
aacagctcaaaccaaaattgctgagaggattaagaaactagaagatggaatggatgctcaagtggcttatgggtttcaccaattacgtgatgaaaagccatttcttgcaagtggacctttatccaataagttgatttacgcaggatatacctgcaagcaaggatggttctttacgcaatgtattagtgatcctgagttaaggggattgaggaacattatctgtttatcaatcaagaggatggacagctctgagtgggagaacattcctgtcccatcgagtgtgagggcaatcgttgcattaaatcttcacaattatgcaagtggaagaaacccttggggaaatttgaagcctgaatatttggagaaaagaggatttgttgaagcccaatcagatgatggtcttcttgagatatttggactgaagcaagggtggcatgcatctctcgtgatggttgaacttatatctgccaagcacatagctcaggcagcggcaatacggatagagatcaaaggtgggtattggcacgacgcgttcatgcaaatggacggggagccatggaagcaaccacttagctccgagtattcaacatttgtggacatcaagaaggtgccttacccctcactaatcatcaatggtggagaccgttagctggaaaccatatttgtggcatgcatgacctaggcggatcggagcggccaagaaaatattttcagcttccagcttgatgaactgcaggcacagcacaacctttttatcgcggttgcatgcagctctaactgtatattgagttgagcttgtgcgtggaacaacgtaatgcaatggtgtctccactgtcccttgatcgcaattctatttgaaattcagtacattgcaactatctgatgcatacttgcaaatttgaggattgtagtgattagtatcagatgcaagagatgtgattgccaggctgtcaccctgcttcctttatggacgggcaaggcaatcgtgcagacgacccagattctgtgtttttttttttgctactattgtttgcgaaagcaatagagatagcgctaaatagttgattgattgattacctaccttgggatggcttaacaaaaatcataaatagcttaacaattaacaaagatttgttaagtcatttcagggtgaaagatcatcatctaatatgacgaatatcgctgatgtctgtatatatacacactatataatgtcggtgacacataaattatcaataaaatactagtgcacaataattataacaacgcatattctggaaacaatcacgcgcgattcctcctcgttgaaacgaatcacaaacacaagcaaaagcctcagaagattcacttcaccaagagcaggtccttatctttggttatccgtagagcagtgggcagcacgaccgtctgccttacaaccctaccaccaccgactccacctctcgtccagcaagaccaccatgcccacctccaccagccgctcgtgccggtcccgcccatccgcgcccaagtcaacccgacaacgctgatgcataggcacgcgcgagtggtgatcttgcgcgatctatttgaggagttagataagccttatctagaagaggggaataaccatacacacttgtcacacccgggttttag

SEQ ID NO: 205030 - DNA, 3123 bp, Zea Mays
ggctccctccctcctcccctctcccctgtcccctctctctttctcaccgtccacgcgcgactgcgcgggacactggtcaacgccccggtggcaggcggctccgttggggggtgagtctagctccgtctgttgcgccggaataacgcggcgggtgctacctccggccctcgggttccatggggaggaacggtagcgtgaggcgctcggcgttttcgggcgccgcgggtgctgccgcggggccgccgtccttctctgtgaatcccgccgactaccggttgatggaggaggtggggtacggtgcgcacgccgtcgtgtaccgcgcgatcttcctcccgactaagggtgttgtcgcggtcaagtgcctggatctcgatcagctcaataacaacatcgatgaaatacaaagggaggctcaaataatgagcttgatagaccatcctaatgtcatcagggcttactgctcatttgttgtggagcacagcctctgggtgataatgccattcatgacagagggttcttgtttacacttaatgaagatctcataccaggaaggttttgatgagccgatcattggctccattctcaaggaaactcttaaggctctggattaccttcaccggcagggtcaaatacatcgtgatgtcaaggctggtaatatccttatcgatggtgctggggtagtgaagcttggagactttggtgtttctgcttgtatgtttgatagaggtgataggcaaagatctaggaatacatttgtaggaacaccatgctgaagtgctccaacctggcactggatataatttcaaagctgacatatggtcatttggaatcactgctcttgaactagcacatggccatgctccattttctaaataccctcctatgaaggttcttctcatgaccctccagaatgcaccacctggtcttgattatgaacgtgacaaaagattctcaaagttgtgaccagtcatttaaagaaatggttgcaatgtgcttggtcaaagatcaaacaaagagaccaacagctgagaagttgcttaagcattcatttttcaaaaatgcaaagcctccagagttgactattaagagtatcttatctggtttacctcctctctgggaccgtgtaaaggctctccagcttaaagatgaagcacaattggctttgaagaaaatgccttcttctgaacaggaggccctctccctgagtgaatatcaacgcggcgttagtgcatggaacttcgatatcgaggatctcaaggctcaagcatcattaattcatgatgacgagcctcctgaaataaaagaagatgaggacattgcaagaaacattgaggacttgtcttcacggaaccatttgggaaagtcatttgcaaatgagtgcaattccaggcagcgagcctttgtcaccactttaaaatcggatggaaacagacccaccacgaatgaagcttttgattttgattttgattttagcgaggctgccactacaagaagggctgatggacatgaaagaaacataagagagaatgattcattgccctctacagcaaagcgagatccagagtcgaatcattggacaagtgacgttgggcagagacaactgtcttctggtgggagcaatagctcaacagctgaaaggggctatggttttgagagggatgcagttgtgcaaacaatacctgaaaaacaaagaagtgaggcgagaaaaacagcaagccttagtggtccactttcactgccaactcgtgcttctgcaaatagtctgtcagctcctattcgatcttcaggaggttttgtagattcatcaggtgacaagtccaaacgaagtgtagtagagattaaaggccgcttttcagtgacatctgagaatgtcgatcttgcaaaggttcaggaaggtccacttagtagcctctcacggaaatcaccagagggttcactgctaaaaaaatctgccagcactggtgattgtttgattaatactaagctgatgcgtaacgctaatcagctgaaggaattctgcaatagttctgtatcatcttcagtattaattccccaccttaacaaccttgtgcaacagaccatgtttcagcaggatgtaatcatgaacctacttagtaacttgcaacaggatgagaaagttgatagaacacagcctggaatatcttctcaagtccgaacgatggagaatggtaaagtggctgatacagctaactctgagaaggaacggtcattacttgttaaaatttcagaattacagtctaggatgataacactgactgatgaactaattgcagctaagacaaaacatgttcagttgcagcaagagctaaatgctttgtactaccgagaagaaattgaggatgttagggatgaggatatcgaagaaacatagtgtatgaattatctgcctctccctgagacagatcaattacccgcctctccctgaggtcaggggagaacaagagaaggaaagcggcagggagaactagcgatggaaagtggcgatgccgcaaatatttgctggatctagagaccagctgcggttctacggaatttgttctttgaaggttgccgtgcccctggcctgctgccatccagtgtgtataaccgtcttagttcgttttttttttgtggccacaagattgaggcgtggtcatgcagctatttcggccatgcctatcattgggagtagctgtagtccgtaggctaccgggtggttatctatgcagaatttcagaagactgcaaaataaactgtattttatctagcaataggatgtatattggcgcattcgttgatatgtatcatatagggctattcgcaaacatccaaacagagttgtttgcacatatctaataaagtatgcatttactgcatttatcactgccatgtactaaatgattgttttaaaggcattatacattacatgatctgggtaaatcttctctataattggatcttcatgctattttccagcggtgtttctatctcattacatattttacctcctatttcaaatttcactatgcaaataatactatttacaatacaaagcaatgttataaacgattggaaagcaatgttataatactatttagtgatctttctttctttttcttttcc

SEQ ID NO: 205031 - DNA, 790 bp, Zea Mays
aaacaccccataccttttcccttcctacccttggccgcagtcaaaccctaaaccctggcgagccgcggctacggtatagccaccgcaacaccgcatctcaagcgcaagacctcctcgcggctatggcgaagcgtctgatcccgtcgctgaaccgggttctggtggagaagctgctgaagcccagcaagagcgccggtggcatcctcctcccggagaccaccaagcagctgaacgccgctaaagtcgttgctgttggccctggtgatcgtgatagggatggcaagctgatccctgtatctctgagcgaaggcgacactgttctgcttccggagtacggtgggacagaagtgaagcttgcagaaaaagagtaccttcttttcagagagcacgacatactggggaagctggaggagtagctctggtctctggaccgttaaaatggagttgtttgaaataattacggtcgtaagatggttgtgctggcctggacctacagctgactgtccacaatggcgggccttggtgttgcatgaggtccgcgaaggctggcagggccaatacgagttctatctatagtaatcagcaattcagtctgcactgaaatctgcagcgaactcctctaagccttgcccttggcggcctggcttgaactattgttgtgtccagcagatagatatatggccgtgtaaaacactattttgcattgtaaatagcgctgctgtgctcagatagcctaaacccaggtggcgccctctgcttgacaagaggaagcagaggttttttgttggca

SEQ ID NO: 205032 - DNA, 1701 bp, Zea Mays
aacagtgtcgccactcgccacagagcgctccatcaacacgaccgccggtataaacgcagcccccctccggcctccaccaaggccaacattgctcaggctgctcccaactcccatcctccccctcccggagtacgaagtactagaaagagagcggctttcctctaagaatggcgggtggcggcgccggcgacgacgacgtggtggtggtgagctgcggcggcagaggcggcggcgaccccggcgcatacgccgcggtgctcaagaggaagctcgacctgtactgcgccgccgtcgccaaatccatggtgacatagatggggcaagcctagttacaaactctaatgtcatagaagatgatgattttcaaggcaagccaaccaacagtggcacatcaaaggaactgtcagacgatgatggtgaccttgaagagaatactgaccccgctaacgccaagaagatgaggagttaaatttcggtgttgtgatcagaatggtgtcaaaccgggaatcggctaggcgatcaagaaagaggaagcaagcacacttgaccgatcttgaatcacaggtttccaggttaacgtctgagaatgcatctttgctgaagcgactggctgatatgactcagaaatacaaggacgcttccgttgacaataaaaatctaacagttgatgttgagactatgaggagaaaggtgtgaggagttgtaaaacgaaacaaaacattaaaagcgcacataccatgccgcaatgcgccaagtgtgtgtcccattaagcctgtggggtgttgcccttgccttgccttgtggatgggctgctctatctcaaatgataccgagaggagtccaaacagaatactaccatacaaacatttcttaatgcttgtgtgtgagtatatgcacaactctgtactcttgtatcattagtaaaactgtgtttttttaaatatccatgctgaagggttctaacataatcatgttaagtttttatgaaaaaaatttgcttaaactatgactgttccaatcagttttttacctaaagaaggtattcacaagaatcttggcatttaacagacctgcacaccttgactttatgaaaagggacatgtcttcaggaacacagtactgttttaattccaggtgaacatagccgaggaagctgtcaggaggctaactgggatcaccctcatgctaccgaccgcttttgagaagcccacgagcagcgcgcccctgtcatcatgtccatctgatgcagcttctgcttctgcttctgccgccattgaagacagcgtgaagcatttcctccaggcgccacttgaaaacagtgggatcatcccaaacgcagcagtttttcagaccaagccagcttctctgcaccgtgttgctagcctggagaacctgcagaagaggatcgtcggggatgcaatgtattccgagaccgcgtcaacgacattctcagatcctgaagctcttgccgataggtaaaggttgctcctgtcctgtgatgaacagccgtgtgatgctctagcggcctaagtgcttctggtaatggaagttgtagcacccatgcgcctgggtggggtctacacagtgatttgtacactattttgaaggttaataataattgttgagaaatgatctcatccctttgtacctatataagtaaagtattccattaataaagagaatagagttttcactcttcat

SEQ ID NO: 205033 - DNA, 1257 bp, Zea Mays
aacagtgtcgccactcgccacagagcgctccatcaacacgaccgccggtataaacgcagcccccctccggcctccaccaaggccaacattgctcaggctgctcccaactcccatcctccccctcccggagtacgaagtactagaaagagagcggctttcctctaagaatggcgggtggcggcgccggcgacgacgacgtggtggtggtgagctgcggcggcagaggcggcggcgaccccggcgcatacgccgcggtgctcaagaggaagctcgacctgtactgcgccgccgtcgccaaatccatggtgacatagatggggcaagcctagttacaaactctaatgtcatagaagatgatgattttcaaggcaagccaaccaacagtggcacatcaaaggaactgtcagacgatgatggtgaccttgaagagaatactgaccccgctaacgccaagaagatgaggagttaaatttcggtgttgtgatcagaatggtgtcaaaccgggaatcggctaggcgatcaagaaagaggaagcaagcacacttgaccgatcttgaatcacaggtttccaggttaacgtctgagaatgcatctttgctgaagcgactggctgatatgactcagaaatacaaggacgcttccgttgacaataaaaatctaacagttgatgttgagactatgaggagaaaggtgaacatagccgaggaagctgtcaggaggctaactgggatcaccctcatgctaccgaccgcttttgagaagcccacgagcagcgcgcccctgtcatcatgtccatctgatgcagcttctgcttctgcttctgccgccattgaagacagcgtgaagcatttcctccaggcgccacttgaaaacagtgggatcatcccaaacgcagcagtttttcagaccaagccagcttctctgcaccgtgttgctagcctggagaacctgcagaagaggatcgtcggggatgcaatgtattccgagaccgcgtcaacgacattctcagatcctgaagctcttgccgataggtaaaggttgctcctgtcctgtgatgaacagccgtgtgatgctctagcggcctaagtgcttctggtaatggaagttgtagcacccatgcgcctgggtggggtctacacagtgatttgtacactattttgaaggttaataataattgttgagaaatgatctcatccctttgtacctatataagtaaagtattccattaataaagagaatagagttttcactcttcat

SEQ ID NO: 205034 - DNA, 2604 bp, Zea Mays
aacagtgtcgccactcgccacagagcgctccatcaacacgaccgccggtataaacgcagcccccctccggcctccaccaaggccaacattgctcaggctgctcccaactcccatcctccccctcccggagtacgaagtactagaaagagagcggctttcctctaagaatggcgggtggcggcgccggcgacgacgacgtggtggtggtgagctgcggcggcagaggcggcggcgaccccggcgcatacgccgcggtgctcaagaggaagctcgacctgtactgcgccgccgtcgccaaatccatggtgacatagatggggcaagcctagttacaaactctaatgtcatagaagatgatgattttcaaggcaagccaaccaacagtggcacatcaaaggaactgtcagacgatgatggtgaccttgaagagaatactgaccccgctaacgccaagaagatgaggaggtaacatagcatcacaacattttcttgacgagaaatatgactgctaaatagaaaccattacttgattttgttgcgagtgaaagatagatttatcttgttagaaggcatcatattcagttttaccgttcactcctaccattcactgcctttaaaggcagaaagaatccaatcacataaagctttatccaattatccatgcccttaaaaactttcaaaaactgttacattcctagaaaaattggtaattccgtctgaagttgcgggaatagaaaccacatataccttttgccattagtttcctttttctatagatctgtcacctttaccttgaatttacatgaaacatggtatgtgacgtcagaagcttaaccgtccatttctgtgatgaactgctcagttaaatttcggtgttgtgatcagaatggtgtcaaaccgggaatcggctaggcgatcaagaaagaggaagcaagcacacttgaccgatcttgaatcacaggtttcaattgtgttagaatatagatgagtgctcaagttaatatccaactaaaatgaatatactcgtgctaattaccgcacaactctccaggtttccaggttaacgtctgagaatgcatctttgctgaagcgactggctgatatgactcagaaatacaaggacgcttccgttgacaataaaaatctaacagttgatgttgagactatgaggagaaaggttcgttcgtcttgaatgcatcacagacctttttcttcttttttttgttgtacgagaactcttaactgcatccatttatcgatcataacatttttactgggctctgtgtatactcaccgtaatcaacgtttacatctctctagatggctgcaaagggcagtgaaagtaatatgattgttcatagttcttattttagaacctgcaagttcagttttagtttctaatggtttttaactgcacacaaaaggtatggcagcattttcatttgattttctgaaattctgcataccttctacaagtgtgataggaataatttagttccttggttttgttttcttgcagtatcatttcagaaattttatttccttgtattatatatatatatatatttaaagaataacagtgttctcttacaggtgtgaggagttgtaaaacgaaacaaaacattaaaagcgcacataccatgccgcaatgcgccaagtgtgtgtcccattaagcctgtggggtgttgcccttgccttgccttgtggatgggctgctctatctcaaatgataccgagaggagtccaaacagaatactaccatacaaacatttcttaatgcttgtgtgtgagtatatgcacaactctgtactcttgtatcattagtaaaactgtgtttttttaaatatccatgctgaagggttctaacataatcatgttaagtttttatgaaaaaaatttgcttaaactatgactgttccaatcagttttttacctaaagaaggtattcacaagaatcttggcatttaacagacctgcacaccttgactttatgaaaagggacatgtcttcaggaacacagtactgttttaattccaggtgaacatagccgaggaagctgtcaggaggctaactgggatcaccctcatgctaccgaccgcttttgagaagcccacgagcagcgcgcccctgtcatcatgtccatctgatgcagcttctgcttctgcttctgccgccattgaagacagcgtgaagcatttcctccaggcgccacttgaaaacagtgggatcatcccaaacgcagcagtttttcagaccaagccagcttctctgcaccgtgttgctagcctggagaacctgcagaagaggatcgtcggggatgcaatgtattccgagaccgcgtcaacgacattctcagatcctgaagctcttgccgataggtaaaggttgctcctgtcctgtgatgaacagccgtgtgatgctctagcggcctaagtgcttctggtaatggaagttgtagcacccatgcgcctgggtggggtctacacagtgatttgtacactattttgaaggttaataataattgttgagaaatgatctcatccctttgtacctatataagtaaagtattccattaataaagagaatagagttttcactcttcat

SEQ ID NO: 205035 - DNA, 1948 bp, Zea Mays
tgagggagagacagagacgttggcgcggcgcggcgagactgctgagcccgaggaaacgggaagagaggagaaaagcaaaacgaagctcggaaccacgagacgacggagaggatgggcttcagcgtcctgctctcaccgccgccccttccgctcccgagcgccaccgctgcggccgacttgtacctaatattcggcggccacgatcgccgccgccgccgcccgctggaacacggctgccgctgcggccgccccccggagacggcgctcggcggcagctcaggccgccgcggctcgtacgatgacgacgggacggctccaggctccctcggcctcgacggcagcagcacgtcctcctcggtccgtcggacggggagtgcaaaaccaagatatcaagtaacttcgaaagaagaggacacacaaaatgcagaccgcgaggggtggcaatatagtacagaaggcctttcaaagagcatgtccaagtcaaggtacatcaaagtatttggggttgatttgtcccctgataatgtggctgttgctattgtttacttcgtgcaaggagttttaggcctttcgaggcttgctgtcagcttctacttaaaagataatcttcatcttgagccagcagagactgcagttatatctgggttctcagccttgccatggttggtcaagcccctctacggttttatcagtgattccatccctctctttggatatcgaagaaggtcgtacctatttctatcaggcatccttggagcactttcatggagtttgatggccgctgttgtggatgataaatatagtgcagcactctctattattcttggatctcttgcagttgccatatctgatgttgtggttgattctatggtggttgagagagctcgaggtgaatcacagagtacatctggatctctccagtcgctatgttggggatcctcagccttcggaggagtcgtgagtgcatacttcagtggttctttagtggatacttatggtgtaagatttgtttttggtgttacagcacttctgccactgatgacatctgctgttgcagttcttgtaaatgaagaacgcttacctttggggaaaagttcagtctcactttcagtttcaggttcagaattaattgagagctctaagcaacgtatcatgcagatttgggattcagtaaagcaacccagcatactcctacccaccttgttcatattcctttggcaagcaacaccgcaatcagactctgccatgtttttcttcataacaaataagctcgggtttactccagaatttctaggacgcgttacgcttgtcacatctgttgcatccttactgggaatcggagtgtataatttgtttctgaaggaagttccattgaggaaaatctttcttgtgacaacagtcttaggttctgctctcggaatgacacaggttcttcttgtcactgggctcaaccggaagcttggcataagcgacgaatggttctccattggggattctttgattatcacagtccttggccaggcttcctttatgcctgtcctggtgttggctgcaaagttgtgccctgtgggagcggaagcaactttatttgccactttgatgtccatctctaacgccggaggtgttgccggaggtctggtgggcgcgggtctgacgcagttactgggagtcagcagagacaacttcgaaaaccttgctctgctgatcgcgatttgcaatctcagttccctgctacctctgcctcttctgggtctcctgccagatgaatcccgtaatgcagatggtgcacagaccaaaaatgactgatgcttgtatatctccacgcgtctttacaagacgaaagggcatacacatacactcatcggcacaaagcagcgcagctgatgacgtgaacaaaacatggaagctgatgtataggatgtattatctatgatgtataaaggaggag

SEQ ID NO: 205036 - DNA, 1031 bp, Zea Mays
gaaagacgtcctttggtaggagagtggtgtgagctatcatccacttcgagcaaaagccgagcagaagattctgaaaaatgtttcccttgccataaaggtatcttcacaggaacctgtggaaacagcgttggaccatggtgtcacggccgtcggctacggcacagagaacggcaaggactactggatcgtgaagaactcttggggcagcagctggggcgagtccggctacgtcaggatggagcgcaacatcaaggcgtccagcggcaagtgtggtatcgccgttgagccgtcgtaccctctgaagaagggcgccaaccccccgaaccctgggccgaccccgccttcccccaccccgccgcccaccgtctgcgacaactactactcgtgccccgacagcaccacctgctgctgcatctatgagtacggcaagtactgcttcgcctggggctgctgcccgctcgagggcgccacctgctgcgacgaccactacagctgctgcccccatgactaccccgtctgcaacgtcaagcagggaacctgcctcatgggcaaggacagcccactgtcactgtcagtgaaggctacgaagcgcaccctggccaagccgcactgggctttccctggcaacacagctgctgacggcatgaagagcagcgcatgagaaaaacgcagcatggcattaggccgccaacagccagcatgattagagcccccctgcatgcagaatgatcacccggtcccgtagttcacgacgaaagcatggctgggcggccgctgtttacggatttacttatatcactatagtaggtactcctcctgtacataagcctgaaaaaaaatgggttcagttgtttatggaactctgccaaatttgcttttgcatgccatgtaaaaatccagctagctcttgccaagcttcccctgcgcagttcaacaggactgcgattgatattcggtgtaatggaagtatttatcggaacaatcagcaatgttatgctatattcatttcttggacgtgaacaatagattgg

SEQ ID NO: 205037 - DNA, 1432 bp, Zea Mays
tttacatccgcaatagataaaaaaacactcacaatacatcttaatccactccgattttctcattactatagtacctaaactaggtctaaagtgataatgatgttttccactctattgcagggagttgctgggctttctcaacaatagcggctgtggaaggcatcaaccagattgttactggcgacatgatctccttgtctgagcaggagcttgttgactgtgacacttcatacaaccaggggtgcaatggaggtttgatggactatgcgtttgagttcatcatcaacaacggcggaatcgacaccgaggaggattacccttacaagggcacggacggacggtgtgatgtcaacaggaaaaacgccaaggttgttactatcgacagctatgaagatgtaccagcgaacagtgagaaaagtctgcagaaggcagttgcgaaccagcccatcagtgttgcaattgaggctggtggcagagcatttcagctctacaactcgggtatcttcacaggaacctgtggaaacagcgttggaccatggtgtcacggccgtcggctacggcacagagaacggcaaggactactggatcgtgaagaactcttggggcagcagctggggcgagtccggctacgtcaggatggagcgcaacatcaaggcgtccagcggcaagtgtggtatcgccgttgagccgtcgtaccctctgaagaagggcgccaaccccccgaaccctgggccgaccccgccttcccccaccccgccgcccaccgtctgcgacaactactactcgtgccccgacagcaccacctgctgctgcatctatgagtacggcaagtactgcttcgcctggggctgctgcccgctcgagggcgccacctgctgcgacgaccactacagctgctgcccccatgactaccccgtctgcaacgtcaagcagggaacctgcctcatgggcaaggacagcccactgtcactgtcagtgaaggctacgaagcgcaccctggccaagccgcactgggctttccctggcaacacagctgctgacggcatgaagagcagcgcatgagaaaaacgcagcatggcattaggccgccaacagccagcatgattagagcccccctgcatgcagaatgatcacccggtcccgtagttcacgacgaaagcatggctgggcggccgctgtttacggatttacttatatcactatagtaggtactcctcctgtacataagcctgaaaaaaaatgggttcagttgtttatggaactctgccaaatttgcttttgcatgccatgtaaaaatccagctagctcttgccaagcttcccctgcgcagttcaacaggactgcgattgatattcggtgtaatggaagtatttatcggaacaatcagcaatgttatgctatattcatttcttggacgtgaacaatagattgg

SEQ ID NO: 205038 - DNA, 1529 bp, Zea Mays
gtgagcgccctatttccagggaacaggagggtctccgtcttttttttttcctttattcaccggcaacacgtagaaacaggaggagaccctcctccccctctccggcgcgcgacgctcgccgccgcgcctcccctcccctcctccgaacgacgtggctgccgtgcgcccgaccggccggtgacggacacggcagctgctacgagaggaggaggatatatactagtatatagctagagcaattattagctggtcgtaagcatgaatcgacgattggacatgatagacaacatcgacggccgtcgggtaaccaagaacaaggcgcgcatccaagttggcgactcctcttcgtcggacgaaagcgacagggagaaggaggaagatgaagaagaagcacatgaggaagtggccaaggcgcccccgctgggttggaatcatcacaatcaccacgaagcggccggcggcattggcagcaacagcaacaggaggcggcttctgtcgaagcagctgtccatgaaggagaccaccagggagatcaaatgggagaagcgccggcggcagatactgcggcgcagcagcctggtggtgtcgttaaacgacgacggaggaggaggatgctgcggcagcatgaagagcgccgccgaggaaccggaacggcactgtcatcatcacgttacgaggtcttcgtcggagcgcgtaatgaggtgcctgaccgacgaggacctggacgagctgcggggctccttcgagctcgggttcgggttcgacgaggagtccggcggcgcccacctccgcgacacgctccccgccctcgacttctacttcgccgtgaaccgtcagctgtccgaccccgccaagctgcggacgctgtcgtcggcggcgagcctcacgtccacgccgtcggccgtgtcctcgtcgtccacgctccccgacgtcccgaacgacccacgcagccccaaggtcggcgcaaccgccgcgtctggcggcggcgccgacgcatggaagatttttacgccaggtgacaaccctcagcttgtgaagacgaggctgaggcactgggcgcaggtggtggcttgctccatcaagcacggctgataagacgacgcgcggacggacgatgtcctgtgtagtcgagagcaatatgttatatagatgccgaaatgttcagatcgtgcgcttcacatgcagtccagacagcacaggtttggcaatccacaccgaataattaaatgtaaatatacaaatgtagaggtaatatatacaaaactgctctatcctttcaacaaatgacaagattaccggatgcagtagtgtgactagtaaccatgaaccatgtacttctcaaatgtccccgtagctacaagttttcttgttcaattagttttctaaaatattgcagactggtttgttaagttagagttctagagggatatacagattgatttgtaaagttagagtcctagatggatacatatgacttatatatgacctatataaaggtccttagatcatgaataaagattcaagcaggc

SEQ ID NO: 205039 - DNA, 1155 bp, Zea Mays
aacaacactgactgggccggccgtcgatgcactgcattcccccccttccgtccgctgcatccctccgccgccaccgccgcccaagccaggtgctgaggctttcgttggtctcttcgccggcgacgagcacccaccagggcacgggcctcaggatgcagtccttggtccggaatgtctgccgagccggaagccgtggagcggcggcgaggctcctggaggccgccgcggttcatccgggggcggcgcagccgtcctcggccgtcagacacctcaggcatccttgcgggttcgctcgtccgatcggggtagatcaacccaagcctgtgcagcgccggaccattttgcgtgatggcggccgcgttccggctgccgcctccggattcggtctctgcgcgaaagttctcgttgcgacgaggggtctgtcgacggcgggaaatgctgctgaggttgcctctgattcggacgattccacctctcctgcggttgagcaccccccgcgcatcaagttcaagaggcctgacaagaccgctagacacattatgaatatcctgaacaaagaggcggtcgaaaaggtccgctcggagagggcgattcctgatgtgcagcctggatgtatcattcagatgagattgcaagttcctgagaacaaacggcgcgagtcgacactgaaagggattgtcataggaaggcgcaacgctgggatcaatacaaccttcagattgcgtagattagtggctggcgtgggagtcgagtctgtctttccactgtcttggacaggaagaaagtcaggagagctaagctgtattacctgagggacaggatgaacgcacttaaaagatgaggatttcaacttgtttctaggatttctttttgccgcgcggatcagcatggtttctcaagatgcaatcacattgtttggtgttccatctttgaaaaaaatcatagtttggggttgtcagttgccatgctccgatcttctttcttttgatttgatgcgctgtaacattagtgcgaaaattcatgtgctcaggtctattacgttactttcccaatctttttttagtatgtgcgtctgacatgaacaagctggaacactttactcatcaaagcgaaactattgtatgatgattcatgctatccggttttagatgtcaa

SEQ ID NO: 205040 - DNA, 1937 bp, Zea Mays
cccctgcacgtcacgggagtccatggaggccgcccgttctagatcgcacggctcgcgccccgcgacgccatccaaccccgcgcggccccacctacagcgagcggctcgcgccgtgccccagttgccagctccgcctcccttaaaacccaccgctgttcgcgtcctcgtttctctcaatctctctcttctcctcgcctcgccttggtgttcacgccgtcgctagcgcctgccgcggcgaagcttcacgcaaaactccaacgaacttctcatttgctgattacaggaagatggctggcggcttcagggtactgcatctggtcaggccttttcttgctttcttgccagaggtgcagagcgcggataggaagataccgttcagagaaaaagttatctacactgttatttccctcttcattttcctggtctgcagccagctcccactctatggcattcattcaacaactggagctgatcctttctactggatgcgtgttatcctcgcatcaaaccgtggcactgtgatggagttgggtattactccaattgtgacatctgggatggtaatgcaacttcttgttggatcgaagatcattgaagttgacaacagtgtgagagaggatcgtgctctgctgaatggtgcacaaaagttgcttggtatcctgattgctattggggaagctgtggcatatgtcctgtctggaatgtatggcagtaaccttccaaatgtgaccaatttgcttgccacagtcttggtcttcctcatagttatctatttccaaggcttccgtgttgtccttccagtgagatcaaagaatgctcgtggccagcaaggctcatatccaattaagctattctacacttcaaacatgcccatcattctgcactctgcactgattaccaacctctatttcatatcccagcttctctacaggaagtacagtggaaacttccttgttaaccttcttgggatgtggaaggagtctgaatactctggccattctgttcctgttggtggtcttgcttactatgtaactgccccatcaagtttggctgatgtccttgcaaatccattccatgcactgttttatgtggtcttcatgctgtcagcttgcgctctgttctcaaaaacgtggattgaagtttctggttcatcagcaaaggatgttgctaagcagctcaaggaacaacaaatggtgatgccaggacatcgtgagtcaaacttgcagaaggaactgaaccgatacatccccactgctgctgcatttggtggagtatgcatcggcgcattgactgtcctggctgatttcatgggtgcaattggttcaggaactggaatactgctggctgtgacaatcatataccaatactttgaaaccttcgagaaggaaagggcaacggagcttggtttctttggtttttgattagtagctgtggaaccttgaaccgatagctgaattttcttgtaaggccctgtttggaagcaacccggtttttaagaaaccagtttttatattttagctaggagaggccagcttctcagtttttaagaaactgagaatctaatttctataaacttagtcataaactggtatgtttggaaccacctcaatttctataaaccagtttcttaaaaactgggtgtttccaaacagggcctaagtcactgtagtgcttagccagttgtaacttaagagagttctgttaggttgccttgtggccacaatcatgtagcagaatctgtccaaagagcgtgttcatcccatccacaatcagtaatccgcactctacagtttgctcataggttaccctggcaactggatgttctgtgttcaatttcagttacttttgaactgtaaggtctgttattactagtttcccagaacttagatgctcacgtgcgctttatttcaatatctattttgtgatgttgcatgatt

SEQ ID NO: 205041 - DNA, 2832 bp, Zea Mays
tcaaattggtcacagggtatccaggaacatggtggtgatcttaatcgagcaataaattcacatttcaatgatggagacagcatattgaacggaatcagtcaaaacgccatgcctgctagtcgtgatgatatgatggacctggatggaccacttgataatacatttcaaagatctttgttgccagagagtttccgtgccccttttgctctaatggatccaaatttccaggaccaattttttgacagagttggctccactgatggtgtcattcgtgaaccgctagtttcacatccaagagaggtgagggagatacctatcgaagttaaggatggtgatcctcaaacaggttcatctggccaggatgttactggaaatgagtcttcaaatggccctgaagtccctgaaactatcataattgatgatgtggacggtggattgttatctgcaccatctgttccacatcctattattcctagcaatacatctactgtgccaactgctcctccattggttcatgttaatgactatgatgaggacatagaagaggaaatgattcgggcagcaattgaagcttcaaagaaggattctgaaggactggcaaatatagtcgagcaaggaggccagcatcaagaggaagtgaatttgagggaccattcttctgataaagcaggcatggaaaccgcaaatggaatagttgagaggcaaggactagcttcagaaaaggctggaacatctaggcaaccaatagatgacgagagcttccaggaggaggctgaagatgtagaagaacagccgttagttaggcgtcgttctcggcgtgccccttctgaggacaatgaattaccaaaaatagtgcacccaggtgctagccctgttctgaacaatcaccagtataatggagatgatttcccatctgagtggggtggcatttcttctgaggaacatgatgaagctgttatgcttgaggctgcaatgtttggtggagttcctgaaggaccaacatatcctttctctatgccttctcacagaacctctacttattatcccccaatatctcattctccatcaccagcattaactgaacagcggttattacgagagcagcaggtttgaggacgatgagtaccttgcatcgctacaagctgatcaagaaaaggagttaaaggccctacaggaggctgagctccgtcgccttgaagaaacagctgcgagagaagctgttcttgagaaacagaagcaagaggaggaggaaaggcgtaaaaaacaacttgaggaagaggaactagagtccagtctcacttcgaagcaagcatcattaccaccggaaccgtctccagacgcagagggtgctgtgacagttgtagtccgaatgcctgatggtagtcgacaggggcgccgctttctcaaaactgataaacttcagttcctatttgatttcttagacattgggaggacttgcaagccagggacctacagattggtgaggacatacccaaggcgcacgtttaccaacagcgagggtgacgtatcattcagtgatcttggcctaacaagcaagcaggaagccctgtttctagagcagatcacggggtagaggataatcgttaggcatggttagagataccacagctgggcaggagaattttacacaaaatacttgcaccatatcgccagtgaaaactcggtctgtcaaattggttgggttggtcgaagaaaggttaaaaattcttttgtggcgccatgtgtcgtgacgcattgcgctttgcatgcaaattggttgggttggtcgaagaaaggttaaaaattcttttgtggcgccatgtgtcgtgacgcattgcgctttgcatgctttacgttattatatatatgcgtgatactttatacctacgcatgcatgatgattcgtttcagtgagccctgctgtgcagagtgggttctgtattattgttggttctttgaatcaaagcgatgttgcacattgcacagccacaggccggtcgtgtgcgtacaagatcgcaaaagggcacgcgaccctcaagagtttgctttagcattcactacgaatgacggaatgaggacaccgagtcgactcgacgccggtggccttttattattcagcgtgtttggatcccttgccttttgcccagtgcatcgcactggctatcatcagctcattactctgcacgcatgacagcaaagagcaaatcatcagcacggcatataaaaaacgacaaataaagacacatttttcatgcgtggcggatggcggcatggcgcagtgtgtgtcattcatggcggatcagcacgacaaataactagagatggaggccttacggcagctgactggcgggaggccgcacttggccggcaggctgttgatgatgctgaacgttccgcaggcgcagtccctggacacggcccccagcgcggagcagcactccggcccgggcgccggcggaacctgccccggcaagggtggcacgctgtagcgcaagcagggggccagcccgcgcagctgccccgcgcacgtctgctgcgcctcggcgccaccgcccagccccgctgccaacaccaggagcagcagcagggacagcgccgcgggcaggccgcgcggctgcaccttgccgccgccggcggctgtcgtcgtcgtcgccgtcattattccaaactgaaaagcaccggccgacctgaccgtcgtctcgcgtacgcggaccagcagcgtgcgtgctgcttcgcacgtactggctctggactgggtcgcggtgtgcgtgtgccgtgtgcgcgcgctaacggcgggatttataggcgttcattagtgactgtggcctcgag

SEQ ID NO: 205042 - DNA, 2828 bp, Zea Mays
gttgtactccaccgacacctgctgatgggcttgctggaacatggtggtgatcttaatcgagcaataaattcacatttcaatgatggagacagcatattgaacggaatcagtcaaaacgccatgcctgctagtcgtgatgatatgatggacctggatggaccacttgataatacatttcaaagatctttgttgccagagagtttccgtgccccttttgctctaatggatccaaatttccaggaccaattttttgacagagttggctccactgatggtgtcattcgtgaaccgctagtttcacatccaagagaggtgagggagatacctatcgaagttaaggatggtgatcctcaaacaggttcatctggccaggatgttactggaaatgagtcttcaaatggccctgaagtccctgaaactatcataattgatgatgtggacggtggattgttatctgcaccatctgttccacatcctattattcctagcaatacatctactgtgccaactgctcctccattggttcatgttaatgactatgatgaggacatagaagaggaaatgattcgggcagcaattgaagcttcaaagaaggattctgaaggactggcaaattcgagcaaggaggccagcatcaagaggaagtgaatttgagggaccattcttctgataaagcaggcatggaaaccgcaaatggaatagttgagaggactagcttcagaaaaggctggaacatctaggcaaccaatagatgacgagagcttccaggaggaggctgaagatgtagaagaacagccgttagttaggcgtcgttctcggcgtgccccttctgaggacaatgaattaccaaaaatagtgcacccaggtgctagccctgttctgaacaatcaccagtataatggagatgatttcccatctgagtggggtggcatttcttctgaggaacatgatgaagctgttatgcttgaggctgcaatgtttggtggagttcctgaaggaccaacatatcctttctctatgccttctcacagaacctctacttattatcccccaatatctcattctccatcaccagcattaactgaacagcggttattacgagagcagcaggacgatgagtaccttgcatcgctacaagctgatcaagaaaaggagttaaaggccctacaggaggctgagctccgtcgccttgaagaaacagctgcgagagaagctgttcttgagaaacagaagcaagaggaggaggaaaggcgtaaaaaacaacttgaggaagaggaactagagtccagtctcacttcgaagcaagcatcattaccaccggaaccgtctccagacgcagagggtgctgtgacagttgtagtccgaatgcctgatggtagtcgacaggggcgccgctttctcaaaactgataaacttcagttcctatttgatttcttagacattgggaggacttgcaagccagggacctacagattggtgaggacatacccaaggcgcacgtttaccaacagcgagggtgacgtatcattcagtgatcttggcctaacaagcaagcaggaagccctgtttctagagcagatcacggggtagaggataatcgttaggcatggttagagataccacagctgggcaggagaattttacacaaaatacttgcaccatatcgccagtgaaaactcggtctgtcaaattggttgggttggtcgaagaaaggttaaaaattcttttgtggcgccatgtgtcgtgacgcattgcgctttgcatgcaaattggttgggttggtcgaagaaaggttaaaaattcttttgtggcgccatgtgtcgtgacgcattgcgctttgcatgctttacgttattatatatatgcgtgatactttatacctacgcatgcatgatgattcgtttcagtgagccctgctgtgcagagtgggttctgtattattgttggttctttgaatcaaagcgatgttgcacattgcacagccacaggccggtcgtgtgcgtacaagatcgcaaaagggcacgcgaccctcaagagtttgctttagcattcactacgaatgacggaatgaggacaccgagtcgactcgacgccggtggccttttattattcagcgtgtttggatcccttgccttttgcccagtgcatcgcactggctatcatcagctcattactctgcacgcatgacagcaaagagcaaatcatcagcacggcatataaaaaacgacaaataaagacacatttttcatgcgtggcggatggcggcatggcgcagtgtgtgtcattcatggcggatcagcacgacaaataactagagatggaggccttacggcagctgactggcgggaggccgcacttggccggcaggctgttgatgatgctgaacgttccgcaggcgcagtccctggacacggcccccagcgcggagcagcactccggcccgggcgccggcggaacctgccccggcaagggtggcacgctgtagcgcaagcagggggccagcccgcgcagctgccccgcgcacgtctgctgcgcctcggcgccaccgcccagccccgctgccaacaccaggagcagcagcagggacagcgccgcgggcaggccgcgcggctgcaccttgccgccgccggcggctgtcgtcgtcgtcgccgtcattattccaaactgaaaagcaccggccgacctgaccgtcgtctcgcgtacgcggaccagcagcgtgcgtgctgcttcgcacgtactggctctggactgggtcgcggtgtgcgtgtgccgtgtgcgcgcgctaacggcgggatttataggcgttcattagtgactgtggcctcgag

SEQ ID NO: 205043 - DNA, 2816 bp, Zea Mays
cgagatgtcatcgggatcaggaacatggtggtgatcttaatcgagcaataaattcacatttcaatgatggagacagcatattgaacggaatcagtcaaaacgccatgcctgctagtcgtgatgatatgatggacctggatggaccacttgataatacatttcaaagatctttgttgccagagagtttccgtgccccttttgctctaatggatccaaatttccaggaccaattttttgacagagttggctccactgatggtgtcattcgtgaaccgctagtttcacatccaagagaggtgagggagatacctatcgaagttaaggatggtgatcctcaaacaggttcatctggccaggatgttactggaaatgagtcttcaaatggccctgaagtccctgaaactatcataattgatgatgtggacggtggattgttatctgcaccatctgttccacatcctattattcctagcaatacatctactgtgccaactgctcctccattggttcatgttaatgactatgatgaggacatagaagaggaaatgattcgggcagcaattgaagcttcaaagaaggattctgaaggactggcaaatatagtcgagcaaggaggccagcatcaagaggaagtgaatttgagggaccattcttctgataaagcaggcatggaaaccgcaaatggaatagttgagaggactagcttcagaaaaggctggaacatctaggcaaccaatagatgacgagagcttccaggaggaggctgaagatgtagaagaacagccgttagttaggcgtcgttctcggcgtgccccttctgaggacaatgaattaccaaaaatagtgcacccaggtgctagccctgttctgaacaatcaccagtataatggagatgatttcccatctgagtggggtggcatttcttctgaggaacatgatgaagctgttatgcttgaggctgcaatgtttggtggagttcctgaaggaccaacatatcctttctctatgccttctcacagaacctctacttattatcccccaatatctcattctccatcaccagcattaactgaacagcggttattacgagagcagcaggacgatgagtaccttgcatcgctacaagctgatcaagaaaaggagttaaaggccctacaggaggctgagctccgtcgccttgaagaaacagctgcgagagaagctgttcttgagaaacagaagcaagaggaggaggaaaggcgtaaaaaacaacttgaggaagaggaactagagtccagtctcacttcgaagcaagcatcattaccaccggaaccgtctccagacgcagagggtgctgtgacagttgtagtccgaatgcctgatggtagtcgacaggggcgccgctttctcaaaactgataaacttcagttcctatttgatttcttagacattgggaggacttgcaagccagggacctacagattggtgaggacatacccaaggcgcacgtttaccaacagcgagggtgacgtatcattcagtgatcttggcctaacaagcaagcaggaagccctgtttctagagcagatcacggggtagaggataatcgttaggcatggttagagataccacagctgggcaggagaattttacacaaaatacttgcaccatatcgccagtgaaaactcggtctgtcaaattggttgggttggtcgaagaaaggttaaaaattcttttgtggcgccatgtgtcgtgacgcattgcgctttgcatgcaaattggttgggttggtcgaagaaaggttaaaaattcttttgtggcgccatgtgtcgtgacgcattgcgctttgcatgctttacgttattatatatatgcgtgatactttatacctacgcatgcatgatgattcgtttcagtgagccctgctgtgcagagtgggttctgtattattgttggttctttgaatcaaagcgatgttgcacattgcacagccacaggccggtcgtgtgcgtacaagatcgcaaaagggcacgcgaccctcaagagtttgctttagcattcactacgaatgacggaatgaggacaccgagtcgactcgacgccggtggccttttattattcagcgtgtttggatcccttgccttttgcccagtgcatcgcactggctatcatcagctcattactctgcacgcatgacagcaaagagcaaatcatcagcacggcatataaaaaacgacaaataaagacacatttttcatgcgtggcggatggcggcatggcgcagtgtgtgtcattcatggcggatcagcacgacaaataactagagatggaggccttacggcagctgactggcgggaggccgcacttggccggcaggctgttgatgatgctgaacgttccgcaggcgcagtccctggacacggcccccagcgcggagcagcactccggcccgggcgccggcggaacctgccccggcaagggtggcacgctgtagcgcaagcagggggccagcccgcgcagctgccccgcgcacgtctgctgcgcctcggcgccaccgcccagccccgctgccaacaccaggagcagcagcagggacagcgccgcgggcaggccgcgcggctgcaccttgccgccgccggcggctgtcgtcgtcgtcgccgtcattattccaaactgaaaagcaccggccgacctgaccgtcgtctcgcgtacgcggaccagcagcgtgcgtgctgcttcgcacgtactggctctggactgggtcgcggtgtgcgtgtgccgtgtgcgcgcgctaacggcgggatttataggcgttcattagtgactgtggcctcgag

SEQ ID NO: 205044 - DNA, 2969 bp, Zea Mays
gtacaactcaaagactagcaaagaggtcaggtgaccggctcaccgctcggagtcgcggcttcagaaatcagaatcagagcacctgcctctcttcagtttgttgccgtctctctctctcctcttgacgcaactcctctcctatcttctctctctccatcgctccctcctccgcgccgcgttggcaccgaaccctcctgtcatggcaaggccgccgaaggaggcgattgataccttcatcagcatcacgggggcggacgaggccgtcgccgtacgcaaactcgaggaacatggtggtgatcttaatcgagcaataaattcacatttcaatgatggagacagcatattgaacggaatcagtcaaaacgccatgcctgctagtcgtgatgatatgatggacctggatggaccacttgataatacatttcaaagatctttgttgccagagagtttccgtgccccttttgctctaatggatccaaatttccaggaccaattttttgacagagttggctccactgatggtgtcattcgtgaaccgctagtttcacatccaagagaggtgagggagatacctatcgaagttaaggatggtgatcctcaaacaggttcatctggccaggatgttactggaaatgagtcttcaaatggccctgaagtccctgaaactatcataattgatgatgtggacggtggattgttatctgcaccatctgttccacatcctattattcctagcaatacatctactgtgccaactgctcctccattggttcatgttaatgactatgatgaggacatagaagaggaaatgattcgggcagcaattgaagcttcaaagaaggattctgaaggactggcaaatatagtcgagcaaggaggccagcatcaagaggaagtgaatttgagggaccattcttctgataaagcaggcatggaaaccgcaaatggaatagttgagaggactagcttcagaaaaggctggaacatctaggcaaccaatagatgacgagagcttccaggaggaggctgaagatgtagaagaacagccgttagttaggcgtcgttctcggcgtgccccttctgaggacaatgaattaccaaaaatagtgcacccaggtgctagccctgttctgaacaatcaccagtataatggagatgatttcccatctgagaacctctacttattatcccccaatatctcattctccatcaccagcattaactgaacagcggttattacgagagcagcaggacgatgagtaccttgcatcgctacaagctgatcaagaaaaggagttaaaggccctacaggaggctgagctccgtcgccttgaagaaacagctgcgagagaagctgttcttgagaaacagaagcaagaggaggaggaaaggcgtaaaaaacaacttgaggaagaggaactagagtccagtctcacttcgaagcaagcatcattaccaccggaaccgtctccagacgcagagggtgctgtgacagttgtagtccgaatgcctgatggtagtcgacaggggcgccgctttctcaaaactgataaacttcagttcctatttgatttcttagacattgggaggacttgcaagccagggacctacagattggtgaggacatacccaaggcgcacgtttaccaacagcgagggtgacgtatcattcagtgatcttggcctaacaagcaagcaggaagccctgtttctagagcagatcacggggtagaggataatcgttaggcatggttagagataccacagctgggcaggagaattttacacaaaatacttgcaccatatcgccagtgaaaactcggtctgtcaaattggttgggttggtcgaagaaaggttaaaaattcttttgtggcgccatgtgtcgtgacgcattgcgctttgcatgcaaattggttgggttggtcgaagaaaggttaaaaattcttttgtggcgccatgtgtcgtgacgcattgcgctttgcatgctttacgttattatatatatgcgtgatactttatacctacgcatgcatgatgattcgtttcagtgagccctgctgtgcagagtgggttctgtattattgttggttctttgaatcaaagcgatgttgcacattgcacagccacaggccggtcgtgtgcgtacaagatcgcaaaagggcacgcgaccctcaagagtttgctttagcattcactacgaatgacggaatgaggacaccgagtcgactcgacgccggtggccttttattattcagcgtgtttggatcccttgccttttgcccagtgcatcgcactggctatcatcagctcattactctgcacgcatgacagcaaagagcaaatcatcagcacggcatataaaaaacgacaaataaagacacatttttcatgcgtggcggatggcggcatggcgcagtgtgtgtcattcatggcggatcagcacgacaaataactagagatggaggccttacggcagctgactggcgggaggccgcacttggccggcaggctgttgatgatgctgaacgttccgcaggcgcagtccctggacacggcccccagcgcggagcagcactccggcccgggcgccggcggaacctgccccggcaagggtggcacgctgtagcgcaagcagggggccagcccgcgcagctgccccgcgcacgtctgctgcgcctcggcgccaccgcccagccccgctgccaacaccaggagcagcagcagggacagcgccgcgggcaggccgcgcggctgcaccttgccgccgccggcggctgtcgtcgtcgtcgccgtcattattccaaactgaaaagcaccggccgacctgaccgtcgtctcgcgtacgcggaccagcagcgtgcgtgctgcttcgcacgtactggctctggactgggtcgcggtgtgcgtgtgccgtgtgcgcgcgctaacggcgggatttataggcgttcattagtgactgtggcctcgag

SEQ ID NO: 205045 - DNA, 3169 bp, Zea Mays
tggcaacgcaccgttacgaccagtagatatattatttatagagtttagttgaaaatacagcggaggacagagagtgtggaactgtggatcgtacaactcaaagactagcaaagaggtcaggtgaccggctcaccgctcggagtcgcggcttcagaaatcagaatcagagcacctgcctctcttcagtttgttgccgtctctctctctcctcttgacgcaactcctctcctatcttctctctctccatcgctccctcctccgcgccgcgttggcaccgaaccctcctgtcatggcaaggccgccgaaggaggcgattgataccttcatcagcatcacgggggcggacgaggccgtcgccgtacgcaaactcgaggaacatggtggtgatcttaatcgagcaataaattcacatttcaatgatggagacagcatattgaacggaatcagtcaaaacgccatgcctgctagtcgtgatgatatgatggacctggatggaccacttgataatacatttcaaagatctttgttgccagagagtttccgtgccccttttgctctaatggatccaaatttccaggaccaattttttgacagagttggctccactgatggtgtcattcgtgaaccgctagtttcacatccaagagaggtgagggagatacctatcgaagttaaggatggtgatcctcaaacaggttcatctggccaggatgttactggaaatgagtcttcaaatggccctgaagtccctgaaactatcataattgatgatgtggacggtggattgttatctgcaccatctgttccacatcctattattcctagcaatacatctactgtgccaactgctcctccattggttcatgttaatgactatgatgaggacatagaagaggaaatgattcgggcagcaattgaagcttcaaagaaggattctgaaggactggcaaatatagtcgagcaaggaggccagcatcaagaggaagtgaatttgagggaccattcttctgataaagcaggcatggaaaccgcaaatggaatagttgagaggactagcttcagaaaaggctggaacatctaggcaaccaatagatgacgagagcttccaggaggaggctgaagatgtagaagaacagccgttagttaggcgtcgttctcggcgtgccccttctgaggacaatgaattaccaaaaatagtgcacccaggtgctagccctgttctgaacaatcaccagtataatggagatgatttcccatctgagtggggtggcatttcttctgaggaacatgatgaagctgttatgcttgaggctgcaatgtttggtggagttcctgaaggaccaacatatcctttctctatgccttctcacagaacctctacttattatcccccaatatctcattctccatcaccagcattaactgaacagcggttattacgagagcagcaggacgatgagtaccttgcatcgctacaagctgatcaagaaaaggagttaaaggccctacaggaggctgagctccgtcgccttgaagaaacagctgcgagagaagctgttcttgagaaacagaagcaagaggaggaggaaaggcgtaaaaaacaacttgaggaagaggaactagagtccagtctcacttcgaagcaagcatcattaccaccggaaccgtctccagacgcagagggtgctgtgacagttgtagtccgaatgcctgatggtagtcgacaggggcgccgctttctcaaaactgataaacttcagttcctatttgatttcttagacattgggaggacttgcaagccagggacctacagattggtgaggacatacccaaggcgcacgtttaccaacagcgagggtgacgtatcattcagtgatcttggcctaacaagcaagcaggaagccctgtttctagagcagatcacggggtagaggataatcgttaggcatggttagagataccacagctgggcaggagaattttacacaaaatacttgcaccatatcgccagtgaaaactcggtctgtcaaattggttgggttggtcgaagaaaggttaaaaattcttttgtggcgccatgtgtcgtgacgcattgcgctttgcatgcaaattggttgggttggtcgaagaaaggttaaaaattcttttgtggcgccatgtgtcgtgacgcattgcgctttgcatgctttacgttattatatatatgcgtgatactttatacctacgcatgcatgatgattcgtttcagtgagccctgctgtgcagagtgggttctgtattattgttggttctttgaatcaaagcgatgttgcacattgcacagccacaggccggtcgtgtgcgtacaagatcgcaaaagggcacgcgaccctcaagagtttgctttagcattcactacgaatgacggaatgaggacaccgagtcgactcgacgccggtggccttttattattcagcgtgtttggatcccttgccttttgcccagtgcatcgcactggctatcatcagctcattactctgcacgcatgacagcaaagagcaaatcatcagcacggcatataaaaaacgacaaataaagacacatttttcatgcgtggcggatggcggcatggcgcagtgtgtgtcattcatggcggatcagcacgacaaataactagagatggaggccttacggcagctgactggcgggaggccgcacttggccggcaggctgttgatgatgctgaacgttccgcaggcgcagtccctggacacggcccccagcgcggagcagcactccggcccgggcgccggcggaacctgccccggcaagggtggcacgctgtagcgcaagcagggggccagcccgcgcagctgccccgcgcacgtctgctgcgcctcggcgccaccgcccagccccgctgccaacaccaggagcagcagcagggacagcgccgcgggcaggccgcgcggctgcaccttgccgccgccggcggctgtcgtcgtcgtcgccgtcattattccaaactgaaaagcaccggccgacctgaccgtcgtctcgcgtacgcggaccagcagcgtgcgtgctgcttcgcacgtactggctctggactgggtcgcggtgtgcgtgtgccgtgtgcgcgcgctaacggcgggatttataggcgttcattagtgactgtggcctcgag

SEQ ID NO: 205046 - DNA, 3157 bp, Zea Mays
tggcaacgcaccgttacgaccagtagatatattatttatagagtttagttgaaaatacagcggaggacagagagtgtggaactgtggatcgtacaactcaaagactagcaaagaggtcaggtgaccggctcaccgctcggagtcgcggcttcagaaatcagaatcagagcacctgcctctcttcagtttgttgccgtctctctctctcctcttgacgcaactcctctcctatcttctctctctccatcgctccctcctccgcgccgcgttggcaccgaaccctcctgtcatggcaaggccgccgaaggaggcgattgataccttcatcagcatcacgggggcggacgaggccgtcgccgtacgcaaactcgaggaacatggtggtgatcttaatcgagcaataaattcacatttcaatgatggagacagcatattgaacggaatcagtcaaaacgccatgcctgctagtcgtgatgatatgatggacctggatggaccacttgataatacatttcaaagatctttgttgccagagagtttccgtgccccttttgctctaatggatccaaatttccaggaccaattttttgacagagttggctccactgatggtgtcattcgtgaaccgctagtttcacatccaagagaggtgagggagatacctatcgaagttaaggatggtgatcctcaaacaggttcatctggccaggatgttactggaaatgagtcttcaaatggccctgaagtccctgaaactatcataattgatgatgtggacggtggattgttatctgcaccatctgttccacatcctattattcctagcaatacatctactgtgccaactgctcctccattggttcatgttaatgactatgatgaggacatagaagaggaaatgattcgggcagcaattgaagcttcaaagaaggattctgaaggactggcaaatatagtcgagcaaggaggccagcatcaagaggaagtgaatttgagggaccattcttctgataaagcaggcatggaaaccgcaaatggaatagttgagagaaaaggctggaacatctaggcaaccaatagatgacgagagcttccaggaggaggctgaagatgtagaagaacagccgttagttaggcgtcgttctcggcgtgccccttctgaggacaatgaattaccaaaaatagtgcacccaggtgctagccctgttctgaacaatcaccagtataatggagatgatttcccatctgagtggggtggcatttcttctgaggaacatgatgaagctgttatgcttgaggctgcaatgtttggtggagttcctgaaggaccaacatatcctttctctatgccttctcacagaacctctacttattatcccccaatatctcattctccatcaccagcattaactgaacagcggttattacgagagcagcaggacgatgagtaccttgcatcgctacaagctgatcaagaaaaggagttaaaggccctacaggaggctgagctccgtcgccttgaagaaacagctgcgagagaagctgttcttgagaaacagaagcaagaggaggaggaaaggcgtaaaaaacaacttgaggaagaggaactagagtccagtctcacttcgaagcaagcatcattaccaccggaaccgtctccagacgcagagggtgctgtgacagttgtagtccgaatgcctgatggtagtcgacaggggcgccgctttctcaaaactgataaacttcagttcctatttgatttcttagacattgggaggacttgcaagccagggacctacagattggtgaggacatacccaaggcgcacgtttaccaacagcgagggtgacgtatcattcagtgatcttggcctaacaagcaagcaggaagccctgtttctagagcagatcacggggtagaggataatcgttaggcatggttagagataccacagctgggcaggagaattttacacaaaatacttgcaccatatcgccagtgaaaactcggtctgtcaaattggttgggttggtcgaagaaaggttaaaaattcttttgtggcgccatgtgtcgtgacgcattgcgctttgcatgcaaattggttgggttggtcgaagaaaggttaaaaattcttttgtggcgccatgtgtcgtgacgcattgcgctttgcatgctttacgttattatatatatgcgtgatactttatacctacgcatgcatgatgattcgtttcagtgagccctgctgtgcagagtgggttctgtattattgttggttctttgaatcaaagcgatgttgcacattgcacagccacaggccggtcgtgtgcgtacaagatcgcaaaagggcacgcgaccctcaagagtttgctttagcattcactacgaatgacggaatgaggacaccgagtcgactcgacgccggtggccttttattattcagcgtgtttggatcccttgccttttgcccagtgcatcgcactggctatcatcagctcattactctgcacgcatgacagcaaagagcaaatcatcagcacggcatataaaaaacgacaaataaagacacatttttcatgcgtggcggatggcggcatggcgcagtgtgtgtcattcatggcggatcagcacgacaaataactagagatggaggccttacggcagctgactggcgggaggccgcacttggccggcaggctgttgatgatgctgaacgttccgcaggcgcagtccctggacacggcccccagcgcggagcagcactccggcccgggcgccggcggaacctgccccggcaagggtggcacgctgtagcgcaagcagggggccagcccgcgcagctgccccgcgcacgtctgctgcgcctcggcgccaccgcccagccccgctgccaacaccaggagcagcagcagggacagcgccgcgggcaggccgcgcggctgcaccttgccgccgccggcggctgtcgtcgtcgtcgccgtcattattccaaactgaaaagcaccggccgacctgaccgtcgtctcgcgtacgcggaccagcagcgtgcgtgctgcttcgcacgtactggctctggactgggtcgcggtgtgcgtgtgccgtgtgcgcgcgctaacggcgggatttataggcgttcattagtgactgtggcctcgag

SEQ ID NO: 205047 - DNA, 3163 bp, Zea Mays
tggcaacgcaccgttacgaccagtagatatattatttatagagtttagttgaaaatacagcggaggacagagagtgtggaactgtggatcgtacaactcaaagactagcaaagaggtcaggtgaccggctcaccgctcggagtcgcggcttcagaaatcagaatcagagcacctgcctctcttcagtttgttgccgtctctctctctcctcttgacgcaactcctctcctatcttctctctctccatcgctccctcctccgcgccgcgttggcaccgaaccctcctgtcatggcaaggccgccgaaggaggcgattgataccttcatcagcatcacgggggcggacgaggccgtcgccgtacgcaaactcgaggaacatggtggtgatcttaatcgagcaataaattcacatttcaatgatggagacagcatattgaacggaatcagtcaaaacgccatgcctgctagtcgtgatgatatgatggacctggatggaccacttgataatacatttcaaagatctttgttgccagagagtttccgtgccccttttgctctaatggatccaaatttccaggaccaattttttgacagagttggctccactgatggtgtcattcgtgaaccgctagtttcacatccaagagaggtgagggagatacctatcgaagttaaggatggtgatcctcaaacaggttcatctggccaggatgttactggaaatgagtcttcaaatggccctgaagtccctgaaactatcataattgatgatgtggacggtggattgttatctgcaccatctgttccacatcctattattcctagcaatacatctactgtgccaactgctcctccattggttcatgttaatgactatgatgaggacatagaagaggaaatgattcgggcagcaattgaagcttcaaagaaggattctgaaggactggcaaatatagtcgagcaaggaggccagcatcaagaggaagtgaatttgagggaccattcttctgataaagcaggcatggaaaccgcaaatggaatagttgagagcttcagaaaaggctggaacatctaggcaaccaatagatgacgagagcttccaggaggaggctgaagatgtagaagaacagccgttagttaggcgtcgttctcggcgtgccccttctgaggacaatgaattaccaaaaatagtgcacccaggtgctagccctgttctgaacaatcaccagtataatggagatgatttcccatctgagtggggtggcatttcttctgaggaacatgatgaagctgttatgcttgaggctgcaatgtttggtggagttcctgaaggaccaacatatcctttctctatgccttctcacagaacctctacttattatcccccaatatctcattctccatcaccagcattaactgaacagcggttattacgagagcagcaggacgatgagtaccttgcatcgctacaagctgatcaagaaaaggagttaaaggccctacaggaggctgagctccgtcgccttgaagaaacagctgcgagagaagctgttcttgagaaacagaagcaagaggaggaggaaaggcgtaaaaaacaacttgaggaagaggaactagagtccagtctcacttcgaagcaagcatcattaccaccggaaccgtctccagacgcagagggtgctgtgacagttgtagtccgaatgcctgatggtagtcgacaggggcgccgctttctcaaaactgataaacttcagttcctatttgatttcttagacattgggaggacttgcaagccagggacctacagattggtgaggacatacccaaggcgcacgtttaccaacagcgagggtgacgtatcattcagtgatcttggcctaacaagcaagcaggaagccctgtttctagagcagatcacggggtagaggataatcgttaggcatggttagagataccacagctgggcaggagaattttacacaaaatacttgcaccatatcgccagtgaaaactcggtctgtcaaattggttgggttggtcgaagaaaggttaaaaattcttttgtggcgccatgtgtcgtgacgcattgcgctttgcatgcaaattggttgggttggtcgaagaaaggttaaaaattcttttgtggcgccatgtgtcgtgacgcattgcgctttgcatgctttacgttattatatatatgcgtgatactttatacctacgcatgcatgatgattcgtttcagtgagccctgctgtgcagagtgggttctgtattattgttggttctttgaatcaaagcgatgttgcacattgcacagccacaggccggtcgtgtgcgtacaagatcgcaaaagggcacgcgaccctcaagagtttgctttagcattcactacgaatgacggaatgaggacaccgagtcgactcgacgccggtggccttttattattcagcgtgtttggatcccttgccttttgcccagtgcatcgcactggctatcatcagctcattactctgcacgcatgacagcaaagagcaaatcatcagcacggcatataaaaaacgacaaataaagacacatttttcatgcgtggcggatggcggcatggcgcagtgtgtgtcattcatggcggatcagcacgacaaataactagagatggaggccttacggcagctgactggcgggaggccgcacttggccggcaggctgttgatgatgctgaacgttccgcaggcgcagtccctggacacggcccccagcgcggagcagcactccggcccgggcgccggcggaacctgccccggcaagggtggcacgctgtagcgcaagcagggggccagcccgcgcagctgccccgcgcacgtctgctgcgcctcggcgccaccgcccagccccgctgccaacaccaggagcagcagcagggacagcgccgcgggcaggccgcgcggctgcaccttgccgccgccggcggctgtcgtcgtcgtcgccgtcattattccaaactgaaaagcaccggccgacctgaccgtcgtctcgcgtacgcggaccagcagcgtgcgtgctgcttcgcacgtactggctctggactgggtcgcggtgtgcgtgtgccgtgtgcgcgcgctaacggcgggatttataggcgttcattagtgactgtggcctcgag

SEQ ID NO: 205048 - DNA, 1735 bp, Zea Mays
atgggttccgtgcaggtgcagcgtgtcgccactgactccgcgtccgtccgtcccccatacggccacgcctctgggtctcccgcgctgccatggacgggggaagagagcagcaggcgccgccggagtcgcagcccggtaagaacctcatcaagatcccgtcctatcaggaggtcttcggcaccggcgcctccacctcttcctcgaagccgccatcctacaaccctcctgtagccacctccgccgccgccgccgcttcatcctcgtcgtcgtcctcgggatcattctcgcaggctttttctttcctcaagtcctccgagttctactcacctccgccgccgccgcctccccagcccaccaccaccccgaggccgactcaagctagcccctcagcgccgactccccaaagcaagaactccattctcgtcagtcataggcagagaggaaaccctctgctgaagcacattaggaatgctagatggacgttcgccgatgtcgtgccggactatgtgcttgggcaatcgtcatgtgccttgtacttaagatcaggtaccatcttctacatccagactacttgtactatcggataagagagctgcagaagaatttcaggctgcgtgtcatcttgtgccatgttgatgttgaagatgtaatcaagcctttgcatgaaattacaagaacagcgctgcttcatgactgcacccttttgtgtggttggagcctggaggaatgtggtcggtacttggagactattaaagtatatgaaaacaagccagctgacagtattcgtgagcacatggataacgactatctatcacgggtatatatacttcctgggaaccctctccagaacaagataatttgatgatctatgtcatcggttgatgaggaaaactgttgacgcacgggcttacatccattcggcatgttaataaaacggacgttgtcacactcggttcatcttttgggtcgctctcacagatcatgaatggttctatggacgagctggctcgatgcccaggaatcggtgagcggaaggtaaggcggctctatgataccttccatgagccgttcaaacgggttcctgcccgaccacgaccaaacctcgtagtacccgataccccggaccgggagaaagcaaaaggccaaccttcgtctacagatggcagcagtttgcaagatgcggtagagaagccagatgcgtcgaagaagacgaagaaaggctctgatgtaagatcagccctcaccgttgcctttgccaagtattcggagaagatccgcagtcagggccgcgatgcgccaaacgaggccggtgagagtactggcggctcgaccgtggaagctgagagggcgggagactagatttagctgtaggatggttaacggtgctggagtaatgctagtttgttccttcctgttgggtgcttgttgttgtgactcggccgccgatttgcgcgtgcggcaccagtatttcccgcggcgtcctaggcatgtgtttttttaggctaaagaggggccagagaatcttcaacgatatcgaaacatttaagtgagattcctagacggtggcagccattccatcaccatataaatcacacttagaatctctctaaaacataatctgtattgccttctctacctcttaatatatttatatctctaaaacataatctgttgggtgctatatcctttccggcttcagttccaaaattaaaaagggaaaagaaaaagaaagaaa

SEQ ID NO: 205049 - DNA, 2973 bp, Zea Mays
ggggggtgactgggtgagggagtcccagcagcggtgactgttgcggtgttgccgcatccacgccctagtcgaccacgccgcccccagcagcccgctgctgccgcggctcgcgcccccaggagcccccgccgtcgcggctcgcgcctcgtatccgtaacagctacaccgcgccgcctacccccgcttcctgctggctgcatcgtcctcaggtcttccgaaggcgagctccaatccccaaccactattcacaagatgactacaaaacttgagcaatcttctgcggagcatcgcccagcaaaattcgcagcaccatcgtctttgacccccaagatctcaatgtttggggcaaaagctggattcatcatacctaagaacaagctggccggctcactcgtaatccggagcaccagtgacaagaatgaaacaccaactgcatccaacgaagatagcagcaggcatgttcacagaaagacaaagtgggggcctgaccttgctttggaccctgtcgtgtgcaaaggaagggctttggcctaccagactcgagtggagcaaatttccaagcagctgaagtctggagctttggacacgtccgaaattgatggttcagtgtctgctggaaatgaattgaattctattggtcctgacatcttgaaagagaacgagctgggaaatgttgaactattggaacttgaaagacgagagcttatcggtgaaatactccgtttgaatccgggatataagacacctgagaactacaaaccagtacttagggagacaaaaatccctgttccggcagaagcacacccaggaaataatattattggagttcttctaggatctgagagcaatacccagaagagactacatgaagaaactggtgctgtcattcgagtgtatgggactaagaaaatcaatggagagaagagtgagattcgtcatcaagacataaatgaaacacaagatgcttatgaagacctatacatcaatgtatcggctgactcttatgataaagtagatgctgcagttgtgttgattgagctgcttcttgctcctgtttccgtaaagtcgacagctacttcaacagctgctactgtttcttcagcagatacatccaaggatgcagtttcagctaatgtgcaactggagcagaataccacgtcacagccagatctacttcattaccaatcacacaacgcaccttggctgcccacaccccagaccaatgctccatcaattccttccacggggcctgttttgagtacattacctaacaatccatcgcagccacaaccgcctgctggttctttcagtatgcctccatatactggtcaacctcctcacatgaatagcatgccagcaaatccatttcctgttcctgggcctcagcaaccagtaccaagcaatcaacaacatccacctcaatttcgagctaactcctcgattgggccttttttcggtcaaccacctggtattgtaagccaacaaatgccaccatcttcctcaatgccaccgccagttagaccccttcaaataccccatgcctctggtggctggccccctttctctcctgttacatcacaatctcataggcctctgcaagctccaccgacttttatggcagtgagacctcctatttccgtctctcctcttggtgcaactccaccgcaaggtcccattgcattgacaccaccaaatatgcccaccatgtaccgcggccagcatccaccagtaccaaatttcactggttcagcgccattggtttccaggcctcctggtggtggggctcagtcttttcctacagctgcgcctcaaggcccttcctcagtagcatttcccggtggaccatcgctgcggccaccttaccctccggcgcctgatcaagcgagggggccacctccagctttctctccagttggatcaactcctggcatggtgcctccacctattgcatcttccggcctgcctgccccgcgtcctgcgaacacgagctgcatccagacacaagtagtagcccctttgagacctccgctcccagccgcgggcgattttactttccggcctgccataccaccggcgcatgctccagagttcgcagcaccaggcagtcaaatgggagcaatacatggcagaactcaccaccctggaccattctcctcccatcctggtgaccagaagaaccccagccaaggtttccaagggccgtttgatggcagcaggcccatgtacacgacgaatcaggctcggatgcacgctccacctcctccacacttccacggagccttccccaggaacgcatctcctcttgagttcccagcggggttccggggagcctggccgtccgtgcaggcacctccgatgccggcaccgtcacatccatcgtctttcccgccgtttcagttgaggccaccgccaccgccgcagcaggatatgtctggcgcaggcggcaccaggtggcccggtggcaatcaaatctacaacccttttgcaccaacggctgcggcggcggctcagagagcggaggctgaccctgagtacgaggatctcatggcatcagttggcatgaagtagcgaagactgctggctggcccctgatctgtctgtggcacaaacacagaggcttcttcctattgcttgccaagatgtgcgggttactaatctcctccaatgtatctctagatggtactgaattccgttccatcatagacaggtgccatgcttgaacgaaaaacaaaaataaaaaataaactagtggaccttgtttgagacatgctgttgggtgccgaggttgtgtttgtgcctatctcgaaatctcatgcatgtgttgctcccggcgtcagctgatgttgtttattttatggagaggaatttgtgagcctgttctgagaaagaagaacatctgttggcattatcacgtgtgtgtatatatacatgaaggatggggtggaatatggtaggtatgcggtatgatgtcag

SEQ ID NO: 205050 - DNA, 2972 bp, Zea Mays
ggggggtgactgggtgagggagtcccagcagcggtgactgttgcggtgttgccgcatccacgccctagtcgaccacgccgcccccagcagcccgctgctgccgcggctcgcgcccccaggagcccccgccgtcgcggctcgcgcctcgtatccgtaacagctacaccgcgccgcctacccccgcttcctgctggctgcatcgtcctcaggtcttccgaagatgactacaaaacttgagcaatcttctgcggagcatcgcccagcaaaattcgcagcaccatcgtctttgacccccaagatctcaatgtttggggcaaaagctggattcatcatacctaagaacaagctggccggctcactcgtaatccggagcaccagtgacaagaatgaaacaccaactgcatccaacgaagatagcagcaggcatgttcacagaaagacaaagtgggggcctgaccttgctttggaccctgtcgtgtgcaaaggaagggctttggcctaccaggtgtcattaattcatattacttcatgagcagactcgagtggagcaaatttccaagcagctgaagtctggagctttggacacgtccgaaattgatggttcagtgtctgctggaaatgaattgaattctattggtcctgacatcttgaaagagaacgagctgggaaatgttgaactattggaacttgaaagacgagagcttatcggtgaaatactccgtttgaatccgggatataagacacctgagaactacaaaccagtacttagggagacaaaaatccctgttccggcagaagcacacccaggaaataatattattggagttcttctaggatctgagagcaatacccagaagagactacatgaagaaactggtgctgtcattcgagtgtatgggactaagaaaatcaatggagagaagagtgagattcgtcatcaagacataaatgaaacacaagatgcttatgaagacctatacatcaatgtatcggctgactcttatgataaagtagatgctgcagttgtgttgattgagctgcttcttgctcctgtttccgtaaagtcgacagctacttcaacagctgctactgtttcttcagcagatacatccaaggatgcagtttcagctaatgtgcaactggagcagaataccacgtcacagccagatctacttcattaccaatcacacaacgcaccttggctgcccacaccccagaccaatgctccatcaattccttccacggggcctgttttgagtacattacctaacaatccatcgcagccacaaccgcctgctggttctttcagtatgcctccatatactggtcaacctcctcacatgaatagcatgccagcaaatccatttcctgttcctgggcctcagcaaccagtaccaagcaatcaacaacatccacctcaatttcgagctaactcctcgattgggccttttttcggtcaaccacctggtattgtaagccaacaaatgccaccatcttcctcaatgccaccgccagttagaccccttcaaataccccatgcctctggtggctggccccctttctctcctgttacatcacaatctcataggcctctgcaagctccaccgacttttatggcagtgagacctcctatttccgtctctcctcttggtgcaactccaccgcaaggtcccattgcattgacaccaccaaatatgcccaccatgtaccgcggccagcatccaccagtaccaaatttcactggttcagcgccattggtttccaggcctcctggtggtggggctcagtcttttcctacagctgcgcctcaaggcccttcctcagtagcatttcccggtggaccatcgctgcggccaccttaccctccggcgcctgatcaagcgagggggccacctccagctttctctccagttggatcaactcctggcatggtgcctccacctattgcatcttccggcctgcctgccccgcgtcctgcgaacacgagctgcatccagacacaagtagtagcccctttgagacctccgctcccagccgcgggcgattttactttccggcctgccataccaccggcgcatgctccagagttcgcagcaccaggcagtcaaatgggagcaatacatggcagaactcaccaccctggaccattctcctcccatcctggtgaccagaagaaccccagccaaggtttccaagggccgtttgatggcagcaggcccatgtacacgacgaatcaggctcggatgcacgctccacctcctccacacttccacggagccttccccaggaacgcatctcctcttgagttcccagcggggttccggggagcctggccgtccgtgcaggcacctccgatgccggcaccgtcacatccatcgtctttcccgccgtttcagttgaggccaccgccaccgccgcagcaggatatgtctggcgcaggcggcaccaggtggcccggtggcaatcaaatctacaacccttttgcaccaacggctgcggcggcggctcagagagcggaggctgaccctgagtacgaggatctcatggcatcagttggcatgaagtagcgaagactgctggctggcccctgatctgtctgtggcacaaacacagaggcttcttcctattgcttgccaagatgtgcgggttactaatctcctccaatgtatctctagatggtactgaattccgttccatcatagacaggtgccatgcttgaacgaaaaacaaaaataaaaaataaactagtggaccttgtttgagacatgctgttgggtgccgaggttgtgtttgtgcctatctcgaaatctcatgcatgtgttgctcccggcgtcagctgatgttgtttattttatggagaggaatttgtgagcctgttctgagaaagaagaacatctgttggcattatcacgtgtgtgtatatatacatgaaggatggggtggaatatggtaggtatgcggtatgatgtcag

SEQ ID NO: 205051 - DNA, 1355 bp, Zea Mays
ggccctatccagaagtccagaaccttccccaatcacccacacggccacacctggccccgcccaacttccatttatgcacaggcggactcgcggactcggggctcgtaccaacaggaaaaaaggcccagaggcagtgccgtgaccgattcgagacgcaagagaaggatcgagacgaggcggcggttttccggggcagcatcgtctcggccacgaagatgtcttactcaaggggctcaaggtatggatctcgctcaccttactcgagaagcacaaggtaccgaagtcgctctaggagtgtcgactctagtgatgctgaaaaccctgggaacaacctgtatgtgactggtttgtcggctcgtgtaacggatcgagatctggagaagcacttctccactgagggtgaggtgattgatgcaagcgttgtgtatgatccttggacaagggaatcacgggggtttggttttgttaccatggctgctgttaaagatgcagatcgctgcatcaaatatctggaccgttctgtgttgcaaggtcgggtcataactgttgagaagattttgttgacagcaacagggtagatgttggtagctgctctgcaacaaactgatacaacctaacaccaaaccatgccaacctcagccaaagggcaaagagaagacgaggtagaaccccaacacctgggaagtatcttggcacaaaatcatcccgtggacggaggtactccacaagctactcacctgatcggaggggccgttacagttcccgctactcacctgatcggagggactgtcatggtagagaccggtcatactctccatatgacagaaggcgatcatactctccttacggcagggatgaatcatattccccttactatggccggcgatcatactcaccttactacagcagacggtatcgttcaaggtccccatactgctacagaagacgcaggtcaccttctgtttcgccatactaccgccggcacagaatccgagagatcaacaagctattctcctaagaaagggagtaaaagggaaccctcgcgtagcagatactctggcaagagtcgtcattcaagggaaagccactctcatagccgcagttcgtactccaggtctgtgtccagggagcgctcagcttgatctgcgaggtgtgtcgtcctaggtggttataagatatgcgctgtatttgcatctatcagaacttgtgtacttcgtatattacgaacttgagaactgtatggatgtgtgcattgtgccaaattatgttcattctgtgctatctttctgatgctatcttgctattgttggtttgaacttggtaatttagtttacaaaatcattcgacatgtggag

SEQ ID NO: 205052 - DNA, 1372 bp, Zea Mays
ggccctatccagaagtccagaaccttccccaatcacccacacggccacacctggccccgcccaacttccatttatgcacaggcggactcgcggactcggggctcgtaccaacaggaaaaaaggcccagaggcagtgccgtgaccgattcgagacgcaagagaaggatcgagacgaggcggcggttttccggggcagcatcgtctcggccacgaagatgtcttactcaaggggctcaagtgaaaggtatggatctcgctcaccttactcgagaagcacaaggtaccgaagtcgctctaggagtgtcgactctagtgatgctgaaaaccctgggaacaacctgtatgtgactggtttgtcggctcgtgtaacggatcgagatctggagaagcacttctccactgagggtgaggtgattgatgcaagcgttgtgtatgatccttggacaagggaatcacgggggtttggttttgttaccatggctgctgttaaagatgcagatcgctgcatcaaatatctggaccgttctgtgttgcaaggtcgggtcataactgttgagaagattttgttgacagcaacagggtagatgttggtagctgctctgcaacaaactgatacaacctaacaccaaaccatgccaacctcagccaaagggcaaagagaagacgaggtagaaccccaacacctgggaagtatcttggcacaaaatcatcccgtggacggaggtactccacaagctactcacctgatcggaggggccgttacagttcccgctactcacctgatcggagggactgtcatggtagagaccggtcatactctccatatgacagaaggcgatcatactctccttacggcagggatgaatcatattccccttactatggccggcgatcatactcaccttactacagcagacggtatcgttcaaggtccccatactgctacagaagacgcaggtcaccttctgtttcgccatactaccgccggcacagccattccccagaatccgagagatcaacaagctattctcctaagaaagggagtaaaagggaaccctcgcgtagcagatactctggcaagagtcgtcattcaagggaaagccactctcatagccgcagttcgtactccaggtctgtgtccagggagcgctcagcttgatctgcgaggtgtgtcgtcctaggtggttataagatatgcgctgtatttgcatctatcagaacttgtgtacttcgtatattacgaacttgagaactgtatggatgtgtgcattgtgccaaattatgttcattctgtgctatctttctgatgctatcttgctattgttggtttgaacttggtaatttagtttacaaaatcattcgacatgtggag

SEQ ID NO: 205053 - DNA, 1347 bp, Zea Mays
ggccctatccagaagtccagaaccttccccaatcacccacacggccacacctggccccgcccaacttccatttatgcacaggcggactcgcggactcggggctcgtaccaacaggaaaaaaggcccagaggcagtgccgtgaccgattcgagacgcaagagaaggatcgagacgaggcggcggttttccggggcagcatcgtctcggccacgaagatgtcttactcaaggggctcaaggtatggatctcgctcaccttactcgagaagcacaaggtaccgaagtcgctctaggagtgtcgactctagtgatgctgaaaaccctgggaacaacctgtatgtgactggtttgtcggctcgtgtaacggatcgagatctggagaagcacttctccactgagggtgaggtgattgatgcaagcgttgtgtatgatccttggacaagggaatcacgggggtttggttttgttaccatggctgctgttaaagatgcagatcgctgcatcaaatatctggaccgttctgtgttgcaaggtcgggtcataactgttgagaagggtagatgttggtagctgctctgcaacaaactgatacaacctaacaccaaaccatgccaacctcagccaaagggcaaagagaagacgaggtagaaccccaacacctgggaagtatcttggcacaaaatcatcccgtggacggaggtactccacaagctactcacctgatcggaggggccgttacagttcccgctactcacctgatcggagggactgtcatggtagagaccggtcatactctccatatgacagaaggcgatcatactctccttacggcagggatgaatcatattccccttactatggccggcgatcatactcaccttactacagcagacggtatcgttcaaggtccccatactgctacagaagacgcaggtcaccttctgtttcgccatactaccgccggcacagccattccccagaatccgagagatcaacaagctattctcctaagaaagggagtaaaagggaaccctcgcgtagcagatactctggcaagagtcgtcattcaagggaaagccactctcatagccgcagttcgtactccaggtctgtgtccagggagcgctcagcttgatctgcgaggtgtgtcgtcctaggtggttataagatatgcgctgtatttgcatctatcagaacttgtgtacttcgtatattacgaacttgagaactgtatggatgtgtgcattgtgccaaattatgttcattctgtgctatctttctgatgctatcttgctattgttggtttgaacttggtaatttagtttacaaaatcattcgacatgtggag

SEQ ID NO: 205054 - DNA, 2376 bp, Zea Mays
ctctctcctctccctcctcttctttattgctttaacgttactcccactagccacccactcttcctcgaggccaccacaacacccccgggacacacacacagtcacacacacataaaaaaaaaaaaatcccccctcgcctcggattcgctcgcgcccccgcccgccgacgcaacagcgaggtcgttccgttccaggcttcggacggaggcggggtgacgtaaggaggtgcgcgggaggatccgttcgcgcccggaggaccgggatccggcgcccgtcgtcgtcgacgcccatgtcgggccacctcgatcgcttcgcgcggccatgttttgaagggtgctcaagtcacgatgaacgtagagaccataagtcagactttgaagtctctgaagatgaaaagaagacaagaataagctctttgaagaaaaaagcaatagatgcatcaacaaagattaggcactcattaaaaaagactagaaggaagagtggtagtagggtcctttctgtgtctattgaggatgtgcgcgatctagaggagctgcaagctgttgaagcatttagacaagcattactcttggatgagctgttgcctgcaaggcatgacgactatcatatgatgctgagatttctgaaggcaaggaaatttgatatcgataaagccaagcaaatgtggattgatatgcttcagtggcggagggagtatggcactgatacaattgtggaggacttcgaatacactgagttgagcaccgttttgcaatattatcctcatggttatcatggagttgacaaagaggggagacctgtttacattgaaaggcttggaaaggttgaccctagcaaacttatgaatgtcacaacgatggatcgatacgtgcgataccatgtgaaggagtttgagaggagcttcttgattaaatttccagcttgctctcttgctgcaaaaaggcacattgattccagcacgacaattctggatgtccacggagtggggttgaaaaatttcagcaaaactgcacgcgaattaattcaacgactgcagaaaattgacaatgataactacccagagactctataccaaatgtttatcgtcaatgctggtccgggcttccggttactatggaacactgtgaagtccttccttgatcccaaaacgaccgccaagatacatgttcttgggaacaaataccaaagtaagctgcttgaaacaattgacgctagaattccttggtggcacttgtacctgtcctgaatacggaggttgccttaaggctgaaaagggaccgtggaaggacccaaacatacttaagatagtccaaagtggtggggttcattgtgctcgtcaaattgtaactatttccaatggtgaggaaaaatttattacttacgccaaaccgaagcgccacgcaatgagagggagtgacacatcaactgctgagtctggttcagaagctgatgatgctgtgtcccccaaagctctcagaagttacatatcacatcctaagttgaccccagttcgtgaagaggtcaaaatggtcagggctactagcttttctactcgtgtccctgaatatgatgtacctgttgttgacaaggccgtggatgctacatggaagagagagcaaccacgaaaggcaccatccgtgccccaagactcatctgtgaaaactgcatccaagccatctggccgcccctgggataagatcgctgcaaatctgatggcttgtcttatggctattgtaatgttggttcgatcaatcaaagatcttgccacaatgagattgtcatctaaaggcgggtcagaagaaagctactgtacattgtacccggactccgtccagaaagaggaattccgtcctccttcgccattccctgggttcgctgaagccgacctattcgccgtggtcttgcaaaggctgggagagcttgaagagaaggtccagatgcttcaagaaaagccttctgaaatgccttgcgagaaagaagagttgcttaacgctgctgtgcgtcgtgtggatgcattggaagctgaactaattgtaacaaagaaggctttgcacgaggctcttatcaggcaagaggaactgctcgcgaacatcgacagcaaggagattgccagggctcagagaaagaagaaaacaatgttctgctactaggacaacacctgcttccgtgaggagatgacaaacgcggcggaccccttcatttttctgacacttgtgaatcaacaggtttccgttgtaaatcaacaaaattctggcataaataaaatgttttttttttaaaaattgcaatcctgagcattgctgcctcctcccggtctcgcaatctggttgttgttagttgcagcataactgcataattggttggttagccgcg

SEQ ID NO: 205055 - DNA, 2241 bp, Zea Mays
cactcttcctcgaggccaccacaacacccccgggacacacacacagtcacacacacataaaaaaaaaaaaatcccccctcgcctcggattcgctcgcgcccccgcccgccgacgcaacagcgaggtcgttccgttccaggcttcggacggaggcggggtgacgtaaggaggtgcgcgggaggatccgttcgcgcccggaggaccgggatccggcgcccgtcgtcgtcgacgcccatgtcgggccacctcgatcgcttcgcgcggccatgttttgaagggtgctcaagtcacgatgaacgtagagaccataagtcagactttgaagtctctgaagatgaaaagaagacaagaataagctctttgaagaaaaaagcaatagatgcatcaacaaagattaggcactcattaaaaaagactagaaggaagagtggtagtagggtcctttctgtgtctattgaggatgtgcgcgatctagaggagctgcaagctgttgaagcatttagacaagcattactcttggatgagctgttgcctgcaaggcatgacgactatcatatgatgctgagatttctgaaggcaaggaaatttgatatcgataaagccaagcaaatgtggattgatatgcttcagtggcggagggagtatggcactgatacaattgtggaggacttcgaatacactgagttgagcaccgttttgcaatattatcctcatggttatcatggagttgacaaagaggggagacctgtttacattgaaaggcttggaaagcttgctctcttgctgcaaaaaggcacattgattccagcacgacaattctggatgtccacggagtggggttgaaaaatttcagcaaaactgcacgcgaattaattcaacgactgcagaaaattgacaatgataactacccagagactctataccaaatgtttatcgtcaatgctggtccgggcttccggttactatggaacactgtgaagtccttccttgatcccaaaacgaccgccaagatacatgttcttgggaacaaataccaaagtaagctgcttgaaacaattgacgctagtgaattgccagaattccttggtggcacttgtacctgtcctgaatacggaggttgccttaaggctgaaaagggaccgtggaaggacccaaacatacttaagatagtccaaagtggtggggttcattgtgctcgtcaaattgtaactatttccaatggtgaggaaaaatttattacttacgccaaaccgaagcgccacgcaatgagagggagtgacacatcaactgctgagtctggttcagaagctgatgatgctgtgtcccccaaagctctcagaagttacatatcacatcctaagttgaccccagttcgtgaagaggtcaaaatggtcagggctactagcttttctactcgtgtccctgaatatgatgtacctgttgttgacaaggccgtggatgctacatggaagagagagcaaccacgaaaggcaccatccgtgccccaagatgcagactcatctgtgaaaactgcatccaagccatctggccgcccctgggataagatcgctgcaaatctgatggcttgtcttatggctattgtaatgttggttcgatcaatcaaagatcttgccacaatgagattgtcatctaaaggcgggtcagaagaaagctactgtacattgtacccggactccgtccagaaagaggaattccgtcctccttcgccattccctgggttcgctgaagccgacctattcgccgtggtcttgcaaaggctgggagagcttgaagagaaggtccagatgcttcaagaaaagccttctgaaatgccttgcgagaaagaagagttgcttaacgctgctgtgcgtcgtgtggatgcattggaagctgaactaattgtaacaaagaaggctttgcacgaggctcttatcaggcaagaggaactgctcgcgaacatcgacagcaaggagattgccagggctcagagaaagaagaaaacaatgttctgctactaggacaacacctgcttccgtgaggagatgacaaacgcggcggaccccttcatttttctgacacttgtgaatcaacaggtttccgttgtaaatcaacaaaattctggcataaataaaatgttttttttttaaaaattgcaatcctgagcattgctgcctcctcccggtctcgcaatctggttgttgttagttgcagcataactgcataattggttggttagccgcg

SEQ ID NO: 205056 - DNA, 1847 bp, Zea Mays
cgcgtagcttcctacgagggagaggttttgaagggtgctcaagtcacgatgaacgtagagaccataagtcagactttgaagtctctgaagatgaaaagaagacaagaataagctctttgaagaaaaaagcaatagatgcatcaacaaagattaggcactcattaaaaaagactagaaggaagagtggtagtagggtcctttctgtgtctattgaggatgtgcgcgatctagaggagctgcaagctgttgaagcatttagacaagcattactcttggatgagctgttgcctgcaaggcatgacgactatcatatgatgctgagatttctgaaggcaaggaaatttgatatcgataaagccaagcaaatgtggattgatatgcttcagtggcggagggagtatggcactgatacaattgtggaggacttcgaatacactgagttgagcaccgttttgcaatattatcctcatggttatcatggagttgacaaagaggggagacctgtttacattgaaaggcttggaaagcttgctctcttgctgcaaaaaggcacattgattccagcacgacaattctggatgtccacggagtggggttgaaaaatttcagcaaaactgcacgcgaattaattcaacgactgcagaaaattgacaatgataactacccagagactctataccaaatgtttatcgtcaatgctggtccgggcttccggttactatggaacactgtgaagtccttccttgatcccaaaacgaccgccaagatacatatagtccaaagtggtggggttcattgtgctcgtcaaattgtaactatttccaatggtgaggaaaaatttattacttacgccaaaccgaagcgccacgcaatgagagggagtgacacatcaactgctgagtctggttcagaagctgatgatgctgtgtcccccaaagctctcagaagttacatatcacatcctaagttgaccccagttcgtgaagaggtcaaaatggtcagggctactagcttttctactcgtgtccctgaatatgatgtacctgttgttgacaaggccgtggatgctacatggaagagagagcaaccacgaaaggcaccatccgtgccccaagatgcagactcatctgtgaaaactgcatccaagccatctggccgcccctgggataagatcgctgcaaatctgatggcttgtcttatggctattgtaatgttggttcgatcaatcaaagatcttgccacaatgagattgtcatctaaaggcgggtcagaagaaagctactgtacattgtacccggactccgtccagaaagaggaattccgtcctccttcgccattccctgggttcgctgaagccgacctattcgccgtggtcttgcaaaggctgggagagcttgaagagaaggtccagatgcttcaagaaaagccttctgaaatgccttgcgagaaagaagagttgcttaacgctgctgtgcgtcgtgtggatgcattggaagctgaactaattgtaacaaagaaggctttgcacgaggctcttatcaggcaagaggaactgctcgcgaacatcgacagcaaggagattgccagggctcagagaaagaagaaaacaatgttctgctactaggacaacacctgcttccgtgaggagatgacaaacgcggcggaccccttcatttttctgacacttgtgaatcaacaggtttccgttgtaaatcaacaaaattctggcataaataaaatgttttttttttaaaaattgcaatcctgagcattgctgcctcctcccggtctcgcaatctggttgttgttagttgcagcataactgcataattggttggttagccgcg

SEQ ID NO: 205057 - DNA, 422 bp, Zea Mays
gaaagaatgcaattctagcagtggatgacttgatagcttttttttccgttgcggctgtaggcatgacctgtaaactactggagactcagaatttggatacataccagttctctatgttggttggtagctttggaagggaccgtgcaagatgaccaagagtgctggccactatttatgcctaagtattgaaagggactagatactgtcattaccttattgccaatttttttagtattttcctttgtaagttgagagcattgtttgtgactattattcttggttgcttgtatagttccatcttgctgatatgtttatactccaaaatgtgggtcagaatgtcttatcagactttattctttattctggttggtatatgctccggcaaactattcaatggaacaatttgggaatattttttcgtc

SEQ ID NO: 205058 - DNA, 2490 bp, Zea Mays
cttcccgagcgtgaaaggaaaccgagaccaccatacccccccgctccgctgctccggaaccctcgccgtgaggtcaccgccgatggccggggactcgtccccttccccggcctccgcacctgtccaggtgcgctgcgctggttgccgtagcatcctcgctgtcggcctcggtgtaactgaattcatctgccccaagtgccgcatggcgcagcgcctcccgccacagctcatggccaagtccacctcgccctcgtcgcctctgcccaaagccccctcgaagccttctctgcctcctacgcagccccggatgggtgcgccgtcggctcagggggtggaccccacgaagatccagctcccctgtgcgggctgccaggccgtcctcaacgtgccccacggtctcgcccgcttccgctgtccgcagtgtggcgtcgaccttgccgtggaccacgccaagctacaaaacttcctcgccgcctccaacagcgccacgtcatcaggccatgccccgacctcggtgaggacgcagccgcctctggcgacattcctctccgtgttgccgctgcagctagtgcctggtgcaacaatttccatggtgctgcctgccgctgaaccacatgaggagatcaatgaggttgccattgatgttgagcgtgatgaagatgaaggtggcactgttggagaaacttttactgactataggccttccaagctatcacttggtctatctcatccagatccagttgtagaaacttcttctctgtcagctgtacaacctcctgaaccaacttactgcttgaatatcatggacgaattagatgagacaaatgcattgtcttgtttgcaaattgaaacaatagtttatgcttgtcagaggcatcttcatcatctccctactggccatagagcaggttttttcattggtgatggggctggcgttggtaagggccgaacaattgctgggttaatctgggaaaattggcagcagggaaggcataaagcagtgtgggtatctgttggttctgacttaaagtatgatgctcgaagagatttggatgatgttggtgctaagtgtgtccaagcaattggttcaatggtgtgggcaagagtttgatggtcttcttgtatttgatgagtgccacaaggccaaaaatctgattcctgatgccggaagccagcccactcgcactggtaaaacagttcttgagatccaggaaaagttgcacgaggctcgggttgtttactgttcagcaactggtgcatcagaaccacgaaatttgggctatatggttcgtcttggactttggggtgaaggaacatcatttcaaacttttccacaatttttaggtgctcttgagaaaggtggtgtgggagcacttgaacttgttgccatggacatgaaagctaggggtatgtatgtatgccgtacattaagttacaaaggggctgatttttatatagtggaggctccacttgaggaaagaatgatgaacatgtacagaagagcagctgaattctgggctgaactgcgccttgaacttttatcagcaagtgaattatttgctgatggcaattcaaatcaaatatggcgattgtattgggccagccatcagcgtttcttcaggcacatgtgcatgtctgcaaaggtacctgctgttgtgaggttagctaaagaggccttggcagagaacaaatgtgtggtgattggccttcagagcactggagaagctagaactgaagaagctgtcacaaaatatggagttgaaatggaagactttgtttctggccctcgggagcttcttcttaagttggtagaagaaaactaccctttacctccaaaacctgattcttttcagcaaggtgaagaaacagtcacagagattcagcgtaaacgtgcactggatgtatcatttaaagggcgagttaggaaagtagcgaaagtggtagatgtgagcgatgacgacaccgatgattattctccatctgagtcagatcatgaatcaacagaatctgatgaggagttccacatgtgtcaaatttgcaacacagaggaggagcagagcctgttgcttcattgttctggttgttctcggcatgttcaccctcattgtctaacaccaccatggactgggacgattacggatgattgggcatgctacacgtgcaagatagtagaagacgaggaaaagaagcaagatgcccatgtagctgattgtttaaagagaatttcactcctcatgtctatgaagagaataccatgctctggtggaaaagatgtagtgatcagttgcatggaattgccagaaaaggactaaactcgcttatcagtctcagcctctggatattgtggaaacactgaaacgtctgtgtttttgacggccttgctccctgccttaatgaagccatcaagagaactgacgaggaaagggacctgtgggtgttaggaggggctacaaacttagatctcttaacagccccatcccaggtcttagg

SEQ ID NO: 205059 - DNA, 3098 bp, Zea Mays
cccatctcgctaactccagtactccaccgctgatattattgcccgtgccgccgtgtgcgctccagtttccactgtgctccttctcgccgactccgccatgaccgcctcgccctacccgacgacgccgtggctgcggccaccgcctcctatggcatttctgagtctcctcctcctccttggctgcctctccccgtcgatctcactggcgggtgcggaggcggcgggggttctgagacaagtggttggtggggacgacggcgggacattcttcgagccgttcaacgtgacctacgaccaccgcgcgcttatccttggcgggaagcgcaggatgctcgtctctgcggggctccactacccgcgtgccacgcccgagatgtggccgagtttgattgcaaagtgcaaggagggcggcgtggatgcaattgagacatatgtgttttggaatgggcatgagccggccaaaggccagtggtttcccagtttggttgcgcgatgtccctgggatagaattccgcactgacaatgaaccctacaaggctgaaatgcagatttttgtgacaaaaattgtagatatcatgaaagaggagaagctttattcttggcaaggtggtcccattatactgcagcagattgaaaatgaatacggtaacattcaaggccattatggtcaagcagggaagagatacatgctatgggcagctcagatggcacttgcacttgatactggtgttccttgggtaatgtgtaggcaaacagatgctccagaacaaattctcaatacttgcaatgccttttactgtgatgggttcaaaccaaattcctacaacaagccaacaatatggactgaggattgggatggatgtattttggtggaaccaattttgagcggacagctggtggtccacttcagataactagctatgattatgatgcaccaattgacgaatacggtatcttaagacaacctaagtgggggcatttgaaagacctacatgcagctattaaactttgtgaatcagctcttactgcagtagatggttcacctcattatgtaaaattagggcccatgcaggaggcacatgtgtattccagtgaaaatgtccacacaaatggaagcatttcaggaaattcacagttttgctcagcttttcttgccaacattgatgaacataaatatgcttcagtctggatttttggaaaatcttatagtctaccaccatggtctgtgagcatactaccagactgtgaaactgtggcttttaatacagccagggttggtacacaaacatcgtttttcaatgtcgaatctgggtcccccagctattcaagtaggcataaacctagaattctatcccttattggtgtcccctatctctcaactacttggtggacttttaaagaacctgttggcatttggggtgaaggcatctttactgctcaggggatattagagcacttaaacgtgacaaaagacatctctgactacctttcatatactaccagggtgaacatttctgaagaggatgttttatattggaattccaaaggttttcttccatcactaaccatagatcaaatccgcgatgtagcacgtgtatttgtaaatgggaagcttgcaggtagtaaagttggtcattgggtctcactgaatcaaccgcttcaattagttcaaggacttaatgagttgacattgttatcggagattgttggcttgcagaactatggtgctttcttggagaaggatggtgctggatttagaggtcaagtaaaactcactggcttgtcgaatggggatatcgaccttactaattctctttggacatatcagattggtttgaaaggtgagttttcaaggatctattctcctgagtatcaaggatctgctgagtggagtagcatgcagaatgatgacacagtttcacccttcacatggttcaagactatgtttgatgctccagaaggtaatggccctgttaccattgatcttgggagcatgggaaagggccaggcttgggtgaatgggcatctcattgggcgctattggtcactagttgcgccagagtccgggtgtccatcgtcatgcaactacgcaggaacatacagtgatagcaagtgccgatcgaactgtggaatcgctacacaaagctggtaccacataccacgcgaatggttgcaagagtcaggcaatctattggtactcttcgaggaaacagggggagacccatctcagatatcgctggaggttcattacaccaagacaatctgctcaaaaatatctgagacttactatcctcccctttctgcctggtcacgtgccgccaacggtcgcccctcagtaaatacggtagcaccagagcttcgcttgcagtgcgatgacgggcatgtgatctcgaagattacatttgcgagttacgggacccctacaggaggttgccagaacttctctgtagggaattgccatgcatcgactactctagacttggtggtagaggcctgcgaaggcaagaacagatgcgcgatcagtgttaccaacgaagtattcggagatccatgccgcaaagtcgtcaaggatttggcagttgaagccgagtgctccccgccatcggttaaccaagaacctcgatacgatatatgatcacggtactgtattgtggtgctcaggtcttggtggacgttgccgcagctttgcagggccgtgcacaatggtcctgcatcgttgtctcctatacctctgcacccatattatatgtaaacagtgacctacatgtaaatctaaagaagaggagggattgaaaagaaatgagatggaaaaggaataaagttgcttttattacaaatggtcattcctgtgaaccgtctggcttactcctgtaagggccattcctttggacttcggtctacttttgtttccctgttgacacttcttccacctgtaggcggtcgaccaaccgctggtggtggtgatgcccttttgattgagcccatgtgcattctcctggctcggcgtggacagaggaaaggaaaaaatttattccgaattattgccatagtttcgtttctaaaatgggacaccttaaccttttaactcttgaacccat

SEQ ID NO: 205060 - DNA, 3130 bp, Zea Mays
gatattattgcccgtgccgccgtgtgcgctccagtttccactgtgctccttctcgccgactccgccatgaccgcctcgccctacccgacgacgccgtggctgcggccaccgcctcctatggcatttctgagtctcctcctcctccttggctgcctctccccgtcgatctcactggcgggtgcggaggcggcgggggttctgagacaagtggttggtggggacgacggcgggacattcttcgagccgttcaacgtgacctacgaccaccgcgcgcttatccttggcgggaagcgcaggatgctcgtctctgcggggctccactacccgcgtgccacgcccgagatgtggccgagtttgattgcaaagtgcaaggagggcggcgtggatgcaattgagacatatgtgttttggaatgggcatgagccggccaaaggccagtattacttcgaaggaagatttgatattgtcaggtttgctaagctggttgcagctgaaggtctatttctttttctgcgaatcggcccatatgcttgtgctgaatggaatttcggtggtttcccagtttggttgcgcgatgtccctgggatagaattccgcactgacaatgaaccctacaaggctgaaatgcagatttttgtgacaaaaattgtagatatcatgaaagaggagaagctttattcttggcaaggtggtcccattatactgcagcagattgaaaatgaatacggtaacattcaaggccattatggtcaagcagggaagagatacatgctatgggcagctcagatggcacttgcacttgatactggtgttccttgggtaatgtgtaggcaaacagatgctccagaacaaattctcaatacttgcaatgccttttactgtgatgggttcaaaccaaattcctacaacaagccaacaatatggactgaggattgggatggatggtatgccgactggggcgaatcattgccacataggcctgctcaagacagtgcttttgctgttgctcgtttttatcaacgtggtggaagcttacaaaattattacatgtattttggtggaaccaattttgagcggacagctggtggtccacttcagataactagctatgattatgatgcaccaattgacgaatacggtatcttaagacaacctaagtgggggcatttgaaagacctacatgcagctattaaactttgtgaatcagctcttactgcagtagatggttcacctcattatgtaaaattagggcccatgcaggaggcacatgtgtattccagtgaaaatgtccacacaaatggaagcatttcaggaaattcacagttttgctcagcttttcttgccaacattgatgaacataaatatgcttcagtctggatttttggaaaatcttatagtctaccaccatggtctgtgagcatactaccagactgtgaaactgtggcttttaatacagccagggttggtacacaaacatcgtttttcaatgtcgaatctgggtcccccagctattcaagtaggcataaacctagaattctatcccttattggtgtcccctatctctcaactacttggtggacttttaaagaacctgttggcatttggggtgaaggcatctttactgctcaggggatattagagcacttaaacgtgacaaaagacatctctgactacctttcatatactaccagggtgaacatttctgaagaggatgttttatattggaattccaaaggttttcttccatcactaaccatagatcaaatccgcgatgtagcacgtgtatttgtaaatgggaagcttgcaggtagtaaagttggtcattgggtctcactgaatcaaccgcttcaattagttcaaggacttaatgagttgacattgttatcggagattgttggcttgcagaactatggtgctttcttggagaaggatggtgctggatttagaggtcaagtaaaactcactggcttgtcgaatggggatatcgaccttactaattctctttggacatatcagattggtttgaaaggtgagttttcaaggatctattctcctgagtatcaaggatctgctgagtggagtagcatgcagaatgatgacacagtttcacccttcacatggttcaagactatgtttgatgctccagaagttgcgccagagtccgggtgtccatcgtcatgcaactacgcaggaacatacagtgatagcaagtgccgatcgaactgtggaatcgctacacaaagctggtaccacataccacgcgaatggttgcaagagtcaggcaatctattggtactcttcgaggaaacagggggagacccatctcagatatcgctggaggttcattacaccaagacaatctgctcaaaaatatctgagacttactatcctcccctttctgcctggtcacgtgccgccaacggtcgcccctcagtaaatacggtagcaccagagcttcgcttgcagtgcgatgacgggcatgtgatctcgaagattacatttgcgagttacgggacccctacaggaggttgccagaacttctctgtagggaattgccatgcatcgactactctagacttggtggtagaggcctgcgaaggcaagaacagatgcgcgatcagtgttaccaacgaagtattcggagatccatgccgcaaagtcgtcaaggatttggcagttgaagccgagtgctccccgccatcggttaaccaagaacctcgatacgatatatgatcacggtactgtattgtggtgctcaggtcttggtggacgttgccgcagctttgcagggccgtgcacaatggtcctgcatcgttgtctcctatacctctgcacccatattatatgtaaacagtgacctacatgtaaatctaaagaagaggagggattgaaaagaaatgagatggaaaaggaataaagttgcttttattacaaatggtcattcctgtgaaccgtctggcttactcctgcggtcgaccaaccgctggtggtggtgatgcccttttgattgagcccatgtgcattctcctggctcggcgtggacagaggaaaggaaaaaatttattccgaattattgccatagtttcgtttctaaaatgggacaccttaaccttttaactcttgaacccat

SEQ ID NO: 205061 - DNA, 3177 bp, Zea Mays
attattgcccgtgccgccgtgtgcgctccagtttccactgtgctccttctcgccgactccgccatgaccgcctcgccctacccgacgacgccgtggctgcggccaccgcctcctatggcatttctgagtctcctcctcctccttggctgcctctccccgtcgatctcactggcgggtgcggaggcggcgggggttctgagacaagtggttggtggggacgacggcgggacattcttcgagccgttcaacgtgacctacgaccaccgcgcgcttatccttggcgggaagcgcaggatgctcgtctctgcggggctccactacccgcgtgccacgcccgagatgtggccgagtttgattgcaaagtgcaaggagggcggcgtggatgcaattgagacatatgtgttttggaatgggcatgagccggccaaaggccagtattacttcgaaggaagatttgatattgtcaggtttgctaagctggttgcagctgaaggtctatttctttttctgcgaatcggcccatatgcttgtgctgaatggaatttcggtggtttcccagtttggttgcgcgatgtccctgggatagaattccgcactgacaatgaaccctacaaggctgaaatgcagatttttgtgacaaaaattgtagatatcatgaaagaggagaagctttattcttggcaaggtggtcccattatactgcagcagattgaaaatgaatacggtaacattcaaggccattatggtcaagcagggaagagatacatgctatgggcagctcagatggcacttgcacttgatactggtgttccttgggtaatgtgtaggcaaacagatgctccagaacaaattctcaatacttgcaatgccttttactgtgatgggttcaaaccaaattcctacaacaagccaacaatatggactgaggattgggatggatgtattttggtggaaccaattttgagcggacagctggtggtccacttcagataactagctatgattatgatgcaccaattgacgaatacggtatcttaagacaacctaagtgggggcatttgaaagacctacatgcagctattaaactttgtgaatcagctcttactgcagtagatggttcacctcattatgtaaaattagggcccatgcaggaggcacatgtgtattccagtgaaaatgtccacacaaatggaagcatttcaggaaattcacagttttgctcagcttttcttgccaacattgatgaacataaatatgcttcagtctggatttttggaaaatcttatagtctaccaccatggtctgtgagcatactaccagactgtgaaactgtggcttttaatacagccagggttggtacacaaacatcgtttttcaatgtcgaatctgggtcccccagctattcaagtaggcataaacctagaattctatcccttattggtgtcccctatctctcaactacttggtggacttttaaagaacctgttggcatttggggtgaaggcatctttactgctcaggggatattagagcacttaaacgtgacaaaagacatctctgactacctttcatatactaccagggtgaacatttctgaagaggatgttttatattggaattccaaaggttttcttccatcactaaccatagatcaaatccgcgatgtagcacgtgtatttgtaaatgggaagcttgcaggtagtaaagttggtcattgggtctcactgaatcaaccgcttcaattagttcaaggacttaatgagttgacattgttatcggagattgttggcttgcagaactatggtgctttcttggagaaggatggtgctggatttagaggtcaagtaaaactcactggcttgtcgaatggggatatcgaccttactaattctctttggacatatcagattggtttgaaaggtgagttttcaaggatctattctcctgagtatcaaggatctgctgagtggagtagcatgcagaatgatgacacagtttcacccttcacatggttcaagactatgtttgatgctccagaaggtaatggccctgttaccattgatcttgggagcatgggaaagggccaggcttgggtgaatgggcatctcattgggcgctattggtcactagttgcgccagagtccgggtgtccatcgtcatgcaactacgcaggaacatacagtgatagcaagtgccgatcgaactgtggaatcgctacacaaagctggtaccacataccacgcgaatggttgcaagagtcaggcaatctattggtactcttcgaggaaacagggggagacccatctcagatatcgctggaggttcattacaccaagacaatctgctcaaaaatatctgagacttactatcctcccctttctgcctggtcacgtgccgccaacggtcgcccctcagtaaatacggtagcaccagagcttcgcttgcagtgcgatgacgggcatgtgatctcgaagattacatttgcgagttacgggacccctacaggaggttgccagaacttctctgtagggaattgccatgcatcgactactctagacttggtggtagaggcctgcgaaggcaagaacagatgcgcgatcagtgttaccaacgaagtattcggagatccatgccgcaaagtcgtcaaggatttggcagttgaagccgagtgctccccgccatcggttaaccaagaacctcgatacgatatatgatcacggtactgtattgtggtgctcaggtcttggtggacgttgccgcagctttgcagggccgtgcacaatggtcctgcatcgttgtctcctatacctctgcacccatattatatgtaaacagtgacctacatgtaaatctaaagaagaggagggattgaaaagaaatgagatggaaaaggaataaagttgcttttattacaaatggtcattcctgtgaaccgtctggcttactcctgtaagggccattcctttggacttcggtctacttttgtttccctgttgacacttcttccacctgtaggcggtcgaccaaccgctggtggtggtgatgcccttttgattgagcccatgtgcattctcctggctcggcgtggacagaggaaaggaaaaaatttattccgaattattgccatagtttcgtttctaaaatgggacaccttaaccttttaactcttgaacccat

SEQ ID NO: 205062 - DNA, 2792 bp, Zea Mays
gtatgaacaaggagaaaatcgaaaagaatctgcatctgctagtcaccttcagatgagtggtttcccagtttggttgcgcgatgtccctgggatagaattccgcactgacaatgaaccctacaaggctgaaatgcagatttttgtgacaaaaattgtagatatcatgaaagaggagaagctttattcttggcaaggtggtcccattatactgcagcagattgaaaatgaatacggtaacattcaaggccattatggtcaagcagggaagagatacatgctatgggcagctcagatggcacttgcacttgatactggtgttccttgggtaatgtgtaggcaaacagatgctccagaacaaattctcaatacttgcaatgccttttactgtgatgggttcaaaccaaattcctacaacaagccaacaatatggactgaggattgggatggatggtatgccgactggggcgaatcattgccacataggcctgctcaagacagtgcttttgctgttgctcgtttttatcaacgtggtggaagcttacaaaattattacatgtattttggtggaaccaattttgagcggacagctggtggtccacttcagataactagctatgattatgatgcaccaattgacgaatacggtatcttaagacaacctaagtgggggcatttgaaagacctacatgcagctattaaactttgtgaatcagctcttactgcagtagatggttcacctcattatgtaaaattagggcccatgcaggaggcacatgtgtattccagtgaaaatgtccacacaaatggaagcatttcaggaaattcacagttttgctcagcttttcttgccaacattgatgaacataaatatgcttcagtctggatttttggaaaatcttatagtctaccaccatggtctgtgagcatactaccagactgtgaaactgtggcttttaatacagccagggttggtacacaaacatcgtttttcaatgtcgaatctgggtcccccagctattcaagtaggcataaacctagaattctatcccttattggtgtcccctatctctcaactacttggtggacttttaaagaacctgttggcatttggggtgaaggcatctttactgctcaggggatattagagcacttaaacgtgacaaaagacatctctgactacctttcatatactaccagggtgaacatttctgaagaggatgttttatattggaattccaaaggttttcttccatcactaaccatagatcaaatccgcgatgtagcacgtgtatttgtaaatgggaagcttgcaggtagtaaagttggtcattgggtctcactgaatcaaccgcttcaattagttcaaggacttaatgagttgacattgttatcggagattgttggcttgcagaactatggtgctttcttggagaaggatggtgctggatttagaggtcaagtaaaactcactggcttgtcgaatggggatatcgaccttactaattctctttggacatatcagattggtttgaaaggtgagttttcaaggatctattctcctgagtatcaaggatctgctgagtggagtagcatgcagaatgatgacacagtttcacccttcacatggttcaagactatgtttgatgctccagaaggtaatggccctgttaccattgatcttgggagcatgggaaagggccaggcttgggtgaatgggcatctcattgggcgctattggtcactagttgcgccagagtccgggtgtccatcgtcatgcaactacgcaggaacatacagtgatagcaagtgccgatcgaactgtggaatcgctacacaaagctggtaccacataccacgcgaatggttgcaagagtcaggcaatctattggtactcttcgaggaaacagggggagacccatctcagatatcgctggaggttcattacaccaagacaatctgctcaaaaatatctgagacttactatcctcccctttctgcctggtcacgtgccgccaacggtcgcccctcagtaaatacggtagcaccagagcttcgcttgcagtgcgatgacgggcatgtgatctcgaagattacatttgcgagttacgggacccctacaggaggttgccagaacttctctgtagggaattgccatgcatcgactactctagacttggtggtagaggcctgcgaaggcaagaacagatgcgcgatcagtgttaccaacgaagtattcggagatccatgccgcaaagtcgtcaaggatttggcagttgaagccgagtgctccccgccatcggttaaccaagaacctcgatacgatatatgatcacggtactgtattgtggtgctcaggtcttggtggacgttgccgcagctttgcagggccgtgcacaatggtcctgcatcgttgtctcctatacctctgcacccatattatatgtaaacagtgacctacatgtaaatctaaagaagaggagggattgaaaagaaatgagatggaaaaggaataaagttgcttttattacaaatggtcattcctgtgaaccgtctggcttactcctgtaagggccattcctttggacttcggtctacttttgtttccctgttgacacttcttccacctgtaggcggtcgaccaaccgctggtggtggtgatgcccttttgattgagcccatgtgcattctcctggctcggcgtggacagaggaaaggaaaaaatttattccgaattattgccatagtttcgtttctaaaatgggacaccttaaccttttaactcttgaacccat

SEQ ID NO: 205063 - DNA, 2834 bp, Zea Mays
agcagagtagcagactccagagtccagacgcagatttcctcaagaactcaggataggaaggaggaggaaaggaggagtcggccagctagattgaagaagtggtttcccagtttggttgcgcgatgtccctgggatagaattccgcactgacaatgaaccctacaaggctgaaatgcagatttttgtgacaaaaattgtagatatcatgaaagaggagaagctttattcttggcaaggtggtcccattatactgcagcagattgaaaatgaatacggtaacattcaaggccattatggtcaagcagggaagagatacatgctatgggcagctcagatggcacttgcacttgatactggtgttccttgggtaatgtgtaggcaaacagatgctccagaacaaattctcaatacttgcaatgccttttactgtgatgggttcaaaccaaattcctacaacaagccaacaatatggactgaggattgggatggatggtatgccgactggggcgaatcattgccacataggcctgctcaagacagtgcttttgctgttgctcgtttttatcaacgtggtggaagcttacaaaattattacatgtattttggtggaaccaattttgagcggacagctggtggtccacttcagataactagctatgattatgatgcaccaattgacgaatacggtatcttaagacaacctaagtgggggcatttgaaagacctacatgcagctattaaactttgtgaatcagctcttactgcagtagatggttcacctcattatgtaaaattagggcccatgcaggaggcacatgtgtattccagtgaaaatgtccacacaaatggaagcatttcaggaaattcacagttttgctcagcttttcttgccaacattgatgaacataaatatgcttcagtctggatttttggaaaatcttatagtctaccaccatggtctgtgagcatactaccagactgtgaaactgtggcttttaatacagccagggttggtacacaaacatcgtttttcaatgtcgaatctgggtcccccagctattcaagtaggcataaacctagaattctatcccttattggtgtcccctatctctcaactacttggtggacttttaaagaacctgttggcatttggggtgaaggcatctttactgctcaggggatattagagcacttaaacgtgacaaaagacatctctgactacctttcatatactaccagggtgaacatttctgaagaggatgttttatattggaattccaaaggttttcttccatcactaaccatagatcaaatccgcgatgtagcacgtgtatttgtaaatgggaagcttgcaggtagtaaagttggtcattgggtctcactgaatcaaccgcttcaattagttcaaggacttaatgagttgacattgttatcggagattgttggcttgcagaactatggtgctttcttggagaaggatggtgctggatttagaggtcaagtaaaactcactggcttgtcgaatggggatatcgaccttactaattctctttggacatatcagattggtttgaaaggtgagttttcaaggatctattctcctgagtatcaaggatctgctgagtggagtagcatgcagaatgatgacacagtttcacccttcacatggttcaagactatgtttgatgctccagaaggtaatggccctgttaccattgatcttgggagcatgggaaagggccaggcttgggtgaatgggcatctcattgggcgctattggtcactagttgcgccagagtccgggtgtccatcgtcatgcaactacgcaggaacatacagtgatagcaagtgccgatcgaactgtggaatcgctacacaaagctggtaccacataccacgcgaatggttgcaagagtcaggcaatctattggtactcttcgaggaaacagggggagacccatctcagatatcgctggaggttcattacaccaagacaatctgctcaaaaatatctgagacttactatcctcccctttctgcctggtcacgtgccgccaacggtcgcccctcagtaaatacggtagcaccagagcttcgcttgcagtgcgatgacgggcatgtgatctcgaagattacatttgcgagttacgggacccctacaggaggttgccagaacttctctgtagggaattgccatgcatcgactactctagacttggtggtagaggcctgcgaaggcaagaacagatgcgcgatcagtgttaccaacgaagtattcggagatccatgccgcaaagtcgtcaaggatttggcagttgaagccgagtgctccccgccatcggttaaccaagaacctcgatacgatatatgatcacggtactgtattgtggtgctcaggtcttggtggacgttgccgcagctttgcagggccgtgcacaatggtcctgcatcgttgtctcctatacctctgcacccatattatatgtaaacagtgacctacatgtaaatctaaagaagaggagggattgaaaagaaatgagatggaaaaggaataaagttgcttttattacaaatggtcattcctgtgaaccgtctggcttactcctgtaagggccattcctttggacttcggtctacttttgtttccctgttgacacttcttccacctgtaggcggtcgaccaaccgctggtggtggtgatgcccttttgattgagcccatgtgcattctcctggctcggcgtggacagaggaaaggaaaaaatttattccgaattattgccatagtttcgtttctaaaatgggacaccttaaccttttaactcttgaacccat

SEQ ID NO: 205064 - DNA, 2686 bp, Zea Mays
cttgacattcttccctctgcgggagatgctccttcaatcagtggtttcccagtttggttgcgcgatgtccctgggatagaattccgcactgacaatgaaccctacaaggctgaaatgcagatttttgtgacaaaaattgtagatatcatgaaagaggagaagctttattcttggcaaggtggtcccattatactgcagcagattgaaaatgaatacggtaacattcaaggccattatggtcaagcagggaagagatacatgctatgggcagctcagatggcacttgcacttgatactggtgttccttgggtaatgtgtaggcaaacagatgctccagaacaaattctcaatacttgcaatgccttttactgtgatgggttcaaaccaaattcctacaacaagccaacaatatggactgaggattgggatggatggtatgccgactggggcgaatcattgccacataggcctgctcaagacagtgcttttgctgttgctcgtttttatcaacgtggtggaagcttacaaaattattacatgtattttggtggaaccaattttgagcggacagctggtggtccacttcagataactagctatgattatgatgcaccaattgacgaatacggtatcttaagacaacctaagtgggggcatttgaaagacctacatgcagctattaaactttgtgaatcagctcttactgcagtagatggttcacctcattatgtaaaattagggcccatgcaggaggcacatgtgtattccagtgaaaatgtccacacaaatggaagcatttcaggaaattcacagttttgctcagcttttcttgccaacattgatgaacataaatatgcttcagtctggatttttggaaaatcttatagtctaccaccatggtctgtgagcatactaccagactgtgaaactgtggcttttaatacagccagggttggtacacaaacatcgtttttcaatgtcgaatctgggtcccccagctattcaagtaggcataaacctagaattctatcccttattggtgtcccctatctctcaactacttggtggacttttaaagaacctgttggcatttggggtgaaggcatctttactgctcaggggatattagagcacttaaacgtgacaaaagacatctctgactacctttcatatactaccagggtgaacatttctgaagaggatgttttatattggaattccaaaggttttcttccatcactaaccatagatcaaatccgcgatgtagcacgtgtatttgtaaatgggaagcttgcaggtagtaaagttggtcattgggtctcactgaatcaaccgcttcaattagttcaaggacttaatgagttgacattgttatcggagattgttggcttgcagaactatggtgctttcttggagaaggatggtgctggatttagaggtcaagtaaaactcactggcttgtcgaatggggatatcgaccttactaattctctttggacatatcagattggtttgaaaggtgagttttcaaggatctattctcctgagtatcaaggatctgctgagtggagtagcatgcagaatgatgacacagtttcacccttcacatggttcaagactatgtttgatgctccagaagttgcgccagagtccgggtgtccatcgtcatgcaactacgcaggaacatacagtgatagcaagtgccgatcgaactgtggaatcgctacacaaagctggtaccacataccacgcgaatggttgcaagagtcaggcaatctattggtactcttcgaggaaacagggggagacccatctcagatatcgctggaggttcattacaccaagacaatctgctcaaaaatatctgagacttactatcctcccctttctgcctggtcacgtgccgccaacggtcgcccctcagtaaatacggtagcaccagagcttcgcttgcagtgcgatgacgggcatgtgatctcgaagattacatttgcgagttacgggacccctacaggaggttgccagaacttctctgtagggaattgccatgcatcgactactctagacttggtggtagaggcctgcgaaggcaagaacagatgcgcgatcagtgttaccaacgaagtattcggagatccatgccgcaaagtcgtcaaggatttggcagttgaagccgagtgctccccgccatcggttaaccaagaacctcgatacgatatatgatcacggtactgtattgtggtgctcaggtcttggtggacgttgccgcagctttgcagggccgtgcacaatggtcctgcatcgttgtctcctatacctctgcacccatattatatgtaaacagtgacctacatgtaaatctaaagaagaggagggattgaaaagaaatgagatggaaaaggaataaagttgcttttattacaaatggtcattcctgtgaaccgtctggcttactcctgtaagggccattcctttggacttcggtctacttttgtttccctgttgacacttcttccacctgtaggcggtcgaccaaccgctggtggtggtgatgcccttttgattgagcccatgtgcattctcctggctcggcgtggacagaggaaaggaaaaaatttattccgaattattgccatagtttcgtttctaaaatgggacaccttaaccttttaactcttgaacccat

SEQ ID NO: 205065 - DNA, 1669 bp, Zea Mays
aatggttgctgcctccttggcggtggcggtggccagcagcctgcacagcggcaagatgagtacatcgtctgaagggtgaacatttctgaagaggatgttttatattggaattccaaaggttttcttccatcactaaccatagatcaaatccgcgatgtagcacgtgtatttgtaaatgggaagcttgcaggtagtaaagttggtcattgggtctcactgaatcaaccgcttcaattagttcaaggacttaatgagttgacattgttatcggagattgttggcttgcagaactatggtgctttcttggagaaggatggtgctggatttagaggtcaagtaaaactcactggcttgtcgaatggggatatcgaccttactaattctctttggacatatcagattggtttgaaaggtgagttttcaaggatctattctcctgagtatcaaggatctgctgagtggagtagcatgcagaatgatgacacagtttcacccttcacatggttcaagactatgtttgatgctccagaaggtaatggccctgttaccattgatcttgggagcatgggaaagggccaggcttgggtgaatgggcatctcattgggcgctattggtcactagttgcgccagagtccgggtgtccatcgtcatgcaactacgcaggaacatacagtgatagcaagtgccgatcgaactgtggaatcgctacacaaagctggtaccacataccacgcgaatggttgcaagagtcaggcaatctattggtactcttcgaggaaacagggggagacccatctcagatatcgctggaggttcattacaccaagacaatctgctcaaaaatatctgagacttactatcctcccctttctgcctggtcacgtgccgccaacggtcgcccctcagtaaatacggtagcaccagagcttcgcttgcagtgcgatgacgggcatgtgatctcgaagattacatttgcgagttacgggacccctacaggaggttgccagaacttctctgtagggaattgccatgcatcgactactctagacttggtggtagaggcctgcgaaggcaagaacagatgcgcgatcagtgttaccaacgaagtattcggagatccatgccgcaaagtcgtcaaggatttggcagttgaagccgagtgctccccgccatcggttaaccaagaacctcgatacgatatatgatcacggtactgtattgtggtgctcaggtcttggtggacgttgccgcagctttgcagggccgtgcacaatggtcctgcatcgttgtctcctatacctctgcacccatattatatgtaaacagtgacctacatgtaaatctaaagaagaggagggattgaaaagaaatgagatggaaaaggaataaagttgcttttattacaaatggtcattcctgtgaaccgtctggcttactcctgtaagggccattcctttggacttcggtctacttttgtttccctgttgacacttcttccacctgtaggcggtcgaccaaccgctggtggtggtgatgcccttttgattgagcccatgtgcattctcctggctcggcgtggacagaggaaaggaaaaaatttattccgaattattgccatagtttcgtttctaaaatgggacaccttaaccttttaactcttgaacccat

SEQ ID NO: 205066 - DNA, 1631 bp, Zea Mays
tgatacgtgaccaaagtcttctgtctcagactattgggtgaacatttctgaagaggatgttttatattggaattccaaaggttttcttccatcactaaccatagatcaaatccgcgatgtagcacgtgtatttgtaaatgggaagcttgcaggtagtaaagttggtcattgggtctcactgaatcaaccgcttcaattagttcaaggacttaatgagttgacattgttatcggagattgttggcttgcagaactatggtgctttcttggagaaggatggtgctggatttagaggtcaagtaaaactcactggcttgtcgaatggggatatcgaccttactaattctctttggacatatcagattggtttgaaaggtgagttttcaaggatctattctcctgagtatcaaggatctgctgagtggagtagcatgcagaatgatgacacagtttcacccttcacatggttcaagactatgtttgatgctccagaaggtaatggccctgttaccattgatcttgggagcatgggaaagggccaggcttgggtgaatgggcatctcattgggcgctattggtcactagttgcgccagagtccgggtgtccatcgtcatgcaactacgcaggaacatacagtgatagcaagtgccgatcgaactgtggaatcgctacacaaagctggtaccacataccacgcgaatggttgcaagagtcaggcaatctattggtactcttcgaggaaacagggggagacccatctcagatatcgctggaggttcattacaccaagacaatctgctcaaaaatatctgagacttactatcctcccctttctgcctggtcacgtgccgccaacggtcgcccctcagtaaatacggtagcaccagagcttcgcttgcagtgcgatgacgggcatgtgatctcgaagattacatttgcgagttacgggacccctacaggaggttgccagaacttctctgtagggaattgccatgcatcgactactctagacttggtggtagaggcctgcgaaggcaagaacagatgcgcgatcagtgttaccaacgaagtattcggagatccatgccgcaaagtcgtcaaggatttggcagttgaagccgagtgctccccgccatcggttaaccaagaacctcgatacgatatatgatcacggtactgtattgtggtgctcaggtcttggtggacgttgccgcagctttgcagggccgtgcacaatggtcctgcatcgttgtctcctatacctctgcacccatattatatgtaaacagtgacctacatgtaaatctaaagaagaggagggattgaaaagaaatgagatggaaaaggaataaagttgcttttattacaaatggtcattcctgtgaaccgtctggcttactcctgtaagggccattcctttggacttcggtctacttttgtttccctgttgacacttcttccacctgtaggcggtcgaccaaccgctggtggtggtgatgcccttttgattgagcccatgtgcattctcctggctcggcgtggacagaggaaaggaaaaaatttattccgaattattgccatagtttcgtttctaaaatgggacaccttaaccttttaactcttgaacccat

SEQ ID NO: 205067 - DNA, 2429 bp, Zea Mays
aagtctagtagtactagcagtagattaccaccgctcgcctcgtcgactcctcgtccccgcaccgccggcctgacatcgcgtcgcgtgccaaagccgacgcgcacaaaagcaacgaaagcgaaagcaaagcggccaccaccggcctccccggcagcccggctccccctcgctgtcctccctccacccatcacaattcacaccgaagcccgagcgggagcggccattttctctcgtctcgtcttctcgtcccctaaaatgagaaacctagtactgctgctatagaagtcaagtcactcgactcgcccgcgtgcccaaccaatcacacggccgcgctcgagacgagaggcgcccacggaaacggagcctcctatgccaccgggcgccgcggctgtcgccgccacctcgcaacaggccgactgctgcggacacgggcccgggcccgggcccagctggcgcggtggcggcggctgcgatgtccccggcggcgcgtcctgcagctacctgccgctgcgcaagcggctgtccgttgacggcaagttcccggcgccgcggatatgcatctgggagtgcgacggcgaggccggggacatcacctgcgatatcgtcgccgctccgatccgccgcagctgcagcgcgagggcaatgccgccgccgccggcggcctcgctcttccgccggatgatgaccccgccgccctcgcggcccaggccgccgcagagggaggtggaggatgctgtggcggctaggaggcccggggagaccatctccaagggccaccggagctacggtctcatgcttaacctgcagcttggcgtaagctattcggtggggaagtcatcggcgctgccgttcaggaagctctcgtcatcagacttcgacccgcgggagaaggtgtggacgcggttcccgccagaggggtccaagctcacgccgccgcatcactccgtggatttccggtggaaggactactgccccgcagtattcaggcacctgaggaagctgttcggggtggatcctgcggactacatgctcgccatctgcgggagcgacacgcttcgcgagctggcgtcaccaggcaagagtgggagctgcttcttcgttacacaggacgatagattcatgattaaaaccgtgaagaaggcagaaatgaaggtcctaattaggatgctgaggagttactatgaacatgtttgtcggtacaagtccactttgttgacaaggttctatggcacacattgcatcaagcaagctggatgtcccaaggtccggttcattataatgggcaatttttgctgctcggagtataagatccatagacgttttgatttgaaaggctcatcacatggtcgtactattgataaggcggaagagaagatcgatgaagcaactactctaaaggacctggaccttgattatgcattccacctacagagattttggtatgacgagctgatgaggcaaattcagatggactgcacattcttagagacacaaggaattatggactacagcttgttgctaggagttcactttcgtgatgatttctcaatgtctaaaataggtgtatctcagtttattggtttgccaaaatccacaggcaaaagaaaatcatttgaaggtggaggcgatgtttgtgagctttgctttacggaatctggatgcaaggacagagatttcattgttgactctcggaaaccactggtccagttaggcaagaacatgcctgcccaggcagagcggaggtcgaagagagtcctggataagtttctcctaaacgaaagacacttgtttataaccacatcaagtggcggattccaggatgtctatctcttctttggaataattgacattctacaagactacgacataaccaagaagctcgagcatgcatacaagtcctttcaggtcaaccctggttgcatttctgccgtagacccaaagttgtactcgagaagattccaagagttcagtcgcagagtgttcatcagagaacattaaagaacaatttgtccagcgggtgactgctccactggcattttacatcatgggatccattggtgaagtcctggggtatgatggtttcaccgatcccgagcgtgccctggaacagtggaaaggatggtcggtttacccgacgcatagttttctgaataattggcgtcgagggaggaggagcactgccgacacgcatgctaatgctgaaaggatgcgagctaaaactgtagagctttgccttttcaaggacttgtaaaatgactgtttggatgaatgaattcctgaggcagccatgttcttttgttcagaaaagaagctggaccgtagacattgttgccttctttgcaagcatttgcagtcgcaggttggtatcttttcgctcgccctcgcccctgctctgggtctggctgaccacggtggtgactggagtctgg

SEQ ID NO: 205068 - DNA, 987 bp, Zea Mays
aaaacaataatttgtaaacatgacccttacactagatcttagaaactctctctctaaacaaaaggcaccctgtttcccgttcgtgagaaattcctcgcagacacgggcgcgcctactcaaccgaggccaacaagtcaaggcgagtgcggagtagaggcacaaggtcggatgcctagagagatttcccggtcgcctccgccattccgccggcgaggctcccctcctttgcggtacgctagccggagaaacagacgagatcggagccgctccccttacgcctctcggcgtcaaaaggaagctgaatttaagttactggaagaggagcttgctagaagggtcgaagaagctataagaaaaaatgtcgaggaacgtctgaaatctgaagaggtgaaacgtgacatagaacaccgaattgaggagggtattagaaagttatttgatgaggttgacgctcagctacaaaaagagaaagcagtggccctttatgaggccaggcagaaagcagagcaagaaagaagagagagggaggagttggatagaatgctcgaagagaacaggcgtaaagtggaggaagcacaaagaaaggaagctcttgagcagcagcagaaagagttggaacgatatttggagctggaaaggatacaaaggcaaagagaggaagcgttgcgcagaaagaaaatggaggaggaagaagagagagccaacaagctgagattgctggggaaaaaccggggttgagaactgtcatctttatatacacagcggtctatgtgccgtggttgcccccatttgacttgttagttgttgccttaccagtgcgagaacttttgtttgatgtacgaacatgaaaatggtcatgtatgacatctatgaatggaacctgtagcttattctttgagtacgttttaagacaggttatttggattcctcaatgttttgctctgccatgcttaagaattttttaaatgcctagtctggtgcacaagg

SEQ ID NO: 205069 - DNA, 1100 bp, Zea Mays
aaaacaataatttgtaaacatgacccttacactagatcttagaaactctctctctaaacaaaaggcaccctgtttcccgttcgtgagaaattcctcgcagacacgggcgcgcctactcaaccgaggccaacaagtcaaggcgagtgcggagtagaggcacaaggtcggatgcctagagagatttcccggtcgcctccgccattccgccggcgaggctcccctcctttgcggtacgctagccggagaaacagacgagatcggagccgctccccttacgcctctcggcgaaaaactcgttctccttctccactatgggataggagcaactcaccaagtccaagaaggcatagaagcccactatctccaaggagacacagaagacagagaagtcggagcactacaagttcattagagaataacccatccagtccaagtcacgcatcagagaaaataaattcctctgtaaaacaaaggctggaagaagaaaagaaaaggcgtcaaaaggaagctgaatttaagttactggaagaggagcttgctagaagggtcgaagaagctataagaaaaaatgtcgaggaacgtctgaaatctgaagaggtgaaacgtgacatagaacaccgaattgaggagggtattagaaagagttggatagaatgctcgaagagaacaggcgtaaagtggaggaagcacaaagaaaggaagctcttgagcagcagcagaaagagttggaacgatatttggagctggaaaggatacaaaggcaaagagaggaagcgttgcgcagaaagaaaatggaggaggaagaagagagagccaacaagctgagattgctggggaaaaaccggggttgagaactgtcatctttatatacacagcggtctatgtgccgtggttgcccccatttgacttgttagttgttgccttaccagtgcgagaacttttgtttgatgtacgaacatgaaaatggtcatgtatgacatctatgaatggaacctgtagcttattctttgagtacgttttaagacaggttatttggattcctcaatgttttgctctgccatgcttaagaattttttaaatgcctagtctggtgcacaagg

SEQ ID NO: 205070 - DNA, 1036 bp, Zea Mays
ccgacaggaaacaggggcagctgccagctagccatactggttgccaaggacccatctggcaaggatatcaatgctcttgagcagcacatcaagaacctcctcagcccatccaccccgttcttcttcaacaccctgtacgacccctaccgtgagggtgctgactttgtgcgtggataccccttcagcctcagggagggtgctcacaccgccgtctcccacggcctgtggctgaacatccctgactatgatgctcccacacagctggtcaagcccaaggagaggaatgagagggatctcattggccctgctatgtactttggtctcatgggtgatggccagcccatcggtcgctacgacgacatgtgggcaggatggtgtgtgaaggtcatctgcgaccacctgagcctgggagtcaagactggcctgccatacatctggcacagcaaggctagcaaccccttcgttaacttgaagaaggaatacaagggcatcttctggcaggaggacatcatccccttcttccagaacgtgaccatccccaaggactgcgacaccgtccaaaagtgctacatctacctctctggacaagtgaaggagaagctgggcacgattgacccctactttgtcaagctcggtgacgccatggtcacctggatcgaggcctgggatgagctgaacccgtcgacccctgccgccgcaaatggcaaggccaagtagatgtgccatcacttcggcactggagtgaaaaagaaagtatgattgggtcctgcctaggccccatagatatagctcttttttgagaaggaagagagattaattcagcagcagcttttataaattctttgttgtcatgaagcaggtggttcttttgtagttgatgaaagggatttgtcgtcgctatcgtttacataattcagacaataattttatattgtgtaattctgagaatcaaagcactgtttgtgttatagcatatctaagaatgagcattgctgttgtttttgtctactgttgccaaggcgatagttgacatctc

SEQ ID NO: 205071 - DNA, 3435 bp, Zea Mays
atttgctcaaaaagaaaaggttcatgcattgctcggcttcactcatggttcacatgttctagtattattggggaacaaaggtgtctgaactcggagctatggcatgcatgcgcagggccccttgtgtcccttcctgtggttgggagccgggtcgtctactttccccagggccatagtgagcaggttgctgcatcaactaataaagaagttgacgctcagatcccaaactacccaaacctacctccacaattaatctgccagcttcataatgtcacaatgcatgctgatgcagagactggagaggtttatgcccagatgacactgcaaccattgagcccggaagagcaaaaggaaccttttcttccaattgaattgggtgctggtagcaaccagccaactaattacttctgcaagacgttgactgcaagtgatacgagtacccatggcgggttctctgttccacgccgagcagctgagaaagtcttccccccattggatttttcacaacaccctccagtgcaagagctggttgcaagagatctgcatgataatgagtggaaattccgccacatttttcgtggtcagccaaaaaggcatctactgacgactggttggagtgtttttgtaagcgcaaaaagactagtagcaggggattctatcatatttatctggaatgataataaccagcttctattgggaattcgtcgagcaaatcgtccacagactgttatgccctcttccgtgctatcaagcgatagcatgcacattggtctccttgctgcagcagctcatgctgcagccacaaacagtcgtttcactattttctacaacccccgcccttctgagtttgtgattccactggctaagtatgtgaaagctgtctaccacacacgtgtgtctgttggaatgcggtttcggatgctttttgagacagaggaatcaagcgtcagacgatacatgggtacgatcacatgcataagtgatctggactcagagcgttggccaaattcacactggcgttctgtgaaggttggttgggatgagtctacagctggtgataaacagccaagagtttcactctgggagattgaaccactgatggcctttccgatgtacccaactgcctttccattaaggctaaagcgtccgtgggcttcagggctacctatgttcaatggtgggaggagtgatgagttcgctcgttattcttctctcatgtggctccgagatggaaacagaggggctcaatcactgaacttccagggacttggagcatcaccatggcttcaaccaagaatagattatccattattaggtctgaagctagatacttaccagcagatggctgctgctgcactggaagaaattagagctggggatcatttgaagcagatatcttctctcctgccagtgcaacagccacaaaatttgagtggtggattagatcctttatatggaaatcctgttctgcagcagatgcagttccaatctcagcagtcatccttgcaagttgtgcagcaaggttatggtccaaatgcaagcgactctgggttccttcaaaatcagctgcagctgcaaaagcagcaggagccactaccacagcagcagcagcaagctctgcaacaacaatcgcatcaggaaatgcaacatcacctctcagctagctgtcatgatattgctaatgtagcttctggtgtgtctgagtctggatctgcttctcaaacagaatcttctttgctttctgggtcatcgtaccaacagatctatgatggaaacagtggtccaggtctgcatctgcacaacggtttccacaactgttcaagccaagagtcctccaaccttcttaatctctcaagaagtggacaattcatggcatcagagggatggcctttgaagaggttggctgtggaatctctttctggtcatgagctccaacctgtgcagcacaagtttgagaaagtgaatcaccaaagtaatgtgtctcacatttctagcaccttgcccccactgtcagcaagagacagttatagtgcccaggctagtggtacaaatgatcagagtcacctgctttcatcatcatttgcaatccatgatggcttgacagccgtcaggagtggtggtgttggcagtggaactgatgcgataaccatagcttcgttgagatataatgatatgaatttgctacctgaaaaccccatcgcaacttccagttgtttgggcgaatcaggaaccttcaattctctcgacgatgtgtgtggtgtaaacccatcacaaggtggaacctttgtgaaggtatgtaatctcacttatgctgtatgctccttattcatcaaatggcatgtgaagttgccaagttggtaactgcaagagcacttcattttgtggaaggtaaaaaggtccattttggtttacaaatcagggtcccctgggagatcgctcgacatcaccaggttcagcagctactacgagttacgtagcgagctcgagcggttatttggtcttgaaggccaactggaggaccctgtaagatcaggctggcagcttgtattcgttgaccgggaaaacgatattcttctcgtcggcgatgacccgtggcaggagtttgtgaatagtgtatggtgcataaagatcctctcgccgcaagacgtgcagcagatggtccgcggcggaggcgaccttctgtctacaactggagtgaggacactgcagggcagtgtctgcgatgattattctgcaggccacgacatgcagaatctcaccggcagcatcgcacctgtggtgcctctggactactgagaccgagatgaagaccagaaactgaagttctgaaccaaaaccggcaattcagcaccgcaggattgccgtccacgagtcttttcggttcctatgatctatcttctctcaagttgtgttggtcagaaataacctagtcgttaatatagctagatccattgtatcattatggtaatggacatgttgtacgatagctgttgtagctacgtgtagccatagcctaagctctaaatggcaggcaagaattggtctatgaaagtatggatgcaggcactcactgtagaggtgacctagccctgtagttctctatatcttctcatatctaaaagctgacggttccatgtggcgcctaaactattgaaccctgtcacctttgtcatatttttttcacctcaattcgcggttgtttgatcttgttgcatgccatacaagtcaaatttttttgtcctgtttgtagttcagtaggctgtaccctgtaggcttttgcctgttaatccccgggtttcatgtcaaccaaaccatgatttccatggaatcagggtgtagcatagattaggggtttcactgattctttcctccgacatttatgtgggggtagaaagtttatttggcactgtaaggaacctaataggcactcagggg

SEQ ID NO: 205072 - DNA, 1372 bp, Zea Mays
aacttttcggcctaactcaatcgacaccattgtccaagctaaaaggcccaacttaataggctgccacttgccagtagaaccgtttgcctctcgcctgcatcctagtccggcggccgcacccgggcagctccggcggttccccgccgccgtcctccgtctatccccgactgcgctagagctccgtctcatgggggcgtccgaatctctcctatctaggcagcagcttcagcagccgcggcctcagtgggcggatgagatcacgacggtgtccgagggccggcgcgacgacgccgacgccgatcccctcgtccgccgtatccggtctctcaccatagctcctccgctattgagctcccaatctgaagcggaagcagagagcagcctcacggatatcctcgtcgggaagccctctaactcctcagccacctctggaaatctgaacccaaatgtcctagctgagcttttcgccatgtaccgcgaatggcaagaagagaatgccaagaaaattagccgaaaacaggatccaacatggaacgtcttggtgcaggaggagatagaaaacaagatagaaacagctgatgcattggcagttaaacttctccagcggttcaattattgtcttacttacatgagatccacctcccacaatcttgctgaagtgcatccgctgcagatcgaagttggtgagtcaaagggcaggttaactgaagtcataagcaactgcgatgcattgtgtaagagaattgctgcagaaggaccagaaagcctacgatcatctgttcaacctttcatggctgctagagcggaggcagaagggagtggttcacttgacccaaaacaagagtcctgaattgtacaatctaactgctgacagcatgcgcaaagaaacttcagaggatgattagtttgtcctgaacaaatatattatataaacacgtttaggaattgttcggttattctcaatacatatggattggatgagattggaaaaaattaagaagaagtttgacttgtttgggattcaaacctatcaaatcccactcaattcacgtggattgagagctaatcgaacaagcccttataatgttggaaaacatgttttagtcttagaaaccgtctacattgacactagtatatctatcacgttaaccaacgtatcattcgaatggagaattgtatcattcgaatagagaattgtagatctttactactagacgcatagcgtagatgtagtggaagtagtcgaatgttcttgtgttcattcatcctcaagtttgttgttgattactgtcgcaataatagcagcttctccacggtgttcacacatgtggtgatgaaacgatgtaataccattgtgctagcataatatcac

SEQ ID NO: 205073 - DNA, 665 bp, Zea Mays
gataaacgtagctatcattggggttacgcggggtggtcggttcagaaggaaatcatcgtccgacgcatacgagagggcgaccccgccagggacgaccagccaccctcctcccttcgacgtgtgaactgaccgcaccctcgcacttgtttttgctccttcacaagcatcatctacggtagacagggaggaccggagaagaaagacatcaagaggggaacggggatgatctagtcgcgggttgtcttacctctactgtgatatattatattgtagatatatctgtatggtttccttcctagtatgtggcatatgatgtataataataatacgtcgaacgctcatggtactgtgctgtgtgtgccatgtgcataggggtgggtgcctcagggtcagggattcgtgtgcgctatgccgcagcttggatctcgccgtgggccgtgtcgtgtgtttcctcctgctctgctatgtatgtcatcactgacggtgtgtggaggttgggttcatatatatgcttgtaatgttagctggtttgaggtgtggactacgagagtagttttgttcagtgtctggtatctagtagctgaaggtgtttgcttgaactctgtgaactgtgatgtgggataatgctaagaagatgaatagatgatcgttgggttgtcttgtcg

SEQ ID NO: 205074 - DNA, 1760 bp, Zea Mays
gtgattgagtttattaattattgtaatatcatatgtccccgttgcaacgcacgggcactcacctagttgataataataataatagttcggtgcctttttctagcggggaggaggcaggcggcgcaatctggcaccggccatcacgttccctccggccgcttccccctccctgccctccctttccccagatccgaagccattaaaaccagcggatctcacctcggggcgcgtccgcggcatctgggcaagcgagtggtagagccagcagccatgagatggtatgcatcggtagcctcctgagggcgctggtcctgagtgcggcggcgtctgcgggcaggcgccgggggcccaggatcctgtgtggccacgaggcggatgtacgcgtgactcctcggcacggacacggctggcgcggattccgggcagtcacgggaaggatgatgctggactcctctgactgtgcctctgctgccgccgccgcggagacggggcaggtgcagccgcagcgccgcgcggtgggggccgtgcccctggcgcacgacggcggctacgccagcggcggatgggagagatggcaaactgagttgtggatactcaagttttagaggcaagagagctacgatggaagatttctatgatgtaaaactaactgaaattgatggacaagctgttagcctgtttggtgttttcgacggtcatggaggatcacgtgctgctgagtatttgagggagcacttgtttgataaccttctcaagcaccctgatttcttgacagatacaaagcttgcgataagtgaaacatatcagaaaacagatacagatttcttggaatcagaagcaagcgctttcagggatgatggttcaacagcttcaactgcacttttggtgggtgaccatttatatgttgcaaatgttggtgattctcgtgccgttatttcaaaagctggcaaagctatggcgctttcagaagatcacaaacctaacagaattgatgagcgaaagagaattgaaaatgctggtggtattgtcatttgggctggcacttggagggtgggtggtgtattggcaatgtcccgtgcatttggcaatcgtttactgaagccatatgtggtggcagaacctgaaattcaggaagaacaggtcagtggtgggctggaatgcctggttcttgctagtgatgggctttgggatgttgtggaaaatgaggaagctgttttccttgggagatcggaggacacgccagagtctgcagctaggaaattgacagagattgcttactctcgcggcagcgctgacaatatcacatgcatcgtggtccaatttcaccatgacaaaaccggatgagccgtatggctgccaatttcagttgtaccctgcttcagtctattattatcctgcaagctgggtggtgggcttctcccagatttaccctgcttcatgctattattatcctgcaagccgggcggtggggtttctcagatctatcgctcatgtagcaactttcaagcactcgtccattgattcttttgttgtcttgtaggaaacatttgttccgacaggtgtagtagacacttttaaactgataattcaataaacgtatgtttacgattactgtttagtggaaattggttttcattttgccttatataagaagattttaactagtctgtcatgtgcgtgtgccatccctaattaggtatgaaaatggatacttttttggatattatttttttgtctttttctttgaccgtgaataaata

SEQ ID NO: 205075 - DNA, 1698 bp, Zea Mays
gtgattgagtttattaattattgtaatatcatatgtccccgttgcaacgcacgggcactcacctagttgataataataataatagttcggtgcctttttctagcggggaggaggcaggcggcgcaatctggcaccggccatcacgttccctccggccgcttccccctccctgccctccctttccccagatccgaagccattaaaaccagcggatctcacctcggggcgcgtccgcggcatctgggcaagcgagtggtagagccagcagccatgagatggtatgcatcggtagcctcctgagggcgctggtcctgagtgcggcggcgtctgcgggcaggcgccgggggcccaggatcctgtgtggccacgaggcggatgtacgcgtgactcctcggcacggacacggctggcgcggattccgggcagtcacgggaaggatgatgctggactcctctgactgtgcctctgctgccgccgccgcggagacggggcaggtgcagccgcagcgccgcgcggtgggggccgtgcccctggcgcacgacggcggctacgccagcggcggatgggagagagaagatggcaaactgagttgtggatactcaagttttagaggcaagagagctacgatggaagatttctatgatgtaaaactaactgaaattgatggacaagctgttagcctgtttggtgttttcgacggtcatggaggatcacgtgctgctgagtatttgagggagcacttgtttgataaccttctcaagcaccctgatttcttgacagatacaaagcttgcgataagtgaaacatatcagaaaacagatacagatttcttggaatcagaagcaagcgctttcagggatgatggttcaacagcttcaactgcacttttgctatggcgctttcagaagatcacaaacctaacagaattgatgagcgaaagagaattgaaaatgctggtggtattgtcatttgggctggcacttggagggtgggtggtgtattggcaatgtcccgtgcatttggcaatcgtttactgaagccatatgtggtggcagaacctgaaattcaggaagaacaggtcagtggtgggctggaatgcctggttcttgctagtgatgggctttgggatgttgtggaaaatgaggaagctgttttccttgggagatcggaggacacgccagagtctgcagctaggaaattgacagagattgcttactctcgcggcagcgctgacaatatcacatgcatcgtggtccaatttcaccatgacaaaaccggatgagccgtatggctgccaatttcagttgtaccctgcttcagtctattattatcctgcaagctgggtggtgggcttctcccagatttaccctgcttcatgctattattatcctgcaagccgggcggtggggtttctcagatctatcgctcatgtagcaactttcaagcactcgtccattgattcttttgttgtcttgtaggaaacatttgttccgacaggtgtagtagacacttttaaactgataattcaataaacgtatgtttacgattactgtttagtggaaattggttttcattttgccttatataagaagattttaactagtctgtcatgtgcgtgtgccatccctaattaggtatgaaaatggatacttttttggatattatttttttgtctttttctttgaccgtgaataaata

SEQ ID NO: 205076 - DNA, 2590 bp, Zea Mays
gccacttactcgtgctacggaacagttggcgcgtgagcgagtttcttaactcctcgccattggaatcggagtcgtgtattctctcacaccatcctgctcctgctcctgctcctgctcccttcccatccggtctccctttcttttcgcggcctcgcctcgcctcgcctcgcctcgccggcggcctggtggtcgcggtctcgctccagcaccgataaagcccacctcgagttctgctctgctccaccccccggcttcagccgcagcttgtggtggaatcggagcttcttatccgagagcagacatggagcagagtagtgatgggttgccaatcagccagcggagggctaacagttcaacaaaacactcaagcaagtcagatgaggttgctgaagacatgttgcagagtaatataccacatgaaactgtgagactgtgccaaggtgtggaatcagaagagatagagggacctcctcacaagaaaattgtccagaacttcacggagagcagtagttccaaaaataaaaaacacagatggtcatcagaggaagatgaggcactaaagcaaatggtaaaaaaatatgggacgaaaaactggcgaactattgcatgtgctatacctggccgaaatgccaactcatgcctttcaagatggaagtaccttctagacccagcaataaacaaagagccttggtcgcaacaggaggaactaagattgatccgtgcgcagcaagtttatggaaacaaatggtgtaaaatggtcaaacatttcccagggaggacaaatgatgcactcaaagaacattggagaagtcctatgaaaagaaaactggattcatatttggcctcaggattgctcgaacatgttccagacctgcaagatgatgtatcatttccacagacacagaacaatcaatcagatattccaaaggactgcaaagctgcatctgatagaaatagattttcatcacgtttatcaacagaccccaaacttaaacaagagctcacagaactggatgaaaatggtaatacatcagcaagaaaaagctctgacttattctatgctaaagcacctgatacccattcagccaaaatctcagaaatgagaatggccaaatcacagcagtgtgcaggaacaagaaagaagctggcttttctgtcaactccagtggagctcaagagtgttgtaccgcatgaaaccaccaaacattgccaagatatggaaccagaaaagacagttttttttatatcaagcagagggcccactgtgcaagagaaattcccactgcatcaaggatggaagtagtttgaaaattcccgaaagtaccaaaggcaaatggttagcagaggaaaatgaaattctcattaaaatggttaccaaacatgggaaaaactggcaaactgtagcatttgctatacctggccgagaagcaaaacaatgccaaatcagatggacacgcagtcttgacccagcaataaagaaacaggattggtcagaacaggaggatctaaaattgattcgagctcatcaaatatatggaagtcagtggcttaaaatggtcaaacatttccctgggaggacaaatcatgcactcaaagaacactggagaaatcgtatcaaaggaaaactgaatttttatttagcctcaggattgctagaacaagttccggacctggaagaaggtggtatatcagttccagagagcagtcagtcagaaattccgaaggacagtcagggttcagctgacaggagtggaccgccaccagttttacgagcacagcccaaatctaaaccggaactcccagaaaacgctggtacatcaggagaaggaacttctgattccattcgtcttaaagggcccaacgcccatccaaccgaagtttctgaaaaggtattggctaaatcaaagcagcgtgccagagccagaaggagattggattttctgtcaaccccagtggagctcaaattgtgcactgctgcggcaagttgtcaaaggcctccccagaaaatggatcaaccgggtccagtggccgagaacatctctccgtcagatgcatgtcaagacatttcacagaatgttccaccagagcgtgcggatgccatcacaccgctggctgctagtaaccaccattcaccagcgacaccagttgatccattctctctcgaaatgcatgaggcgaacgcatcagatcttctggacatgtcctactgtgatggcttgataatcgattctcctcgtgatccacatgacggtagcctcatgtagaagaaaaagttaccaacgcaaaatgacacttttaatagcaagagacgatggactgtcttcctgaaatccagcaactccctgtataaaaatcgtgttgcatgttggatggaacttgtatcttgtcttggcaaaaataattgcattgctgttctgttaatgcccctaactggtttggagagcatttttcttttgcaggtttgaagagcattttgaggggtgttgtaggtcaaattgaacaccatactcgaatgactcgtgttgttggtaactgaatcaataaaatatatgcatgtaaaaattcataatgttcatgtgctagaagccac

SEQ ID NO: 205077 - DNA, 2605 bp, Zea Mays
ctcgtgctacggaacagttggcgcgtgagcgagtttcttaactcctcgccattggaatcggagtcgtgtattctctcacaccatcctgctcctgctcctgctcctgctcccttcccatccggtctccctttcttttcgcggcctcgcctcgcctcgcctcgcctcgccggcggcctggtggtcgcggtctcgctccagcaccgataaagcccacctcgagttctgctctgctccaccccccggcttcagccgcagcttgtggtggaatcggagcttcttatccgagagcagacatggagcagagtagtgatgggttgccaatcagccagcggagggctaacagttcaacaaaacactcaagcaagtcagatgaggttgctgaagacatgttgcagagtaatataccacatgaaactgtgagactgtgccaaggtgtggaatcagaagagatagagggacctcctcacaagaaaattgtccagaacttcacggagagcagtagttccaaaaataaaaaacacagatggtcatcagaggaagatgaggcactaaagcaaatggtaaaaaaatatgggacgaaaaactggcgaactattgcatgtgctatacctggccgaaatgccaactcatgcctttcaagatggaagtaccttctagacccagcaataaacaaagagccttggtcgcaacaggaggaactaagattgatccgtgcgcagcaagtttatggaaacaaatggtgtaaaatggtcaaacatttcccagggaggacaaatgatgcactcaaagaacattggagaagtcctatgaaaagaaaactggattcatatttggcctcaggattgctcgaacatgttccagacctgcaagatgatgtatcatttccacagacacagaacaatcaatcagatattccaaaggactgcaaagctgcatctgatagaaatagattttcatcacgtttatcaacagaccccaaacttaaacaagagctcacagaactggatgaaaatgaaatgagaatggccaaatcacagcagtgtgcaggaacaagaaagaagctggcttttctgtcaactccagtggagctcaagagtgttgtaccgcatgaaaccaccaaacattgccaagatatggaaccagaaaagacagctatatgattatacctgggccaattccaagccatatttctttcacacactgctgggtactttgtagcataatagtttgcatatgatctcttcttgcatcattatgattttattgctgagggcccactgtgcaagagaaattcccactgcatcaaggatggaagtagtttgaaaattcccgaaagtaccaaaggcaaatggttagcagaggaaaatgaaattctcattaaaatggttaccaaacatgggaaaaactggcaaactgtagcatttgctatacctggccgagaagcaaaacaatgccaaatcagatggacacgcagtcttgacccagcaataaagaaacaggattggtcagaacaggaggatctaaaattgattcgagctcatcaaatatatggaagtcagtggcttaaaatggtcaaacatttccctgggaggacaaatcatgcactcaaagaacactggagaaatcgtatcaaaggaaaactgaatttttatttagcctcaggattgctagaacaagttccggacctggaagaaggtggtatatcagttccagagagcagtcagtcagaaattccgaaggacagtcagggttcagctgacaggagtggaccgccaccagttttacgagcacagcccaaatctaaaccggaactcccagaaaacgctggtacatcaggagaaggaacttctgattccattcgtcttaaagggcccaacgcccatccaaccgaagtttctgaaaaggtattggctaaatcaaagcagcgtgccagagccagaaggagattggattttctgtcaaccccagtggagctcaaattgtgcactgctgcggcaagttgtcaaaggcctccccagaaaatggatcaaccgggtccagtggccgagaacatctctccgtcagatgcatgtcaagacatttcacagaatgttccaccagagcgtgcggatgccatcacaccgctggctgctagtaaccaccattcaccagcgacaccagttgatccattctctctcgaaatgcatgaggcgaacgcatcagatcttctggacatgtcctactgtgatggcttgataatcgattctcctcgtgatccacatgacggtagcctcatgtagaagaaaaagttaccaacgcaaaatgacacttttaatagcaagagacgatggactgtcttcctgaaatccagcaactccctgtataaaaatcgtgttgcatgttggatggaacttgtatcttgtcttggcaaaaataattgcattgctgttctgttaatgcccctaactggtttggagagcatttttcttttgcaggtttgaagagcattttgaggggtgttgtaggtcaaattgaacaccatactcgaatgactcgtgttgttggtaactgaatcaataaaatatatgcatgtaaaaattcataatgttcatgtgctagaagccac

SEQ ID NO: 205078 - DNA, 2545 bp, Zea Mays
ctcgtgctacggaacagttggcgcgtgagcgagtttcttaactcctcgccattggaatcggagtcgtgtattctctcacaccatcctgctcctgctcctgctcctgctcccttcccatccggtctccctttcttttcgcggcctcgcctcgcctcgcctcgcctcgccggcggcctggtggtcgcggtctcgctccagcaccgataaagcccacctcgagttctgctctgctccaccccccggcttcagccgcagcttgtggtggaatcggagcttcttatccgagagcagacatggagcagagtagtgatgggttgccaatcagccagcggagggctaacagttcaacaaaacactcaagcaagtcagatgaggttgctgaagacatgttgcagagtaatataccacatgaaactgtgagactgtgccaaggtgtggaatcagaagagatagagggacctcctcacaagaaaattgtccagaacttcacggagagcagtagttccaaaaataaaaaacacagatggtcatcagaggaagatgaggcactaaagcaaatggtaaaaaaatatgggacgaaaaactggcgaactattgcatgtgctatacctggccgaaatgccaactcatgcctttcaagatggaagtaccttctagacccagcaataaacaaagagccttggtcgcaacaggaggaactaagattgatccgtgcgcagcaagtttatggaaacaaatggtgtaaaatggtcaaacatttcccagggaggacaaatgatgcactcaaagaacattggagaagtcctatgaaaagaaaactggattcatatttggcctcaggattgctcgaacatgttccagacctgcaagatgatgtatcatttccacagacacagaacaatcaatcagatattccaaaggactgcaaagctgcatctgatagaaatagattttcatcacgtttatcaacagaccccaaacttaaacaagagctcacagaactggatgaaaatgccaaaatctcagaaatgagaatggccaaatcacagcagtgtgcaggaacaagaaagaagctggcttttctgtcaactccagtggagctcaagagtgttgtaccgcatgaaaccaccaaacattgccaagatatggaaccagaaaagacagctatatgattatacctgggccaattccaagccatatttctttcacacactgctggagggcccactgtgcaagagaaattcccactgcatcaaggatggaagtagtttgaaaattcccgaaagtaccaaaggcaaatggaagatgaaattctcattaaaatggttaccaaacatgggaaaaactggcaaactgtagcatttgctatacctggccgagaagcaaaacaatgccaaatcagatggacacgcagtcttgacccagcaataaagaaacaggattggtcagaacaggaggatctaaaattgattcgagctcatcaaatatatggaagtcagtggcttaaaatggtcaaacatttccctgggaggacaaatcatgcactcaaagaacactggagaaatcgtatcaaaggaaaactgaatttttatttagcctcaggattgctagaacaagttccggacctggaagaaggtggtatatcagttccagagagcagtcagtcagaaattccgaaggacagtcagggttcagctgacaggagtggaccgccaccagttttacgagcacagcccaaatctaaaccggaactcccagaaaacgctggtacatcaggagaaggaacttctgattccattcgtcttaaagggcccaacgcccatccaaccgaagtttctgaaaaggtattggctaaatcaaagcagcgtgccagagccagaaggagattggattttctgtcaaccccagtggagctcaaattgtgcactgctgcggcaagttgtcaaaggcctccccagaaaatggatcaaccgggtccagtggccgagaacatctctccgtcagatgcatgtcaagacatttcacagaatgttccaccagagcgtgcggatgccatcacaccgctggctgctagtaaccaccattcaccagcgacaccagttgatccattctctctcgaaatgcatgaggcgaacgcatcagatcttctggacatgtcctactgtgatggcttgataatcgattctcctcgtgatccacatgacggtagcctcatgtagaagaaaaagttaccaacgcaaaatgacacttttaatagcaagagacgatggactgtcttcctgaaatccagcaactccctgtataaaaatcgtgttgcatgttggatggaacttgtatcttgtcttggcaaaaataattgcattgctgttctgttaatgcccctaactggtttggagagcatttttcttttgcaggtttgaagagcattttgaggggtgttgtaggtcaaattgaacaccatactcgaatgactcgtgttgttggtaactgaatcaataaaatatatgcatgtaaaaattcataatgttcatgtgctagaagccac

SEQ ID NO: 205079 - DNA, 2543 bp, Zea Mays
ctcgtgctacggaacagttggcgcgtgagcgagtttcttaactcctcgccattggaatcggagtcgtgtattctctcacaccatcctgctcctgctcctgctcctgctcccttcccatccggtctccctttcttttcgcggcctcgcctcgcctcgcctcgcctcgccggcggcctggtggtcgcggtctcgctccagcaccgataaagcccacctcgagttctgctctgctccaccccccggcttcagccgcagcttgtggtggaatcggagcttcttatccgagagcagacatggagcagagtagtgatgggttgccaatcagccagcggagggctaacagttcaacaaaacactcaagcaagtcagatgaggttgctgaagacatgttgcagagtaatataccacatgaaactgtgagactgtgccaaggtgtggaatcagaagagatagagggacctcctcacaagaaaattgtccagaacttcacggagagcagtagttccaaaaataaaaaacacagatggtcatcagaggaagatgaggcactaaagcaaatggtaaaaaaatatgggacgaaaaactggcgaactattgcatgtgctatacctggccgaaatgccaactcatgcctttcaagatggaagtaccttctagacccagcaataaacaaagagccttggtcgcaacaggaggaactaagattgatccgtgcgcagcaagtttatggaaacaaatggtgtaaaatggtcaaacatttcccagggaggacaaatgatgcactcaaagaacattggagaagtcctatgaaaagaaaactggattcatatttggcctcaggattgctcgaacatgttccagacctgcaagatgatgtatcatttccacagacacagaacaatcaatcagatattccaaaggactgcaaagctgcatctgatagaaatagattttcatcacgtttatcaacagaccccaaacttaaacaagagctcacagaactggatgaaaatgaaatgagaatggccaaatcacagcagtgtgcaggaacaagaaagaagctggcttttctgtcaactccagtggagctcaagagtgttgtaccgcatgaaaccaccaaacattgccaagatatggaaccagaaaagacagctatatgattatacctgggccaattccaagccatatttctttcacacactgctggagggcccactgtgcaagagaaattcccactgcatcaaggatggaagtagtttgaaaattcccgaaagtaccaaaggcaaatggttagcagaggaaaatgaaattctcattaaaatggttaccaaacatgggaaaaactggcaaactgtagcatttgctatacctggccgagaagcaaaacaatgccaaatcagatggacacgcagtcttgacccagcaataaagaaacaggattggtcagaacaggaggatctaaaattgattcgagctcatcaaatatatggaagtcagtggcttaaaatggtcaaacatttccctgggaggacaaatcatgcactcaaagaacactggagaaatcgtatcaaaggaaaactgaatttttatttagcctcaggattgctagaacaagttccggacctggaagaaggtggtatatcagttccagagagcagtcagtcagaaattccgaaggacagtcagggttcagctgacaggagtggaccgccaccagttttacgagcacagcccaaatctaaaccggaactcccagaaaacgctggtacatcaggagaaggaacttctgattccattcgtcttaaagggcccaacgcccatccaaccgaagtttctgaaaaggtattggctaaatcaaagcagcgtgccagagccagaaggagattggattttctgtcaaccccagtggagctcaaattgtgcactgctgcggcaagttgtcaaaggcctccccagaaaatggatcaaccgggtccagtggccgagaacatctctccgtcagatgcatgtcaagacatttcacagaatgttccaccagagcgtgcggatgccatcacaccgctggctgctagtaaccaccattcaccagcgacaccagttgatccattctctctcgaaatgcatgaggcgaacgcatcagatcttctggacatgtcctactgtgatggcttgataatcgattctcctcgtgatccacatgacggtagcctcatgtagaagaaaaagttaccaacgcaaaatgacacttttaatagcaagagacgatggactgtcttcctgaaatccagcaactccctgtataaaaatcgtgttgcatgttggatggaacttgtatcttgtcttggcaaaaataattgcattgctgttctgttaatgcccctaactggtttggagagcatttttcttttgcaggtttgaagagcattttgaggggtgttgtaggtcaaattgaacaccatactcgaatgactcgtgttgttggtaactgaatcaataaaatatatgcatgtaaaaattcataatgttcatgtgctagaagccac

SEQ ID NO: 205080 - DNA, 2361 bp, Zea Mays
cggaacagttggcgcgtgagcgagtttcttaactcctcgccattggaatcggagtcgtgtattctctcacaccatcctgctcctgctcctgctcctgctcccttcccatccggtctccctttcttttcgcggcctcgcctcgcctcgcctcgcctcgccggcggcctggtggtcgcggtctcgctccagcaccgataaagcccacctcgagttctgctctgctccaccccccggcttcagccgcagcttgtggtggaatcggagcttcttatccgagagcagacatggagcagagtagtgatgggttgccaatcagccagcggagggctaacagttcaacaaaacactcaagcaagtcagatgaggttgctgaagacatgttgcagagtaatataccacatgaaactgtgagactgtgccaaggtgtggaatcagaagagatagagggacctcctcacaagaaaattgtccagaacttcacggagagcagtagttccaaaaataaaaaacacagatggtcatcagaggaagatgaggcactaaagcaaatggtaaaaaaatatgggacgaaaaactggcgaactattgcatgtgctatacctggccgaaatgccaactcatgcctttcaagatggaagtaccttctagacccagcaataaacaaagagccttggtcgcaacaggaggaactaagattgatccgtgcgcagcaagtttatggaaacaaatggtgtaaaatggtcaaacatttcccagggaggacaaatgatgcactcaaagaacattggagaagtcctatgaaaagaaaactggattcatatttggcctcaggattgctcgaacatgttccagacctgcaagatgatgtatcatttccacagacacagaacaatcaatcagatattccaaaggactgcaaagctgcatctgatagaaatagattttcatcacgtttatcaacagaccccaaacttaaacaagagctcacagaactggatgaaaatggtaatacatcagcaagaaaaagctctgacttattctatgctaaagcacctgatacccattcagccaaaatctcagaaatgagaatggccaaatcacagcagtgtgcaggaacaagaaagaagctggcttttctgtcaactccagtggagctcaagagtgttgtaccgcatgaaaccaccaaacattgccaagatatggaaccagaaaagacagatggacacgcagtcttgacccagcaataaagaaacaggattggtcagaacaggaggatctaaaattgattcgagctcatcaaatatatggaagtcagtggcttaaaatggtcaaacatttccctgggaggacaaatcatgcactcaaagaacactggagaaatcgtatcaaaggaaaactgaatttttatttagcctcaggattgctagaacaagttccggacctggaagaaggtggtatatcagttccagagagcagtcagtcagaaattccgaaggacagtcagggttcagctgacaggagtggaccgccaccagttttacgagcacagcccaaatctaaaccggaactcccagaaaacgctggtacatcaggagaaggaacttctgattccattcgtcttaaagggcccaacgcccatccaaccgaagtttctgaaaaggtattggctaaatcaaagcagcgtgccagagccagaaggagattggattttctgtcaaccccagtggagctcaaattgtgcactgctgcggcaagttgtcaaaggcctccccagaaaatggatcaaccgggtccagtggccgagaacatctctccgtcagatgcatgtcaagacatttcacagaatgttccaccagagcgtgcggatgccatcacaccgctggctgctagtaaccaccattcaccagcgacaccagttgatccattctctctcgaaatgcatgaggcgaacgcatcagatcttctggacatgtcctactgtgatggcttgataatcgattctcctcgtgatccacatgacggtagcctcatgtagaagaaaaagttaccaacgcaaaatgacacttttaatagcaagagacgatggactgtcttcctgaaatccagcaactccctgtataaaaatcgtgttgcatgttggatggaacttgtatcttgtcttggcaaaaataattgcattgctgttctgttaatgcccctaactggtttggagagcatttttcttttgcaggtttgaagagcattttgaggggtgttgtaggtcaaattgaacaccatactcgaatgactcgtgttgttggtaactgaatcaataaaatatatgcatgtaaaaattcataatgttcatgtgctagaagccac

SEQ ID NO: 205081 - DNA, 2369 bp, Zea Mays
accggaatgcagatccgccaggacctggattgattccttcttctgtgatcaatcaaaagcttcagccgcagcttgtggtggaatcggagcttcttatccgagagcagacatggagcagagtagtgatgggttgccaatcagccagcggagggctaacagttcaacaaaacactcaagcaagtcagatgaggttgctgaagacatgttgcagagtaatataccacatgaaactgtgagactgtgccaaggtgtggaatcagaagagatagagggacctcctcacaagaaaattgtccagaacttcacggagagcagtagttccaaaaataaaaaacacagatggtcatcagaggaagatgaggcactaaagcaaatggtaaaaaaatatgggacgaaaaactggcgaactattgcatgtgctatacctggccgaaatgccaactcatgcctttcaagatggaagtaccttctagacccagcaataaacaaagagccttggtcgcaacaggaggaactaagattgatccgtgcgcagcaagtttatggaaacaaatggtgtaaaatggtcaaacatttcccagggaggacaaatgatgcactcaaagaacattggagaagtcctatgaaaagaaaactggattcatatttggcctcaggattgctcgaacatgttccagacctgcaagatgatgtatcatttccacagacacagaacaatcaatcagatattccaaaggactgcaaagctgcatctgatagaaatagattttcatcacgtttatcaacagaccccaaacttaaacaagagctcacagaactggatgaaaatggtaatacatcagcaagaaaaagctctgacttattctatgctaaagcacctgatacccattcagccaaaatctcagaaatgagaatggccaaatcacagcagtgtgcaggaacaagaaagaagctggcttttctgtcaactccagtggagctcaagagtgttgtaccgcatgaaaccaccaaacattgccaagatatggaaccagaaaagacagagggcccactgtgcaagagaaattcccactgcatcaaggatggaagtagtttgaaaattcccgaaagtaccaaaggcaaatggaagatgaaattctcattaaaatggttaccaaacatgggaaaaactggcaaactgtagcatttgctatacctggccgagaagcaaaacaatgccaaatcagatggacacgcagtcttgacccagcaataaagaaacaggattggtcagaacaggaggatctaaaattgattcgagctcatcaaatatatggaagtcagtggcttaaaatggtcaaacatttccctgggaggacaaatcatgcactcaaagaacactggagaaatcgtatcaaaggaaaactgaatttttatttagcctcaggattgctagaacaagttccggacctggaagaaggtggtatatcagttccagagagcagtcagtcagaaattccgaaggacagtcagggttcagctgacaggagtggaccgccaccagttttacgagcacagcccaaatctaaaccggaactcccagaaaacgctggtacatcaggagaaggaacttctgattccattcgtcttaaagggcccaacgcccatccaaccgaagtttctgaaaaggtattggctaaatcaaagcagcgtgccagagccagaaggagattggattttctgtcaaccccagtggagctcaaattgtgcactgctgcggcaagttgtcaaaggcctccccagaaaatggatcaaccgggtccagtggccgagaacatctctccgtcagatgcatgtcaagacatttcacagaatgttccaccagagcgtgcggatgccatcacaccgctggctgctagtaaccaccattcaccagcgacaccagttgatccattctctctcgaaatgcatgaggcgaacgcatcagatcttctggacatgtcctactgtgatggcttgataatcgattctcctcgtgatccacatgacggtagcctcatgtagaagaaaaagttaccaacgcaaaatgacacttttaatagcaagagacgatggactgtcttcctgaaatccagcaactccctgtataaaaatcgtgttgcatgttggatggaacttgtatcttgtcttggcaaaaataattgcattgctgttctgttaatgcccctaactggtttggagagcatttttcttttgcaggtttgaagagcattttgaggggtgttgtaggtcaaattgaacaccatactcgaatgactcgtgttgttggtaactgaatcaataaaatatatgcatgtaaaaattcataatgttcatgtgctagaagccac

SEQ ID NO: 205082 - DNA, 2673 bp, Zea Mays
cttctgtgatcaatcaaaagcttcagccgcagcttgtggtggaatcggagcttcttatccgagagcagacatggagcagagtagtgatgggttgccaatcagccagcggagggctaacagttcaacaaaacactcaagcaagtcagatgaggttgctgaagacatgttgcagagtaatataccacatgaaactgtgagactgtgccaaggtgtggaatcagaagagatagagggacctcctcacaagaaaattgtccagaacttcacggagagcagtagttccaaaaataaaaaacacagatggtcatcagaggaaagttgtttagactataatatttatcattcacattgtattttatacttattcaaaatagaaacaaattaattttccttccaggaagatgaggcactaaagcaaatggtaaaaaaatatgggacgaaaaactggcgaactattgcatgtgctatacctggccgaaatgccaactcatgcctttcaagatggaagtaccttctagacccagcaataaacaaagagccttggtcgcaacaggaggaactaagattgatccgtgcgcagcaagtttatggaaacaaatggtgtaaaatggtcaaacatttcccagggaggacaaatgatgcactcaaagaacattggagaagtcctatgaaaagaaaactggattcatatttggcctcaggattgctcgaacatgttccagacctgcaagatgatgtatcatttccacagacacagaacaatcaatcagatattccaaaggactgcaaagctgcatctgatagaaatagattttcatcacgtttatcaacagaccccaaacttaaacaagagctcacagaactggatgaaaatggtaatacatcagcaagaaaaagctctgacttattctatgctaaagcacctgatacccattcagccaaaatctcagaaatgagaatggccaaatcacagcagtgtgcaggaacaagaaagaagctggcttttctgtcaactccagtggagctcaagagtgttgtaccgcatgaaaccaccaaacattgccaagatatggaaccagaaaagacagctatatgattatacctgggccaattccaagccatatttctttcacacactgctgggtactttgtagcataatagtttgcatatgatctcttcttgcatcattatgattttattgctggtacatatacctcatggtcagctttcatatataactatcataactatcatctcttgtgttggttaaattttattgttatattcacatcgtggaatgtaagtgtatgtatttagttttttttatatcaagcagagggcccactgtgcaagagaaattcccactgcatcaaggatggaagtagtttgaaaattcccgaaagtaccaaaggcaaatggttagcagaggaaaatgaaattctcattaaaatggttaccaaacatgggaaaaactggcaaactgtagcatttgctatacctggccgagaagcaaaacaatgccaaatcagatggacacgcagtcttgacccagcaataaagaaacaggattggtcagaacaggaggatctaaaattgattcgagctcatcaaatatatggaagtcagtggcttaaaatggtcaaacatttccctgggaggacaaatcatgcactcaaagaacactggagaaatcgtatcaaaggaaaactgaatttttatttagcctcaggattgctagaacaagttccggacctggaagaaggtggtatatcagttccagagagcagtcagtcagaaattccgaaggacagtcagggttcagctgacaggagtggaccgccaccagttttacgagcacagcccaaatctaaaccggaactcccagaaaacgctggtacatcaggagaaggaacttctgattccattcgtcttaaagggcccaacgcccatccaaccgaagtttctgaaaaggtattggctaaatcaaagcagcgtgccagagccagaaggagattggattttctgtcaaccccagtggagctcaaattgtgcactgctgcggcaagttgtcaaaggcctccccagaaaatggatcaaccgggtccagtggccgagaacatctctccgtcagatgcatgtcaagacatttcacagaatgttccaccagagcgtgcggatgccatcacaccgctggctgctagtaaccaccattcaccagcgacaccagttgatccattctctctcgaaatgcatgaggcgaacgcatcagatcttctggacatgtcctactgtgatggcttgataatcgattctcctcgtgatccacatgacggtagcctcatgtagaagaaaaagttaccaacgcaaaatgacacttttaatagcaagagacgatggactgtcttcctgaaatccagcaactccctgtataaaaatcgtgttgcatgttggatggaacttgtatcttgtcttggcaaaaataattgcattgctgttctgttaatgcccctaactggtttggagagcatttttcttttgcaggtttgaagagcattttgaggggtgttgtaggtcaaattgaacaccatactcgaatgactcgtgttgttggtaactgaatcaataaaatatatgcatgtaaaaattcataatgttcatgtgctagaagccac

SEQ ID NO: 205083 - DNA, 2299 bp, Zea Mays
gtaaaggtcagctaagagttgcgcttaattccctcaagcggtacatatgccctgtaccatgttttcaggccttcactatcaagagggacctcctcacaagaaaattgtccagaacttcacggagagcagtagttccaaaaataaaaaacacagatggtcatcagaggaagatgaggcactaaagcaaatggtaaaaaaatatgggacgaaaaactggcgaactattgcatgtgctatacctggccgaaatgccaactcatgcctttcaagatggaagtaccttctagacccagcaataaacaaagagccttggtcgcaacaggaggaactaagattgatccgtgcgcagcaagtttatggaaacaaatggtgtaaaatggtcaaacatttcccagggaggacaaatgatgcactcaaagaacattggagaagtcctatgaaaagaaaactggattcatatttggcctcaggattgctcgaacatgttccagacctgcaagatgatgtatcatttccacagacacagaacaatcaatcagatattccaaaggactgcaaagctgcatctgatagaaatagattttcatcacgtttatcaacagaccccaaacttaaacaagagctcacagaactggatgaaaatgcagtgtgcaggaacaagaaagaagctggcttttctgtcaactccagtggagctcaagagtgttgtaccgcatgaaaccaccaaacattgccaagatatggaaccagaaaagacagctatatgattatacctgggccaattccaagccatatttctttcacacactgctgggtactttgtagcataatagtttgcatatgatctcttcttgcatcattatgattttattgctgagggcccactgtgcaagagaaattcccactgcatcaaggatggaagtagtttgaaaattcccgaaagtaccaaaggcaaatggttagcagaggaaagttgtttggacaaaaaaaaattatataatgtcaacttgggcttgtttcatcatgactactgagaaaaaaatactttcttccaggaagatgaaattctcattaaaatggttaccaaacatgggaaaaactggcaaactgtagcatttgctatacctggccgagaagcaaaacaatgccaaatcagatggacacgcagtcttgacccagcaataaagaaacaggattggtcagaacaggaggatctaaaattgattcgagctcatcaaatatatggaagtcagtggcttaaaatggtcaaacatttccctgggaggacaaatcatgcactcaaagaacactggagaaatcgtatcaaaggaaaactgaatttttatttagcctcaggattgctagaacaagttccggacctggaagaaggtggtatatcagttccagagagcagtcagtcagaaattccgaaggacagtcagggttcagctgacaggagtggaccgccaccagttttacgagcacagcccaaatctaaaccggaactcccagaaaacgctggtacatcaggagaaggaacttctgattccattcgtcttaaagggcccaacgcccatccaaccgaagtttctgaaaaggtattggctaaatcaaagcagcgtgccagagccagaaggagattggattttctgtcaaccccagtggagctcaaattgtgcactgctgcggcaagttgtcaaaggcctccccagaaaatggatcaaccgggtccagtggccgagaacatctctccgtcagatgcatgtcaagacatttcacagaatgttccaccagagcgtgcggatgccatcacaccgctggctgctagtaaccaccattcaccagcgacaccagttgatccattctctctcgaaatgcatgaggcgaacgcatcagatcttctggacatgtcctactgtgatggcttgataatcgattctcctcgtgatccacatgacggtagcctcatgtagaagaaaaagttaccaacgcaaaatgacacttttaatagcaagagacgatggactgtcttcctgaaatccagcaactccctgtataaaaatcgtgttgcatgttggatggaacttgtatcttgtcttggcaaaaataattgcattgctgttctgttaatgcccctaactggtttggagagcatttttcttttgcaggtttgaagagcattttgaggggtgttgtaggtcaaattgaacaccatactcgaatgactcgtgttgttggtaactgaatcaataaaatatatgcatgtaaaaattcataatgttcatgtgctagaagccac

SEQ ID NO: 205084 - DNA, 1809 bp, Zea Mays
cgttaattgtggtttaggttccgttccccaattttacttgacgctccctcctccctcctccctctctcttgtcttctcccttgcggcgatccggattccgccgcaacggcccctctcgccttctccctcgcggcgctcgatccctccggattggcgcgtggaggggacagtggtttagaggagagaaacaagtgccgattgacaccaatagggtattcttaccattttcagatcagctggttcaacaaaactagtaaagatggcatcagaagggaacaaagacgtacctcatgaagctttgaccgtggatcactcatcgatttcgggttcaaagcgcaagcgtggccgcccaaggaaatatgagtatcctgtaaatgaactaccacagaaggtacagcccatccagagcgccccacctcttcttcactgcacacaagatggctcaagtctggccagccatgcatctggtggcggtgctcatggtaattggtccgctcaacctaggaattcagctaatgcttctcttcaaggtaattctggcaaagatgactttcttggcaagcattttgtgggcaagctgaccaagaaagttcctgggttttcgctcattacggtaaaagtgaaggacaatcaggtgctcaaaggttgggttccagatgaaattaatctccgcccaataacacctaaggatgaccttgccccagagctacccatgctgcgaccgagtcaagttcgaaagcgagcatcagcgatccatatgcaacctgctcttcctgtgccaatgcacttggagaatgttacacttgcaaagcctctgcagatgaggagacctgttgagaaaactattgctaagcatgctgtgcctcttgcttctaggccttacattagttctggtgttgttgcagcaatacctatatcggttgctcccatcaatcctgaaatgagaacttcggccaggcaggatgctgaacttgtgatcccacaatcatcagtttctgcagtgccaataaaatttgtttgtcctgcctcggtaccatgcaagcaactggctaatcaaaatgagtttactggaaataagtctgttgatgaggttcagaaagattcggaatctccaaatgtaaccaaggaatcaccagtgaaagctgaaaaaccaaacattgctcttgtggatgtagtggccaaggattctctaggggaagggcaacaacttaatgatcaagtaacggatgtagttagggatttttctggtcaaactcaaaatgttgatgtgacaatgtctgatgagatcaagatagcatcaggtgccagagataagccaaattctgcaaattgtgaacagcagagttctaaggaaccatcagaacaatctgagcagctcaagacagagaccgatgtccagaaaggagttgatgcctcagatgacattcatcctgcgcatgatgaacaataaatcaaggttgtcggcttattgggatgtggagctggaattttagcatggaccaatgctttaggtgtataggtgagagattaagtagagttacataaacccaaaaaaaatcacctaggacgtagcagttatagcacagagagaatacttgatggacttctcatttttaggaagatgacccggcttaaagttattttgaactcctggtcttgtaatatgcctttttaatattttaagctctattcacagacatatggaaacatgatgctatacaggaaaacttgcatgttatatgtaatggccctcttgtttgttgttattctcccccaaaaaagtatttttcaacagattttgttcccgtg

SEQ ID NO: 205085 - DNA, 1297 bp, Zea Mays
gacgctccctcctccctcctccctctctcttgtcttctcccttgcggcgatccggattccgccgcaacggcccctctcgccttctccctcgcggcgctcgatccctccggattggcgcgtggaggggacagtgatcagctggttcaacaaaactagtaaagatggcatcagaagggaacaaagacgtacctcatgaagctttgaccgtggatcactcatcgatttcgggttcaaagcgcaagcgtggccgcccaaggaaatatgagtatcctgtaaatgaactaccacagaaggtacagcccatccagagcgccccacctcttcttcactgcacacaagatggctcaagtctggccagccatgcatctggtggcggtgctcatgcaatacctatatcggttgctcccatcaatcctgaaatgagaacttcggccaggcaggatgctgaacttgtgatcccacaatcatcagtttctgcagtgccaataaaatttgtttgtcctgcctcggtaccatgcaagcaactggctaatcaaaatgagtttactggaaataagtctgttgatgaggttcagaaagattcggaatctccaaatgtaaccaaggaatcaccagtgaaagctgaaaaaccaaacattgctcttgtggatgtagtggccaaggattctctaggggaagggcaacaacttaatgatcaagtaacggatgtagttagggatttttctggtcaaactcaaaatgttgatgtgacaatgtctgatgagatcaagatagcatcaggtgccagagataagccaaattctgcaaattgtgaacagcagagttctaaggaaccatcagacatcacagaacaatctgagcagctcaagacagagaccgatgtccagaaaggagttgatgcctcagatgacattcatcctgcgcatgatgaacaataaatcaaggttgtcggcttattgggatgtggagctggaattttagcatggaccaatgctttaggtgtataggtgagagattaagtagagttacataaacccaaaaaaaatcacctaggacgtagcagttatagcacagagagaatacttgatggacttctcatttttaggaagatgacccggcttaaagttattttgaactcctggtcttgtaatatgcctttttaatattttaagctctattcacagacatatggaaacatgatgctatacaggaaaacttgcatgttatatgtaatggccctcttgtttgttgttattctcccccaaaaaagtatttttcaacagattttgttcccgtg

SEQ ID NO: 205086 - DNA, 1392 bp, Zea Mays
tccctcctccctctctcttgtcttctcccttgcggcgatccggattccgccgcaacggcccctctcgccttctccctcgcggcgctcgatccctccggattggcgcgtggaggggacagtggtttagaggagagaaacaagtgccgattgacaccaatagggtattcttaccattttcagatcagctggttcaacaaaactagtaaagatggcatcagaagggaacaaagacgtacctcatgaagctttgaccgtggatcactcatcgatttcgggttcaaagcgcaagcgtggccgcccaaggaaatatgagtatcctgtaaatgaactaccacagaaggtacagcccatccagagcgccccacctcttcttcactgcacacaagatggctcaagtctggccagccatgcatctggtggcggtgctcatggtaattggtccgctcaacctaggaattcagctaatgcttctcttcaagcaatacctatatcggttgctcccatcaatcctgaaatgagaacttcggccaggcaggatgctgaacttgtgatcccacaatcatcagtttctgcagtgccaataaaatttgtttgtcctgcctcggtaccatgcaagcaactggctaatcaaaatgagtttactggaaataagtctgttgatgaggttcagaaagattcggaatctccaaatgtaaccaaggaatcaccagtgaaagctgaaaaaccaaacattgctcttgtggatgtagtggccaaggattctctaggggaagggcaacaacttaatgatcaagtaacggatgtagttagggatttttctggtcaaactcaaaatgttgatgtgacaatgtctgatgagatcaagatagcatcaggtgccagagataagccaaattctgcaaattgtgaacagcagagttctaaggaaccatcagacatcacagaacaatctgagcagctcaagacagagaccgatgtccagaaaggagttgatgcctcagatgacattcatcctgcgcatgatgaacaataaatcaaggttgtcggcttattgggatgtggagctggaattttagcatggaccaatgctttaggtgtataggtgagagattaagtagagttacataaacccaaaaaaaatcacctaggacgtagcagttatagcacagagagaatacttgatggacttctcatttttaggaagatgacccggcttaaagttattttgaactcctggtcttgtaatatgcctttttaatattttaagctctattcacagacatatggaaacatgatgctatacaggaaaacttgcatgttatatgtaatggccctcttgtttgttgttattctcccccaaaaaagtatttttcaacagattttgttcccgtg

SEQ ID NO: 205087 - DNA, 2765 bp, Zea Mays
gaagaacagagagttaaacaaacctatccgcgctgcaacagtgcggtgtttgaatccaatccagccagacagccgagaaagcgagcagccttgttcctatacactgtagtctagtttagctcccccctcaaaccactccacccggtccgtttcccgtcccacccgcgtcagcttcgtcttgctctgagctgccggcgacctgctagctaagctacctcgctcgcacctggagcctggtggcggtggccatggcggccctgctgggccttttcttcctgctgctgctccagctcggcccctcttcttgcagcaatgtgtacattgcgtacatgggagagaggagccccgagctgcgcccggctctggtccgggacgcgcaccacggcatgctcgccgccctccttggcaggcggccagggacgccatcctttacagctacaggcacggcttctccgggttcgccgccacgctaacggacagccaggcggcgcggctcgccgattcgcctggggttgtgcgagtggtgcggaaccgtgttcttgacctgcacaccaccaggagctgggacttcatgcgagtgatgagtccgtcgcactcggctggaatcctctcaaacagtagactcggtgaggattccattattggtgtgctagacactggaatatggccagagtcggccagctttagagacgacggcatcggcgaggttccacggcggtggaaagggcgatgcgtcgccggggacaggttcaatgcttccaactgcaacaggaaaataataggcgcgaagtggtacatcagaggctacgaagccgagtacgggaagatgaacaccaccgacatctacgagttcatgtccgcgagagacgccgtcgggcacggcacgcacacggcctccactgccgccggcgctccggtagccgacgcgagcttcaggggcctcgccagcggcgtcgcgaggggaggggcgcccagggcaaggctggcggtctacaaggtgtgctgggccaccggagactgcacctccgcggacatcctcgctgcctttgacgacgccatacatgacggcgtcgacgtgctctcggtgtccctgggccaggcaccaccgctccctgcatacgtcgacgatgtcctgtccatcggatccttccacgctgtcgcgagagggatcgccgtggtctgctccgcagggaactccgggccttattcggagacggtgatcaactcggcgccgtggatcgtgaccgtcgctgccggcaccattgacaggactttcctcgcaaagatcgccctcggcaacaatagcacctacgcgggtcaaacgctctactctggagcgcatcctggaagaagcatgagcctagtctacgctgaagacattgcatctaacgacgcagacgatacagatgcaagaagctgcactgcaggatccctgaattctactctagcgaagggaaaggtggtgctttgcttccaaacaagggctcagagatcagcttcggtggcggtggagaccgtcaggaaagctcgtggcgtcggtgtcatcttcgcccagttcttaactaaggacatcgcgtcttcattcgatgttccatgtgttcaagtagactaccaagttggaacagttatactcgcgtacactactagcatgagaaacccaacagttcagtttggctcagcaaaaacagttcttggagaagtgatcggcccagaagtcgcgtatttctcgtctcggggtccaagttctctgtccccctctgttctgaagccagacatcgctgctccaggcgtcaacattttggccgcatggactcccgccgccgccgtatcatcagccattggatccgtgagcttcaagatcgattcaggaacctccatgtcctgcccgcacatctcaggagtcgttgctctcctcagatcactgcatcccaactggagtcctgctgcagtaaaatcagcgcttgtcacaacagccagcgtccacgacacgtatgggtttgggatcgtgtccgaggcagcaccgtacagccaggcgaacccgttcgactacggaggtggtcacgtggatccgaaccgagctgcgtaccccggtctcgtgtacgacatgggggcgtctgactacgtgcgcttcctttgctccatgggctacaacgtctcggccatcagctccgtggctcagcagcgtgagactgagacctgccagcacgcgcccaagacgcagctggacctcaacctgccatccatcgccgtccccgagctgaggggcaggcttaccgtgtcaagaacggtcaccaacgtcggctcggcattgtcggagtacagggctcgcgtggaagctcctccaggggtggacgtctccgtgcgcccctcgctcctggccttcaactcgaccgtgaggaggctggcgttcaaggtgacgttccgggccaagctggtgaaggtgcaagggagatacaccttcggcagcctgacgtgggaggacggcgtgcacgccgtgaggatccctctggtggttcgcacgatggtcggcaggttctacgccaattcatgagctagttagttcgtgtttgtgtggtgctgtgtgttacctttcgctcaccaccggaccggtgatggtgagacggacaagatgtaacctgctaatttgttccgattctaatggcattggtgattggttggggttctttggctagaattcgaccactgattaagatgagcaaaactgaatcttttgtgtttgtaatagaccataacttcttcttgtt

SEQ ID NO: 205088 - DNA, 1121 bp, Zea Mays
ctagcatgagaacccaacagttcagtttggctcagcaaaaacagttcttggagaagtgatcggcccagaagtcgcgtatttctcgtctcggggtccaagttctctgtccccctctgttctgaagccagacatcgctgctccaggcgtcaacattttggccgcatggactcccgccgccgccgtatcatcagccattggatccgtgagcttcaagatcgattcaggaacctccatgtcctgcccgcacatctcaggagtcgttgctctcctcagatcactgcatcccaactggagtcctgctgcagtaaaatcagcgcttgtcacaacagccagcgtccacgacacgtatgggtttgggatcgtgtccgaggcagcaccgtacagccaggcgaacccgttcgactacggaggtggtcacgtggatccgaaccgagctgcgtaccccggtctcgtgtacgacatgggggcgtctgactacgtgcgcttcctttgctccatgggctacaacgtctcggccatcagctccgtggctcagcagcgtgagactgagacctgccagcacgcgcccaagacgcagctggacctcaacctgccatccatcgccgtccccgagctgaggggcaggcttaccgtgtcaagaacggtcaccaacgtcggctcggcattgtcggagtacagggctcgcgtggaagctcctccaggggtggacgtctccgtgcgcccctcgctcctggccttcaactcgaccgtgaggaggctggcgttcaaggtgacgttccgggccaagctggtgaaggtgcaagggagatacaccttcggcagcctgacgtgggaggacggcgtgcacgccgtgaggatccctctggtggttcgcacgatggtcggcaggttctacgccaattcatgagctagttagttcgtgtttgtgtggtgctgtgtgttacctttcgctcaccaccggaccggtgatggtgagacggacaagatgtaacctgctaatttgttccgattctaatggcattggtgattggttggggttctttggctagaattcgaccactgattaagatgagcaaaactgaatcttttgtgtttgtaatagaccataacttcttcttgtt

SEQ ID NO: 205089 - DNA, 1894 bp, Zea Mays
ccactgcaaaatactagtaacaatgtctcagacaacatatatggcccctgtaggcactctcggcttctcgctgccgttgatcatcctcttggcttctctttcggcgctactagctactacacctaacgacgacatggaagcgctgctctgcctcaagcaccacctctcagcctcatcagaccctacggggacactaccttcatggaagaatgattccacgcagttctgcagttggtccggcgtgacatgcagcaagagacactcgtcccgtgttgttgcactggaccttgagtcactcgacctccatggccaaatacctccttgcatcggcaacctcacgttcctcacaaggatccacatgccaaacaaccagctgcagggtcagatcccggctgagcttggccagttaaaccggctgcggccatcgatctttcgaggaattccctcagcggaagcatccccgaaggtctggggagcctcctcggcaacctctcggatttacgcctttcaggaaaatgtggattggtgtataagggaagattttgggatgaggaacatgtagttgccatcaaagtattcaaacttgatcaactcggagcaccaaacagcttcctcgctgaatgtgaggccctgaggaatactagacaccgcaatctcgtgaaggtgatcactgcatgctcgacgattgattcagagggacatgatttcaaggccgtcattcttgagtacatgtctaacggcagcctggagaactggctctatccgaaattgaacaggtatggaattcgaaaaccgttaagtttgggctccagaatagaaatcgcagcggacatagcctgtgctctggattacctccataaccattgcgttcccgctatagtccattgtgacttgaaacccagcaacgtacttcttgatgatgccatggttgcacaccttggtgactttggattggctaagcttcttcacacttgtagctattcaattactcatagttcttctacaagcttgattggaccaagaggatcaatcggatacattgcaccagagtatggcttcgggagcaaactctctacacagggcgatgtctatagctatggaatcaccgtcttagaaatgctcacagggaagcgccccacagatgagatgttttctaagggtttgacccttcacaaatttgtgaaggaagcatttcctcaaaagattcatgaaattctcgatccttctatattcccggttacaagagatggtgataatcacacaacggatgaaataaccagaagcatcatgaaccttcttaagatcggtatctcgtgctctgcagatgcaccaacagaccgaccaacaatagatgatgtttatgctaaagtcatcacaatcaaagaaacatttttagatctatgccactaaggaatggaacaatcatttttactatttaaatcaggggggcattatgttttatttactctgtttgcttgggaagcttaggaatcaaataaattgtgggtcttgtcctttattttgtcattactcttatgtaatttgacgagtagagagctgacaagtctgtttgctaggtgtgaccgcagctccactgtggggcatacttgtaatattcttataactcaatgactctttagcaaacatccaaaccacaaagaccagttgtgccctgagtgaactcactgtattgttgggagatagatacaaaggattaagagtgatccaccaataaaaagagatttccgatcactatagttggctgtcaaaaaatagtggtccgaccatgttaactttcgatggctctgtgaggcgtcggaagttaataacttccaacaccaaccgtcaaaagttagataactttcgtatgcagttgaaatttactaacttccaa

SEQ ID NO: 205090 - DNA, 1912 bp, Zea Mays
ccactgcaaaatactagtaacaatgtctcagacaacatatatggcccctgtaggcactctcggcttctcgctgccgttgatcatcctcttggcttctctttcggcgctactagctactacacctaacgacgacatggaagcgctgctctgcctcaagcaccacctctcagcctcatcagaccctacggggacactaccttcatggaagaatgattccacgcagttctgcagttggtccggcgtgacatgcagcaagagacactcgtcccgtgttgttgcactggaccttgagtcactcgacctccatggccaaatacctccttgcatcggcaacctcacgttcctcacaaggatccacatgccaaacaaccagctgcagggtcagatcccggctgagcttggccagttaaaccggctgcggccatcgatctttcgaggaattccctcagcggaagcatccccgaaggtctggggagcctcctcggcaacctctcggatttacgcctttcagacaacttggtgggctcaggaaaatgtggattggtgtataagggaagattttgggatgaggaacatgtagttgccatcaaagtattcaaacttgatcaactcggagcaccaaacagcttcctcgctgaatgtgaggccctgaggaatactagacaccgcaatctcgtgaaggtgatcactgcatgctcgacgattgattcagagggacatgatttcaaggccgtcattcttgagtacatgtctaacggcagcctggagaactggctctatccgaaattgaacaggtatggaattcgaaaaccgttaagtttgggctccagaatagaaatcgcagcggacatagcctgtgctctggattacctccataaccattgcgttcccgctatagtccattgtgacttgaaacccagcaacgtacttcttgatgatgccatggttgcacaccttggtgactttggattggctaagcttcttcacacttgtagctattcaattactcatagttcttctacaagcttgattggaccaagaggatcaatcggatacattgcaccagagtatggcttcgggagcaaactctctacacagggcgatgtctatagctatggaatcaccgtcttagaaatgctcacagggaagcgccccacagatgagatgttttctaagggtttgacccttcacaaatttgtgaaggaagcatttcctcaaaagattcatgaaattctcgatccttctatattcccggttacaagagatggtgataatcacacaacggatgaaataaccagaagcatcatgaaccttcttaagatcggtatctcgtgctctgcagatgcaccaacagaccgaccaacaatagatgatgtttatgctaaagtcatcacaatcaaagaaacatttttagatctatgccactaaggaatggaacaatcatttttactatttaaatcaggggggcattatgttttatttactctgtttgcttgggaagcttaggaatcaaataaattgtgggtcttgtcctttattttgtcattactcttatgtaatttgacgagtagagagctgacaagtctgtttgctaggtgtgaccgcagctccactgtggggcatacttgtaatattcttataactcaatgactctttagcaaacatccaaaccacaaagaccagttgtgccctgagtgaactcactgtattgttgggagatagatacaaaggattaagagtgatccaccaataaaaagagatttccgatcactatagttggctgtcaaaaaatagtggtccgaccatgttaactttcgatggctctgtgaggcgtcggaagttaataacttccaacaccaaccgtcaaaagttagataactttcgtatgcagttgaaatttactaacttccaa

SEQ ID NO: 205091 - DNA, 1858 bp, Zea Mays
ctctcccgcttccgcttcccctcagccgtcacctccccgctcccaccgccaccaatcgcactcgcagtggctgttggcgtgcgctcgcgtccaaaccaagcaaaccccacaaatcctaccttccgccggcgtcgccaccggccgtgctccctccctccggccccggttgaccctagcctcgcatcaccctaaccctacccccctcccgccgctgccagagcaggggaaaaagatgccgcgcgagatcatcacgatccaggtggggcaatgcgggaaccagatcgggatggagttctggaagcagctctgcctcgagcacggcatcggcaaggacggcctcctcgaggacttcgccactcagggtgaacaatttgttgatgatatcatggacatggttgacagagaagctgatggaagtgatagccttgagggttttgtcctgtgccactctattgctggtggaactggttcaggtatgggttcttatctattggagacactgaatgatcgatacagtaaaaagcttgtgcagacatatagtgttttcccaaatcaggtggaaacaagtgatgttgtcgtccaaccttacaactcacttttgactctgaagcggctgacactgaatgctgactgtgtggttgttcttgacaatacggctcttaataggattgccgtcgagcgccttcatctatcaaatcctacgtttgcacaaacaaactctttggtctccacggttatgtctgcaagcacaactactttaaggtatcctggatatatgaacaatgatctggttggccttcttgcctccttgattcccactccaaggtgtcattttttgatgacaggttatactccgttgactgtcgagcgccaggttaacatgatacgcaaaacgacggtattggatgttatgagaagacttctgcagacaaagaatataatggtgtcatcatatgctcgaacaaaagaagctagccaggctaaatacatctccatattgaacatcattcaaggggaggtggaccctacacaggttcacgagagcctgcaaagaatacgcgaaaggaagcttgttaactttatagactgggcacctgcaagcattcaggttgctttgtcaagaaaatccccttatgttcaaacaacccacagggttagtggtctgatgttagcaaatcatacaagcatccgtcatttattcagcaaatgcctgggacaatatgaaaagctaaggaaaaagcaggcttttcttgacaactacaggaagttcccaatgtttgcggacaatgatctatctgaatttgatgaatctcgagagataatagagagcctagttgatgaatacaaggcctgcgagtcgcctgactacatcaaatggggaatggaggaccctggagaggcaaatgttgtggcggcacttgactctaagttggtagtgtaaatataaagtgttgtgcagcaatccacgcaactgaggaagtgctgtctacaatctacattcaagtcatgttggtcatccagaccaaatatgctactgtcacatctagtagtcatcagtttgacgccgcctgcttctatagatccaatcggagtgcagccaaagtgggttttgacgttatttcgacctcaaatttgcctttagtctgtgctatgtatatttcgaaacccacttcctctggcctgttttcatttctttagggctagtttggtaacaccatttttccaagggatttttattttctcaagtgaaattagttcattttcccaaacgaaaattgaaatctcttgggaaaatgttgttcgcaaactatcccttactatatttattgagaatctcccttcgtgcgttgcctcctgc

SEQ ID NO: 205092 - DNA, 2182 bp, Zea Mays
gggatttttggataactgtgtatgcttgatgtagggatgctgaactacactggtgatagactcaattttggattagctgctgagcaggcaaaatctgaaggctataagatggagatggtcattgttggagacgattgtgcccttcctccacctagagggatagctggtagaagaggtttagctggaacaattcttgtgcataaggttgctggggccgcagcagatgctggtttatctcttgcagaggttgccgcagaagcaaaacatgcatctgaggttgttggtacgatgggagttgcactttctgtttgcacattgcctgggcaaataacttctgatcgtctaggtccaaggcaaatggagcttggccttggaattcatggagaacctggagttgctgttgttgaactccagccagttgacgtagtggtagaacatgtccttaaacagatattgtcacaggaaactcagtatcttcctgtcacaagaggttgcaatgctgttctcctagtgaatggattaggagccactcctatcatggaacttatgattgcagcgagaaaagcagttcctgagttgcaattggtgtatggcattgctgttgacagagtctacactggcacacttatgacatcacttgatatggcaggattatctattaccattatgaagtccggcgaaagcattttgaagagacttgatgctcccactaaagctccagcttggcctgttggttctgaaggaaaccgtccaccagcaaagtttcctgttcctctaccaccatcaccttcaatgaaggatgacgagattcttgctccatctcaggagctgagcaagcaagggtgtatcctggaggctgttattgaagcaagtgctactgaaattatcaatctcatggatagcctaaatgaatgggacagtaaagtgggcgatggtgactgtggaagcacaatgtatagaggtgcaacagctattcttgaagatatgaaaaagcgttaccctatgaatgatgcagcgggaacaataaatgaaattggggcaacaatccgaagggtgatgggtggaacaagtggaatcttgtatgccatactctgcaaggctgcgtatgcaagcttaaagcagagctcaactgtcactgcgaataaatgggctgatgctttagaggcctccattgctgctgttagcaaatatggtggtgccagcgcaggataccgcacaatgttggatgccctaattcctgcttctgctgttctgaaacagagacttgaggctggggatgatcccgtgactgctttcatcgcgtcttctgaagcagcatcagctggcgctgaatccaccaaacaaatgcaagcgaaggctggacggtcatcatacatcgctccagatctcctggcctcaatccctgatcctggtgcaatggctgcagctgcatggtacagagctgctgcccttgcagtgaagaacaaagtgcacggttcaaagagctagtagcatacgcaatgcttcattgctagacccaaaatagactgacaggaaaaatcactggggcattttctcactccccttagatttggtttccgcttgtgcttttgcatgggccgagaaaaaaaatgacttccatattgtctcacccttctcacatcatacaaagagatgttcaaagagttcgtcgtccgtacaagttaagggaagctatgcttttgcactgccgtgatatctcagcatgctgtcagtgttggaatgaccattgtttaatttgcccgagtttcgttttaatggctgagcccatgctgtcagtggtgggaatgatcgttgtttattctgcccgagtcccgtttcaattgtgcgcatttcggtaggatgtttaacaaaaaaacgttgtctttgaccgaggggtagtttgcactactgttgacttgtaatgttttttatcttgatcaatggcttgctgcatggtttctttctttctgggcaagattctcgaatggaacctaagacgtctatttatcgaggttttgcatatcatgaccaaattatcttgaggaaaacttgttactcgtacttgcctttgtatgcctgaacatctaattgtttttgtggttccgcaatttgcactttgatagcccgtaaataaaatattcaaatggagagatgcctatttaaaaaaaaagaaaagcaactg

SEQ ID NO: 205093 - DNA, 521 bp, Zea Mays
tggaaacatagaaatttatgtgtgtttgatggagcatcccccaacatcagcaccatcatgcaacatattcaggaggatgtcaccctgtggagcttggcaggagctaaagatctcaggaggtttcaacaaatcctagtgctgttgggggctgcagctgcaagagttctttcatggtgaaatagcttcaattaccttgaagagatcaataattggaaatagcattctgtagcgaatcatacgctttggatctgagtgtacaattgttattttttggtagttctgaagacgtttcttttttagttttgttactgttggaaacatcatcacaaactgtctggttcaatctgtacccctctaacttgtgatagttgtgatatgatgacaagtttatgtacataatcttgtagctattaacagttgactttatgttgctccttataaaattgcaaaataagacgaacagtatttttgtattgatatgactgaatatactgaaaatgtttttagtattaatcttcact

SEQ ID NO: 205094 - DNA, 420 bp, Zea Mays
atgaccttttcaggaaaggtttcaacaaatcctagtgctgttgggggctgcagctgcaagagttctttcatggtgaaatagcttcaattaccttgaagagatcaataattggaaatagcattctgtagcgaatcatacgctttggatctgagtgtacaattgttattttttggtagttctgaagacgtttcttttttagttttgttactgttggaaacatcatcacaaactgtctggttcaatctgtacccctctaacttgtgatagttgtgatatgatgacaagtttatgtacataatcttgtagctattaacagttgactttatgttgctccttataaaattgcaaaataagacgaacagtatttttgtattgatatgactgaatatactgaaaatgtttttagtattaatcttcact

SEQ ID NO: 205095 - DNA, 428 bp, Zea Mays
actcagcaagtgggtgaatatgcaaggtttcaacaaatcctagtgctgttgggggctgcagctgcaagagttctttcatggtgaaatagcttcaattaccttgaagagatcaataattggaaatagcattctgtagcgaatcatacgctttggatctgagtgtacaattgttattttttggtagttctgaagacgtttcttttttagttttgttactgttggaaacatcatcacaaactgtctggttcaatctgtacccctctaacttgtgatagttgtgatatgatgacaagtttatgtacataatcttgtagctattaacagttgactttatgttgctccttataaaattgcaaaataagacgaacagtatttttgtattgatatgactgaatatactgaaaatgtttttagtattaatcttcact

SEQ ID NO: 205096 - DNA, 2513 bp, Zea Mays
aaatcttggacaaccccactgcaaatttcggggccacctttttcgcgcattttcgagacgatcatcgttggttcgttgctctggactctggtctgttcaaaggcgagactggggacgaatcttggttcccaaatcccaatggcgctctgtgtgcgtctgtgtgtgtgatggacatggtcacatccaccctcttctgctcgccagttcttgctccactcgccggaccctgcttcttattccttcttttaaagctgcatcgattccatcctttacctcttttgctttcgcctagtttctctttccctttcgatcggtttgatgtgacagtcttgtcatcataggcacaccactccttgaccgcatcagtgaccggtgggactgagcactgactgcagtcgcgttgctctgcgcttcttcctggctggtgtcggcgaacagcaggaggaggaggcgagaagaatcttgggagcttagcttgcaatgccgaggctgtattcggaggaaggagcaggtgctgacgaggctaccgccgctgcgacagtgaggctggccaacaagatccggaagcgccgcgcggtgtcgtcgtcggggggctcggacccggcggcggtggggaggaggctgcggtccaggcggcccgcggtgcggctgccgcggcaccggaccagcgcgggcggggacatgtcggagtcgtcccggagccggcattgccgtggcagcggcaaccgtgtcgccgaagggacgctgccgtccgcgtctgcgaggaggctcgtcgacgcgttctggcagaacatgggcagcggtggtctgcttgacggggacgcggcggcggcgcgccggagcctggtcctgtggagcggcgcctccacgaaggtgtccaagaggtcgagaagtaagagcaaggtcttggaggctgatggtaagggaagtcggcgcaacggccatcctcggtggttttcagcagatctgatgagtaacggtagtgcaatggagtgcattgcgagctatggcgatactttgaacgccttttgccaacgtagtacacaaggtggtttccatgagcttgatatggttggtaccttttctcaagacgatgtttcaagatgtcctgaaaagacagtgaacctagatgatctgcagaacagcttgattgcagctaaggagctggtaaaagtacttgcccacatatggggacctggagagctgaatccgtcaagtgcatcactcatttctgctctacgttcagagcttgatgttgcccgttctcatgttagaaagctaatcaaagaacagaaatctgatgcctttgaaattgaggacttaaagttgcaacttacagaagaattggaatcgtggaaggtcaaacaaaaggagaaggttggaaatgctctccgatttgtagtttcagagctagacactgagaagaagtcaaggaaaagagcagagaagacaaataagaagttgagcattgccttagcaaacactgaagcctctttgcaggcagtgacgaaagaacttgaaagggagaggaagtataaaagaagagttgagaagatctgcaacgagcttatcagaggcattgatgaggacaaagctgaggtgcaggcactgaagagggaaactgagaaggcacaagaagagctccagaaagagcgtgaaatgcttcaacttgcagatgagtggcgtgaacaaagggttcagatgaagcttttagaagcacgggttcaatttgaggagaaaaatgcagctgttaatcagctgcgcgatgaactccaagcttatctggatactaagaaagagcaggaaccgttgaatgatccaatggaactgtcccatgcatctgaaattggcaacactgcagctgatttagttcctgacagaaatggtggaaacatcagcgaagacgcctcagaaggcagtgatatacactccattgagctaaacgtcgatggcatcaacaggacctacacctggagctacactccttcctcaaaaggcaggcagaggagcccatcaaggcatgaaccgttttcggatagagggatggatggagtgaactcgtggcgtttagagcaaagttttcgggacatggatgaagaactggagggagactgggcagaagggtgcagcaacggaatgctgaacttggatcatgacgaggagaggtatctggctatcaagaatctgagagagcagatgttggccgggtcggggttcatcctgtcacaaggtagagaaaatgctaaaagagagtattgtggcttgtaagataaactgaacaagaaaaattaaaagtaatgtgccgtatgaatcgctgcttgatgctagatccaactgttcaaggatatatatagtgatggttctctgtggattactttccccttgtaaatatcttgagctcttgaaaggttaggttacagggctggtgtgttcatgttcatgattctgatgtcttgtatgtgtgttaatgtccatttaagtgtctggaaatagtttataaaacgtgattggaa

SEQ ID NO: 205097 - DNA, 2577 bp, Zea Mays
ccgccgcaagccgacgtcctacactcctactccctcgtgctcccaacctcgcccgcctatccctcgcttccccagacccctcaccggcgggcgtagctagcgtacgtccatccatccgtccatgctccaccgccaccagcccgccgttccgacaagctccaatcatacgcaccaccggaccaccctcggcaaggagggacaagctcacgcgcctcgcgccctgcccggcccgacctcgagcagatcgacacatgcacgcacgacgtagacgatacacaacagtacgcgggggcgcactgacacacgcccgcactatcatccctgtcccccgtccgtccatctccccactcgtgcgagttgcgaatttgcgatgcgccgcctgagcagaagctccaaagcctcatgatggcagcacgggccagagccagcactcgcagcagctgatccgagctcgtacaggcgcgccaggcagcacatcaatgggcacaccactccttgaccgcatcagtgaccggtgggactgagcactgactgcagtcgcgttgctctgcgcttcttcctggctggtgtcggcgaacagcaggaggaggaggcgagaagaatcttgggagcttagcttgcaatgccgaggctgtattcggaggaaggagcaggtgctgacgaggctaccgccgctgcgacagtgaggctggccaacaagatccggaagcgccgcgcggtgtcgtcgtcggggggctcggacccggcggcggtggggaggaggctgcggtccaggcggcccgcggtgcggctgccgcggcaccggaccagcgcgggcggggacatgtcggagtcgtcccggagccggcattgccgtggcagcggcaaccgtgtcgccgaagggacgctgccgtccgcgtctgcgaggaggctcgtcgacgcgttctggcagaacatgggcagcggtggtctgcttgacggggacgcggcggcggcgcgccggagcctggtcctgtggagcggcgcctccacgaaggtgtccaagaggtcgagaagtaagagcaaggtcttggaggctgatggtaagggaagtcggcgcaacggccatcctcggtggttttcagcagatctgatgagtaacggtagtgcaatggaggttggtaccttttctcaagacgatgtttcaagatgtcctgaaaagacagtgaacctagatgatctgcagaacagcttgattgcagctaaggagctggtaaaagtacttgcccacatatggggacctggagagctgaatccgtcaagtgcatcactcatttctgctctacgttcagagcttgatgttgcccgttctcatgttagaaagctaatcaaagaacagaaatctgatgcctttgaaattgaggacttaaagttgcaacttacagaagaattggaatcgtggaaggtcaaacaaaaggagaaggttggaaatgctctccgatttgtagtttcagagctagacactgagaagaagtcaaggaaaagagcagagaagacaaataagaagttgagcattgccttagcaaacactgaagcctctttgcaggcagtgacgaaagaacttgaaagggagaggaagtataaaagaagagttgagaagatctgcaacgagcttatcagaggcattgatgaggacaaagctgaggtgcaggcactgaagagggaaactgagaaggcacaagaagagctccagaaagagcgtgaaatgcttcaacttgcagatgagtggcgtgaacaaagggttcagatgaagcttttagaagcacgggttcaatttgaggagaaaaatgcagctgttaatcagctgcgcgatgaactccaagcttatctggatactaagaaagagcaggaaccgttgaatgatccaatggaactgtcccatgcatctgaaattggcaacactgcagctgatttagttcctgacagaaatggtggaaacatcagcgaagacgcctcagaaggcagtgatatacactccattgagctaaacgtcgatggcatcaacaggacctacacctggagctacactccttcctcaaaaggcaggcagaggagcccatcaaggcatgaaccgttttcggatagagggatggatggagtgaactcgtggcgtttagagcaaagttttcgggacatggatgaagaactggagggagactgggcagaagggtgcagcaacggaatgctgaacttggatcatgacgaggagaggtatctggctatcaagaatctgagagagcagatgttggccgggtcggggttcatcctgtcacaaggtagagaaaatgctaaaagagagtattgtggcttgtaagataaactgaacaagaaaaattaaaagtaatgtgccgtatgaatcgctgcttgatgctagatccaactgttcaaggatatatatagtgatggttctctgtggattactttccccttgtaaatatcttgagctcttgaaaggttaggttacagggctggtgtgttcatgttcatgattctgatgtcttgtatgtgtgttaatgtccatttaagtgtctggaaatagtttataaaacgtgattggaa

SEQ ID NO: 205098 - DNA, 2027 bp, Zea Mays
cgcgaacgcgacgtccgtccacctcggcccccgctggtttgcgttcgcgcagtgactgaccacgcggccgtgcgggcgcgagacgggaccagtgagtcagtgaccaccacgcgctcgtggctaccggcttcgctcccagatcccgccgcgcgcgcgagccccgaggactgaccatggaggagcccacggagtccaggccagctggcgcggaggatctcgcgaacggcgcgaaagacccggaggggcctccgccggaggttgaggaggaggaagtggaggagccgccacgatcggcgacggcgaagcaggaggaggcgaaggaggtactagggtcggaggggtctcgcccgttcaccatgcgggagctgctcggcgaactcagggaggacggcgagacggcggtcggcggcagcaccgcgagatctgcgttcggcgacgggaacggggtcggatccgctgatgccgagggctcgtcctacagtgtaactggagttgacgaggaaggacgttctcgccaaaggattctttcttttgctgctaaaagatacgtaaatgcaattgaaagtaatcctgacgaccctgatgcatattataattgggctctagtcctccaggagagcgcagacaatgtggatcccaattcgagttcctctaaagatgcattgctggaggaggcttgcaaaaagtatgctgaagctactcgacttagtccaactctttatgatgcatattataactgggctattgctattgctgatcgggctaaaatgcgaggtcggacaaaagaagccgaagaactctggaagcaggcaatactgaattatgagaaggctgtccagcttaattggaatagcccacaggctctcaataactggggtcttgggctacaggagctgagtgcaattgttcctgcccgggataaacagaccatcataaaaacagctatcagtaagttccgtgctgcaattcagctgcaatttgatttccatcgggcaatatacaacctcggaactgtcttgtatggtttagctgaggataccatgagatctgggaagccagatgtctccccaaatgagctttacagtcagtctgctatctatgttgcagctgctcatgctctgaagccaaattactcggtctatcgtagtgccttgcgactagtccgctcaatgttgcctctgccatatctcaaagtggggtatttgactgctcctccagctaacaattccatcgcaccacacggggattgggaggtatcacagttcattttgaatcatgagggcctccagcaggctgatgcttctgaccagcctccatcgcaatcccctgggcatttggacaggggcagaaagcctgtcagaataaacgttgcagatattgtttcagtgtcagcatgtgccgatttaactttaccaagtggtgctggcctctgtatagaaactattcatggtcctacgttcttggttgcccatagttgggaggctcttgacggctggctagatgccatacgccttgtctacactatttttgcgagagggaagagcgatgtgcttgccggtattattactggttaaatggcttgctgcaggagggaagagcgatgaactagccgggtgttgttactgccactggagaggcgcgaagttttggtgattcagcgtcagccttatcagttaaatgcccccttcgatttgttagtatgcctcccatctgtgatgtcagtcttcctagatatagggtatatcaatcatatattcggttgtaactcgtactttccagtgattggcgataggtccgttttttctttgtaaaagtggccgtgttactgtattatgcattcacagcatatgtatcggacattctttaagtttgattatatttctctgtaacaatgaatcgaggcaagatgggctctggccctgctgggctccacctccaatatgtagagccgaggaacaggagggaaagaacaatgatatactccctcattccaaattataatgtgtttttgtttgcttttctagaca

SEQ ID NO: 205099 - DNA, 1159 bp, Zea Mays
atcaagcccatcaaagccttgcatagcactggccctgtggcccatcaaagaaggactgccttataccaagacaagtcaacaacaacaacggtaggccccagggcggcgccttttttctccttacaactgacggttttatttctcggcgacctcccctgctatatgcatttgtgcaagacgtgaaagcagccatccacgtccattagatgtcaatccaacggttgattagagaagcacacaagaaaggtgcaaagattgtactcgttcaggaattgtttgaggggcactatttctgccaagctcaaagactggatttctttcggcgcgctaagccttacaaaggcaatccaactattataaggatgcaacagcttgcaaaggagctggaagttgtcatacctgtcagttttttcgaagaagcaaacaatgcacattataattcggtggctattatcgatgctgatggcgctgatcttggactctatcgcaaatcacacattccagatggaccaggatatcaagagaagttttatttcaaccccggtgacactggctttaaggctttcaaaaccaagtatgccaccattggtgttggaatctgctgggatcagtggtttccagagtgtgcaagagcaatggcacttctgggggctgaaatactgttttatcccactgcaattggatccgaaccccaggattgtaacctggattcccgtgaacattggaagcgggttatgcaaggccatgctggtgccaacttggtccctcttgttgcttccaaccggattggcagagaaactgttgacactgagcatggcaagagctcgataaccttctatgggaattccttcattgcaggaccaaccggagaaatagtgaagcttgctaacgacaaagacgaggaagtgctggtggcagagtttgacttggatgagatcaagtcgattaggcatggttgggggatattcagggaccggcgccctgaactatacaaagtgctactgacgttggatggcgagaaacaatcataaaccccggtctcacgcttaatagtggtatatgtactcctatgtgttttcctaaagggatgcctctagaaactcggacacttcggggtcccatgttggaacttccacagtagaggaagttcacaaagcag

SEQ ID NO: 205100 - DNA, 1366 bp, Zea Mays
ctgccttttcccccctactctgtgcacacactcgagagtcgagactcagttgtcaccgctccccgccgtcctgctgataagattgctcacatctgctccctccccagacagcaagtgaagaatcaggttgattagagaagcacacaagaaaggtgcaaagattgtactcgttcaggaattgtttgaggggcactatttctgccaagctcaaagactggatttctttcggcgcgctaagccttacaaaggcaatccaactattataaggatgcaacagcttgcaaaggagctggaagttgtcatacctgtcagttttttcgaagaagcaaacaatgcacattataattcggtggctattatcgatgctgatggcgctgatcttggactctatcgcaaatcacacattccagatggaccaggatatcaagagaagttttatttcaaccccggtgacactggctttaaggctttcaaaaccaagtatgccaccattggtgttggaatctgctgggatcagtggtttccagagtgtgcaagagcaatggcacttctgggggctgaaatactgttttatcccactgcaattggatccgaaccccaggattgtaacctggattcccgtgaacattggaagcgggttatgcaaggccatgctggtgccaacttggtccctcttgttgcttccaaccggattggcagagaaactgttgacactgagcatggcaagagctcgataaccttctatgggaattccttcattgcaggaccaaccggagaaatagtgaagcttgctaacgacaaagacgaggaagtgctggtggcagagtttgacttggatgagatcaagtcgattaggcatggttgggggatattcagggaccggcgccctgaactatacaaagtgctactgacgttggatggcgagaaacaatcataaaccccggtctcacgcttaatagtggtaaggcacaggcaggctccagctccacatcaatgttagattttttttttctccttttttaccctgtccaacgatgccatgcctgcatttgtacaagccatctgcgcgtgttcaccatttcacattcagcaaaataaataattttcgtgcaatgtcattctatgtcgggggagaatttagagctccagttcatgactgcatcaatggttcctcgttaaactttgatttatgggtagcattggtctatcaaagtaggaaggtcatacctggcagaaggtgcggaatcagcatatttgattccaaatgccattcacgatggtcgatggcctttaaccgtcaaccatccactacctttggcatgtgacatgtacctttttttccatcaaaaagctcaggattcttgtg

SEQ ID NO: 205101 - DNA, 1065 bp, Zea Mays
ctgccttttcccccctactctgtgcacacactcgagagtcgagactcagttgtcaccgctccccgccgtcctgctgataagattgctcacatctgctccctccccagacagcaagtgaagaatcaggttgattagagaagcacacaagaaaggtgcaaagattgtactcgttcaggaattgtttgaggggcactatttctgccaagctcaaagactggatttctttcggcgcgctaagccttacaaaggcaatccaactattataaggatgcaacagcttgcaaaggagctggaagttgtcatacctgtcagttttttcgaagaagcaaacaatgcacattataattcggtggctattatcgatgctgatggcgctgatcttggactctatcgcaaatcacacattccagatggaccaggatatcaagagaagttttatttcaaccccggtgacactggctttaaggctttcaaaaccaagtatgccaccattggtgttggaatctgctgggatcagtggtttccagagtgtgcaagagcaatggcacttctgggggctgaaatactgttttatcccactgcaattggatccgaaccccaggattgtaacctggattcccgtgaacattggaagcgggttatgcaaggccatgctggtgccaacttggtccctcttgttgcttccaaccggattggcagagaaactgttgacactgagcatggcaagagctcgataaccttctatgggaattccttcattgcaggaccaaccggagaaatagtgaagcttgctaacgacaaagacgaggaagtgctggtggcagagtttgacttggatgagatcaagtcgattaggcatggttgggggatattcagggaccggcgccctgaactatacaaagtgctactgacgttggatggcgagaaacaatcataaaccccggtctcacgcttaatagtggtatatgtactcctatgtgttttcctaaagggatgcctctagaaactcggacacttcggggtcccatgttggaacttccacagtagaggaagttcacaaagcag

SEQ ID NO: 205102 - DNA, 1354 bp, Zea Mays
gccttttcccccctactctgtgcacacactcgagagtcgagactcagttgtcaccgctccccgccgtcctgctgataagattgctcacatctgctccctccccagacagcaagtgaagaatcaggttgattagagaagcacacaagaaaggtgcaaagattgtactcgttcaggaattgtttgaggggcactatttctgccaagctcaaagactggatttctttcggcgcgctaagccttacaaaggcaatccaactattataagcttgcaaaggagctggaagttgtcatacctgtcagttttttcgaagaagcaaacaatgcacattataattcggtggctattatcgatgctgatggcgctgatcttggactctatcgcaaatcacacattccagatggaccaggatatcaagagaagttttatttcaaccccggtgacactggctttaaggctttcaaaaccaagtatgccaccattggtgttggaatctgctgggatcagtggtttccagagtgtgcaagagcaatggcacttctgggggctgaaatactgttttatcccactgcaattggatccgaaccccaggattgtaacctggattcccgtgaacattggaagcgggttatgcaaggccatgctggtgccaacttggtccctcttgttgcttccaaccggattggcagagaaactgttgacactgagcatggcaagagctcgataaccttctatgggaattccttcattgcaggaccaaccggagaaatagtgaagcttgctaacgacaaagacgaggaagtgctggtggcagagtttgacttggatgagatcaagtcgattaggcatggttgggggatattcagggaccggcgccctgaactatacaaagtgctactgacgttggatggcgagaaacaatcataaaccccggtctcacgcttaatagtggtaaggcacaggcaggctccagctccacatcaatgttagattttttttttctccttttttaccctgtccaacgatgccatgcctgcatttgtacaagccatctgcgcgtgttcaccatttcacattcagcaaaataaataattttcgtgcaatgtcattctatgtcgggggagaatttagagctccagttcatgactgcatcaatggttcctcgttaaactttgatttatgggtagcattggtctatcaaagtaggaaggtcatacctggcagaaggtgcggaatcagcatatttgattccaaatgccattcacgatggtcgatggcctttaaccgtcaaccatccactacctttggcatgtgacatgtacctttttttccatcaaaaagctcaggattcttgtg

SEQ ID NO: 205103 - DNA, 1547 bp, Zea Mays
gcaaggaatccggcggttaccgatcgagactagttccaaccaggagttggaaacgaaacctccacccaggaacccctgctcgagccggcggaggcggcggccggagcagattaacagagcttttcgagcttgcaaggaggattcaacatgcggaggaagctgctgcagttcccgtccctcgtcgcgcagcacgccctccgcggggccccaacacccagattccaaccccagccccaccaccaccgcttcctgcactccccctccgcgcccacatccgcatccccttcctcctccccgtcggcccacctcatatggaatcgcctctccggctctaccgggatctctcccttaccgaggaccgccgcggacgtcgcagcggccgcgcggaccgccgcgtcccggtggttggccaccgcgcgcggcgcccgctctctcgatctcttctcgctgccgcggtggcgcagggcctcggggcggcagttctcgccttcccctttcctccaaggcgcgacctgggcgtcctggatggagtccgccgacggggcggtgtggatgctcatcggtgcgaatgttgctgtcttcctgctgtggcgtgtggccgatccagggttcatgaggaagcatttcatgatttcactggacaatttcaagagtggacggttgcacaccttgctcacgagtgctttcagccatgcagagtttaatcacctctttgccaatatgtttggcctcttcttctttgggagcagtattacgaatgtgtttggtcctgcctttctattgaagttgtatgttggtggagcacttactggatcagtattcttcttgctggagaaggcttttctagcctatcggaaacaggattatgtaggatgggatacttcaagagctgctgaacttggtgcaagtgctgcagttaatgcaactatgcttcttcaaatttttctgtatcccaagggactagtgtatatttactttgtcattcctgttccagctgcacttatgggcgcaggtttgattggtgctgatttagtgaggttgaaggtccacctggctctggaaagggaactcagtctcctattatcaaggatgaatattgcttgtgccatttagccactggtgacatgctgagggctgctgtggcggccaagacacctctagggagagcttgtttcagatgatttggttgtgggcattattgatgaagctatgaagaaaccctcatgccagaaaggtttcattcttgatggctttcctagaattgtgactcaagcacagaagcttgatgagatgttggcaaagcaaggtgccaatgttgacaaagtcctgaactttgcaattgatgatgttgtattggaagaacggattactggtcgttggatccactcagccagtggtaggacttaccactcaaaatttgcacctccaaagtctccaggagttgatgatgtaagtcgagtacagaacatttaattaagctgcttatttttatgtttccacgatcttatttatatgattactattttcttctagacttagtgtggatc

SEQ ID NO: 205104 - DNA, 644 bp, Zea Mays
aaaggcccttcccagacccgactcatatgatggcttggggtccaatgcctcgatccttgagggaagtgatgacgatgatttagaccaactcctaagaacacctaacagcgacactgtgtcttcaagggacaagacattaactcctggcagggatagtctctaattgttctcctttgatagcaaaatagaggcaagtgctttgatgttcacgtctcatggtggtatggggttggcctgatcatatcatcatctgctgtcaaaatttggtggcgcgctagtctggggtgatgaaggattgtttgatattgttgctattatcagttgttgaggttgatatagctgcctatagtgttaatgtgatcatactttgttgtggtattatcatgtggcgaaggccaagttaaccagcatgtcatggttgtttgtgtgcgccggtgtttgtagtgtggcatattgtctgagtaagtagagggtttggctagtcatctcacgtgacctttcctttgaaacgatgatggtgtgtataagtgatttcttctgtacaaaaattattgacagagtttgaaatggttttccagatatattatttgtgatctgaactcaggcatggactcgcacgtaacctatcctctactggagcgaat

SEQ ID NO: 205105 - DNA, 1406 bp, Zea Mays
tctgctactaggggtactagaattcaaaagggaaaatgatcaaattcaagaagggggaactgacaaaccttgagtcctggaacccagtcaaaatgcttattactgatacaagagttggtaggaacacaaaggcattggttgctggtgtgtctgaaagggcgtctaggcatccagatgctatggcttctgtcttccatgcagtgaactctattagtgaagagctttcaagcattgttgagttagcagccgaggatgagatagccatcacctctaaggaggataagctagcagagcttatggagatgaaccaaggtttgcttcagtgtatgggagtcagccattcttctatagaaactgtgttgcggaccactctgaaatatagcttggtctcaaagctaactggagctggtggtggaggctgtgtgttgactctaataccgacgtgtatccttttttatatatcccctggctgcatcttttcctttatggttttatacaaaataaacaccatacaacttatgtgtgatttctgttaatctttaacatttcaactcaaagcttttcagaaatctgggtcttgatatttgcattaataatgaacctgacagtttgggaacttgagaactacagtggcctgtcttatgctctctctgtttgaaatcgtagttcattttggctttgtcctaagtcgattttttttttaactttgaatgaagtgcttgttacttaacactatatagtcatgtagaataattctaggttccatcccatctaatatatatgaggtttttaaataaatatatcaatgtggaaggacaggatctgtagcagtttaaattcctaaacatccatagatctcatcgtatctgagtttctgttctgtacctacttagagaagtttttcatctgactgtcattttcaataatgtcaaatgcttccttgacatgattatcagtatcggccaatactgttctggagaaagtcaccacagagctcgaatctcacggttatcgctgcttcaaagttgaggttggtgggcgaggtctccaagtattccgtggatagcactcatcctatttcaaggagatgttgtaccaaacttagatggcttacctgcattgaagctgtttagattctcttcttgagttattccaagatcatgataggatattcttctcctaagcctagcaggttcttgtatccagtactttgctccaggattaggacattcttatgctatccctagcgatcttgtatcaaataagctcatagatgcatgatcattgctggtgtgattgttgtattaagtaaacagacttttaattgctccaaatgtcgtatcgacttcatgatgccagcagctacccatatgtgcgagtgcgacctctccacaggcggcttcaac

SEQ ID NO: 205106 - DNA, 833 bp, Zea Mays
tactatagtacaagatagagataaggcgtaccgatccggtttaaaagatccgctactagtgtcaccggcaacgtgtcgacgcggtcgtgtgtgttcctggtgaggaagcgaaccctgcctgcttacttgccgggcaagaagtgagaacagcgtggggtgcggaagcgaccggaccggggatggctacaagaaggaccgtggcggcgagcgttactgcccagcggcctgcgtgggcggccgtggcgaggaggatggagggcgtgtcgcgctacttcagcgacaaggcctccggcaggctgctcagcgaggaggagcgcgccgccgagaacgtctacatacagaagctggagaaactgaggaggaaggaggacaaggccaaggccgaggcggccaagagggccgccgccgccgccagaggcgacacgaagaatggtgaggaggctcatccgagctgattgatcatcgcaaaatcagaccggtgctcccgtgaatcctgtgatgctgtactactgatgacacgtagatgcaaatagacgccgtcgtactaggtactactctgcatggagaggaacgtttgctctcttttgcaactctgctcgtcgtgtcgtgtgtaatcccatccctgtcacggttgtgaacttcgcttgtagctagcgacggttttgccttgccttgtcccttgtcggtgcaactggagtggagtggaggcgtccttgagcctcttccatgtacataggttgtcaataataataatgaataaatgtagtcccctcgtcgaaaacaataaaaaaaggtcccagaagagtggatatctcgctttggcatgggtcccg

SEQ ID NO: 205107 - DNA, 1912 bp, Zea Mays
ccgctttgtctctctgccgtccctgtgtggctcgtgtggctggctgtgtcctccatcctttcaaggacctcgggaatccagaaaattccggtggtcggtgcccacggacaggcgtgtgcgccacgagcccgacgaacaagggaacgaggccatttccaccggtcaaactaggagaagcaagcaaagctccccgccattagtagaatccgcccgaagtctgccccgctcttcggcctcgtcccttctctccaggtgctaatgagtttggccagttgggagatgggacagaggacagcgcgaaagagcccaagaaggtcaagtcattggagactgagtttgtaaaatcagtatcctgtggcgcacattgtacagctgccgtcgctgagcctcgagaaaacgatggcacggtatcgaaaagcaggctttgggtttggggacaaaatcagggttcagattaccctcgtctattttggggagctttcacaccaaacacggtgattaagcaagtttcttgtggagctgttcatgtcatggctctatccgaggatggtctactgcaagcatggggctacaatgagtatggtcagcttggcagaggtcgcacttctcaaggacttcagggagctcgtgtgttaaatgcttatgcaaggttccttgatgacgcccccgagcaagtgaagattgttagagtgtcatgtggagagtaccatacagcagctatatctgaaaatggggaggtgtatacttggggactgggaagcatggggcagcttgggcattgctccctccaatctggagataatgagctgatccctaggcgagttgtggcccttgatggtatagtagttggggacgtttcttgtggaggtgtccactcttgtgctgtaactgaagggggagctctatatgcctggggcggaggacatgtgggtcagctgggagtcgggcctcagggtggcttcttctcttgctcccttaatggatccgacatgctgctccgaaacatcccagtcctggtgataccctcaggtgttcgtcttgctacctgtgggcactcccacacacttgtgtctatgaaagatggccgcatatatgggtggggctataatagttacggtcaagcgacgaacgagaaatctacttatgcttggtttccctctccggtcgattggtgtgttggtgaagtgagacgactcgccgctggaggtggccattctgctgttctgactgatgcatgttcgctgaaagagctgtgcgaattcaagctcgcagagaccgtgaacctttcaaatgctcagctaatagaagatgttgcatcgcggactggtgcggatgccttggcacgcttgtgcgagaaagtaagggagcatttggataaggaaggagaatgtgaattcctggaaaagcaagtggcagaagaggtcaacactataggcagttaggccactagcaaaacagttcaagcagtctgaggctgaagccagtctgggattaaacagggagtcatctacaattgatagcttgacctcccagtaaagttactgattcggacattaattgttgtggtgatcatggaaaatatgtgactcgtcaattgattctgattggtctgtagacctccattggtggtgagcctctcagctgcatcggggaggcgcagaggctctatatgtgtcatgatcttgttccgaactgtcaggttgctgtaatgtagccaaatggaaacctttgtatccctggaacttgaaaggcatgtacctggtatctgcagccagtaagtttggcaatctgaattcgatgccaattcctgggcgtattcgaacgtcctacgtccatgtatttatttcagttcatgtgcatctaaacaatattggtatagcatgaaatttaagtacatcaacacacatttaat

SEQ ID NO: 205108 - DNA, 1736 bp, Zea Mays
tttgtctctctgccgtccctgtgtggctcgtgtggctggctgtgtcctccatcctttcaaggacctcgggaatccagaaaattccggtggtcggtgcccacggacaggcgtgtgcgccacgagcccgacgaacaagggaacgaggccatttccaccggtcaaactaggagaagcaagcaaagctccccgccattagtagaatccgcccgaagtctgccccgctcttcggcctcgtcccttctctccaggtgctaatgagtttggccagttgggagatgggacagaggacagcgcgaaagagcccaagaaggtcaagtcattggagactgagtttgtaaaatcagtatcctgtggcgcacattgtacagctgccgtcgctgagcctcgagaaaacgatggcacggtatcgaaaagcaggctttgggtttggggacaaaatcagggttcagattaccctcgtctattttggggagctttcacaccaaacacggtgattaagcaagtttcttgtggagctgttcatgtcatggctctatccgaggatggtctactgcaagcatggggtatacttggggactgggaagcatggggcagcttgggcattgctccctccaatctggagataatgagctgatccctaggcgagttgtggcccttgatggtatagtagttggggacgtttcttgtggaggtgtccactcttgtgctgtaactgaagggggagctctatatgcctggggcggaggacatgtgggtcagctgggagtcgggcctcagggtggcttcttctcttgctcccttaatggatccgacatgctgctccgaaacatcccagtcctggtgataccctcaggtgttcgtcttgctacctgtgggcactcccacacacttgtgtctatgaaagatggccgcatatatgggtggggctataatagttacggtcaagcgacgaacgagaaatctacttatgcttggtttccctctccggtcgattggtgtgttggtgaagtgagacgactcgccgctggaggtggccattctgctgttctgactgatgcatgttcgctgaaagagctgtgcgaattcaagctcgcagagaccgtgaacctttcaaatgctcagctaatagaagatgttgcatcgcggactggtgcggatgccttggcacgcttgtgcgagaaagtaagggagcatttggataaggaaggagaatgtgaattcctggaaaagcaagtggcagaagaggtcaacactataggcagttaggccactagcaaaacagttcaagcagtctgaggctgaagccagtctgggattaaacagggagtcatctacaattgatagcttgacctcccagtaaagttactgattcggacattaattgttgtggtgatcatggaaaatatgtgactcgtcaattgattctgattggtctgtagacctccattggtggtgagcctctcagctgcatcggggaggcgcagaggctctatatgtgtcatgatcttgttccgaactgtcaggttgctgtaatgtagccaaatggaaacctttgtatccctggaacttgaaaggcatgtacctggtatctgcagccagtaagtttggcaatctgaattcgatgccaattcctgggcgtattcgaacgtcctacgtccatgtatttatttcagttcatgtgcatctaaacaatattggtatagcatgaaatttaagtacatcaacacacatttaat

SEQ ID NO: 205109 - DNA, 2928 bp, Zea Mays
ctcgtgtggctggctgtgtcctccatcctttcaaggacctcgggaatccagaaaattccggtggtcggtgcccacggacaggcgtgtgcgccacgagcccgacgaacaagggaacgaggccatttccaccggtcaaactaggagaagcaagcaaagctccccgccattagtagaatccgcccgaagtctgccccgctcttcggcctcgtcccttctctccagggccatggatgtagatgatgtgctcagtaacttgcgtgttgttggtgtgccaacaaagagtgcaatttacatatggggttataaccacagtggccagactgcccgaaagggcaaggaatgccacttgaggatccccaagagcctccctcccaaactattcaaattggggaatgggaagagcctcaggtggaccgatattgcatgtggccgtgagcataccgctgcagttgcttccgatggatcactgttcacctggggtgctaatgagtttggccagttgggagatgggacagaggacagcgcgaaagagcccaagaaggtcaagtcattggagactgagtttgtaaaatcagtatcctgtggcgcacattgtacagctgccgtcgctgagcctcgagaaaacgatggcacggtatcgaaaagcaggctttgggtttggggacaaaatcagggttcagattaccctcgtctattttggggagctttcacaccaaacacggtgattaagcaagtttcttgtggagctgttcatgtcatggctctatccgaggatggtctactgcaagcatggggtactgtgcaaccttattcatgatttttaaagcaatgtactggcctgttgttctttactgacttggtgcaaaccttgtcaatcagaagtggtagaacttattgtttgggtatgaagatagcttgttgagagttgtgactgaaaatccttcttttttaaaaaaaccaacaacaggatgcacggccacttgatttcaaaatttatatttctgactattgatgggacgtgctattttcttactaaccaggctacaatgagtatggtcagcttggcagaggtcgcacttctcaaggacttcagggagctcgtgtgttaaatgcttatgcaaggttccttgatgacgcccccgagcaagtgaagattgttagagtgtcatgtggagagtaccatacagcagctatatctgaaaatggggaggtgtaagtccattagtcatcccaagggagctgttctctgctgccagtgactgttgtatggtttctcacatgacaacatagaagcatttggaatattgaagactaaccacgactaactatagggctaactgcaaagaaaggaagtaaatacatttatattatagatctcatattgatcaactaatctcaatatggcgtcagggttactctaaatagctttctgctatttaagatctttgtgcacatagatcgaagtgggccttctcttgagcatcctagtgtcttagtgaatgcaaagaaatgtgaagaattaaatggatgttgttatatcattattatagttgaataacttgtcaatcatttgctgaatctatcgatttgctagcttatatacgacaggaaaaaaaaaagattgttataatttcactttcaacatttgtagtcaaaatcattccgatttcatacttttcgcttttttgatgattgaaaacctattccaagtagggacttgattatttgtaattataatatctttggtttttgcaggtatacttggggactgggaagcatggggcagcttgggcattgctccctccaatctggagataatgagctgatccctaggcgagttgtggcccttgatggtatagtagttggggacgtttcttgtggaggtgtccactcttgtgctgtaactgaagggggagctctatatgcctggggcggaggacatgtgggtcagctgggagtcgggcctcagggtggcttcttctcttgctcccttaatggatccgacatgctgctccgaaacatcccagtcctggtgataccctcaggtgttcgtcttgctacctgtgggcactcccacacacttgtgtctatgaaagatggccgcatatatgggtggggctataatagttacggtcaagcgacgaacgagaaatctacttatgcttggtttccctctccggtcgattggtgtgttggtgaagtgagacgactcgccgctggaggtggccattctgctgttctgactgatgcatgttcgctgaaagagctgtgcgaattcaagctcgcagagaccgtgaacctttcaaatgctcagctaatagaagatgttgcatcgcggactggtgcggatgccttggcacgcttgtgcgagaaagtaagggagcatttggataaggaaggagaatgtgaattcctggaaaagcaagtggcagaagaggtcaacactataggcagttaggccactagcaaaacagttcaagcagtctgaggctgaagccagtctgggattaaacagggagtcatctacaattgatagcttgacctcccagtaaagttactgattcggacattaattgttgtggtgatcatggaaaatatgtgactcgtcaattgattctgattggtctgtagacctccattggtggtgagcctctcagctgcatcggggaggcgcagaggctctatatgtgtcatgatcttgttccgaactgtcaggttgctgtaatgtagccaaatggaaacctttgtatccctggaacttgaaaggcatgtacctggtatctgcagccagtaagtttggcaatctgaattcgatgccaattcctgggcgtattcgaacgtcctacgtccatgtatttatttcagttcatgtgcatctaaacaatattggtatagcatgaaatttaagtacatcaacacacatttaat

SEQ ID NO: 205110 - DNA, 1530 bp, Zea Mays
gtggctggctgtgtcctccatcctttcaaggacctcgggaatccagaaaattccggtggtcggtgcccacggacaggcgtgtgcgccacgagcccgacgaacaagggaacgaggccatttccaccggtcaaactaggagaagcaagcaaagctccccgccattagtagaatccgcccgaagtctgccccgctcttcggcctcgtcccttctctccagggccatggatgtagatgatgtgctcagtaacttgcgtgttgttggtgtgccaacaaagagtgcaatttacatatggggttataaccacagtggccagactgcccgaaagggcaaggaatgccacttgaggatccccaagagcctccctcccaaactattcaaattggggaatgggaagagcctcaggtggaccgatattgcatgtggccgtgagcataccgctgcagttgcttccgatggatcactgttcacctggggtgctaatgagtttggccagttgggagatgggacagaggacagcgcgaaagagcccaagaaggtcaagtcattggagactgagtttgtaaaatcagtatcctgtggcgcacattgtacagctgccgtcgctgagcctcgagaaaacgatggcacggtatcgaaaagcaggctttgggtttggggacaaaatcagggttcagattaccctcgtctattttggggagctttcacaccaaacacggtgattaagcaagtttcttgtggagctgttcatgtcatggctctatccgaggatggtctactgcaagcatggggtgtgttggtgaagtgagacgactcgccgctggaggtggccattctgctgttctgactgatgcatgttcgctgaaagagctgtgcgaattcaagctcgcagagaccgtgaacctttcaaatgctcagctaatagaagatgttgcatcgcggactggtgcggatgccttggcacgcttgtgcgagaaagtaagggagcatttggataaggaaggagaatgtgaattcctggaaaagcaagtggcagaagaggtcaacactataggcagttaggccactagcaaaacagttcaagcagtctgaggctgaagccagtctgggattaaacagggagtcatctacaattgatagcttgacctcccagtaaagttactgattcggacattaattgttgtggtgatcatggaaaatatgtgactcgtcaattgattctgattggtctgtagacctccattggtggtgagcctctcagctgcatcggggaggcgcagaggctctatatgtgtcatgatcttgttccgaactgtcaggttgctgtaatgtagccaaatggaaacctttgtatccctggaacttgaaaggcatgtacctggtatctgcagccagtaagtttggcaatctgaattcgatgccaattcctgggcgtattcgaacgtcctacgtccatgtatttatttcagttcatgtgcatctaaacaatattggtatagcatgaaatttaagtacatcaacacacatttaat

SEQ ID NO: 205111 - DNA, 2044 bp, Zea Mays
gtggctggctgtgtcctccatcctttcaaggacctcgggaatccagaaaattccggtggtcggtgcccacggacaggcgtgtgcgccacgagcccgacgaacaagggaacgaggccatttccaccggtcaaactaggagaagcaagcaaagctccccgccattagtagaatccgcccgaagtctgccccgctcttcggcctcgtcccttctctccagggccatggatgtagatgatgtgctcagtaacttgcgtgttgttggtgtgccaacaaagagtgcaatttacatatggggttataaccacagtggccagactgcccgaaagggcaaggaatgccacttgaggatccccaagagcctccctcccaaactattcaaattggggaatgggaagagcctcaggtggaccgatattgcatgtggccgtgagcataccgctgcagttgcttccgatggatcactgttcacctggggtgctaatgagtttggccagttgggagatgggacagaggacagcgcgaaagagcccaagaaggtcaagtcattggagactgagtttgtaaaatcagtatcctgtggcgcacattgtacagctgccgtcgctgagcctcgagaaaacgatggcacggtatcgaaaagcaggctttgggtttggggacaaaatcagggttcagattaccctcgtctattttggggagctttcacaccaaacacggtgattaagcaagtttcttgtggagctgttcatgtcatggctctatccgaggatggtctactgcaagcatggggctacaatgagtatggtcagcttggcagaggtcgcacttctcaaggacttcagggagctcgtgtgttaaatgcttatgcaaggtatacttggggactgggaagcatggggcagcttgggcattgctccctccaatctggagataatgagctgatccctaggcgagttgtggcccttgatggtatagtagttggggacgtttcttgtggaggtgtccactcttgtgctgtaactgaagggggagctctatatgcctggggcggaggacatgtgggtcagctgggagtcgggcctcagggtggcttcttctcttgctcccttaatggatccgacatgctgctccgaaacatcccagtcctggtgataccctcaggtgttcgtcttgctacctgtgggcactcccacacacttgtgtctatgaaagatggccgcatatatgggtggggctataatagttacggtcaagcgacgaacgagaaatctacttatgcttggtttccctctccggtcgattggtgtgttggtgaagtgagacgactcgccgctggaggtggccattctgctgttctgactgatgcatgttcgctgaaagagctgtgcgaattcaagctcgcagagaccgtgaacctttcaaatgctcagctaatagaagatgttgcatcgcggactggtgcggatgccttggcacgcttgtgcgagaaagtaagggagcatttggataaggaaggagaatgtgaattcctggaaaagcaagtggcagaagaggtcaacactataggcagttaggccactagcaaaacagttcaagcagtctgaggctgaagccagtctgggattaaacagggagtcatctacaattgatagcttgacctcccagtaaagttactgattcggacattaattgttgtggtgatcatggaaaatatgtgactcgtcaattgattctgattggtctgtagacctccattggtggtgagcctctcagctgcatcggggaggcgcagaggctctatatgtgtcatgatcttgttccgaactgtcaggttgctgtaatgtagccaaatggaaacctttgtatccctggaacttgaaaggcatgtacctggtatctgcagccagtaagtttggcaatctgaattcgatgccaattcctgggcgtattcgaacgtcctacgtccatgtatttatttcagttcatgtgcatctaaacaatattggtatagcatgaaatttaagtacatcaacacacatttaat

SEQ ID NO: 205112 - DNA, 2420 bp, Zea Mays
gtggctggctgtgtcctccatcctttcaaggacctcgggaatccagaaaattccggtggtcggtgcccacggacaggcgtgtgcgccacgagcccgacgaacaagggaacgaggccatttccaccggtcaaactaggagaagcaagcaaagctccccgccattagtagaatccgcccgaagtctgccccgctcttcggcctcgtcccttctctccaggtgctaatgagtttggccagttgggagatgggacagaggacagcgcgaaagagcccaagaaggtcaagtcattggagactgagtttgtaaaatcagtatcctgtggcgcacattgtacagctgccgtcgctgagcctcgagaaaacgatggcacggtatcgaaaagcaggctttgggtttggggacaaaatcagggttcagattaccctcgtctattttggggagctttcacaccaaacacggtgattaagcaagtttcttgtggagctgttcatgtcatggctctatccgaggatggtctactgcaagcatggggctacaatgagtatggtcagcttggcagaggtcgcacttctcaaggacttcagggagctcgtgtgttaaatgcttatgcaaggttccttgatgacgcccccgagcaagtgaagattgttagagtgtcatgtggagagtaccatacagcagctatatctgaaaatggggaggtgtaagtccattagtcatcccaagggagctgttctctgctgccagtgactgttgtatggtttctcacatgacaacatagaagcatttggaatattgaagactaaccacgactaactatagggctaactgcaaagaaaggaagtaaatacatttatattatagatctcatattgatcaactaatctcaatatggcgtcagggttactctaaatagctttctgctatttaagatctttgtgcacatagatcgaagtgggccttctcttgagcatcctagtgtcttagtgaatgcaaagaaatgtgaagaattaaatggatgttgttatatcattattatagttgaataacttgtcaatcatttgctgaatctatcgatttgctagcttatatacgacaggaaaaaaaaaagattgttataatttcactttcaacatttgtagtcaaaatcattccgatttcatacttttcgcttttttgatgattgaaaacctattccaagtagggacttgattatttgtaattataatatctttggtttttgcaggtatacttggggactgggaagcatggggcagcttgggcattgctccctccaatctggagataatgagctgatccctaggcgagttgtggcccttgatggtatagtagttggggacgtttcttgtggaggtgtccactcttgtgctgtaactgaagggggagctctatatgcctggggcggaggacatgtgggtcagctgggagtcgggcctcagggtggcttcttctcttgctcccttaatggatccgacatgctgctccgaaacatcccagtcctggtgataccctcaggtgttcgtcttgctacctgtgggcactcccacacacttgtgtctatgaaagatggccgcatatatgggtggggctataatagttacggtcaagcgacgaacgagaaatctacttatgcttggtttccctctccggtcgattggtgtgttggtgaagtgagacgactcgccgctggaggtggccattctgctgttctgactgatgcatgttcgctgaaagagctgtgcgaattcaagctcgcagagaccgtgaacctttcaaatgctcagctaatagaagatgttgcatcgcggactggtgcggatgccttggcacgcttgtgcgagaaagtaagggagcatttggataaggaaggagaatgtgaattcctggaaaagcaagtggcagaagaggtcaacactataggcagttaggccactagcaaaacagttcaagcagtctgaggctgaagccagtctgggattaaacagggagtcatctacaattgatagcttgacctcccagtaaagttactgattcggacattaattgttgtggtgatcatggaaaatatgtgactcgtcaattgattctgattggtctgtagacctccattggtggtgagcctctcagctgcatcggggaggcgcagaggctctatatgtgtcatgatcttgttccgaactgtcaggttgctgtaatgtagccaaatggaaacctttgtatccctggaacttgaaaggcatgtacctggtatctgcagccagtaagtttggcaatctgaattcgatgccaattcctgggcgtattcgaacgtcctacgtccatgtatttatttcagttcatgtgcatctaaacaatattggtatagcatgaaatttaagtacatcaacacacatttaat

SEQ ID NO: 205113 - DNA, 1929 bp, Zea Mays
gtggctggctgtgtcctccatcctttcaaggacctcgggaatccagaaaattccggtggtcggtgcccacggacaggcgtgtgcgccacgagcccgacgaacaagggaacgaggccatttccaccggtcaaactaggagaagcaagcaaagctccccgccattagtagaatccgcccgaagtctgccccgctcttcggcctcgtcccttctctccaggtgctaatgagtttggccagttgggagatgggacagaggacagcgcgaaagagcccaagaaggtcaagtcattggagactgagtttgtaaaatcagtatcctgtggcgcacattgtacagctgccgtcgctgagcctcgagaaaacgatggcacggtatcgaaaagcaggctttgggtttggggacaaaatcagggttcagattaccctcgtctattttggggagctttcacaccaaacacggtgattaagcaagtttcttgtggagctgttcatgtcatggctctatccgaggatggtctactgcaagcatggggctacaatgagtatggtcagcttggcagaggtcgcacttctcaaggacttcagggagctcgtgtgttaaatgcttatgcaaggttccttgatgacgcccccgagcaagtgaagattgttagagtgtcatgtggagagtaccatacagcagctatatctgaaaatggggaggtgtaagtccattagtcatcccaagggagctgttctctgctgccagtgactgttgtatacttggggactgggaagcatggggcagcttgggcattgctccctccaatctggagataatgagctgatccctaggcgagttgtggcccttgatggtatagtagttggggacgtttcttgtggaggtgtccactcttgtgctgtaactgaagggggagctctatatgcctggggcggaggacatgtgggtcagctgggagtcgggcctcagggtggcttcttctcttgctcccttaatggatccgacatgctgctccgaaacatcccagtcctggtgataccctcaggtgttcgtcttgctacctgtgggcactcccacacacttgtgtctatgaaagatggccgcatatatgggtggggctataatagttacggtcaagcgacgaacgagaaatctacttatgcttggtttccctctccggtcgattggtgtgttggtgaagtgagacgactcgccgctggaggtggccattctgctgttctgactgatgcatgttcgctgaaagagctgtgcgaattcaagctcgcagagaccgtgaacctttcaaatgctcagctaatagaagatgttgcatcgcggactggtgcggatgccttggcacgcttgtgcgagaaagtaagggagcatttggataaggaaggagaatgtgaattcctggaaaagcaagtggcagaagaggtcaacactataggcagttaggccactagcaaaacagttcaagcagtctgaggctgaagccagtctgggattaaacagggagtcatctacaattgatagcttgacctcccagtaaagttactgattcggacattaattgttgtggtgatcatggaaaatatgtgactcgtcaattgattctgattggtctgtagacctccattggtggtgagcctctcagctgcatcggggaggcgcagaggctctatatgtgtcatgatcttgttccgaactgtcaggttgctgtaatgtagccaaatggaaacctttgtatccctggaacttgaaaggcatgtacctggtatctgcagccagtaagtttggcaatctgaattcgatgccaattcctgggcgtattcgaacgtcctacgtccatgtatttatttcagttcatgtgcatctaaacaatattggtatagcatgaaatttaagtacatcaacacacatttaat

SEQ ID NO: 205114 - DNA, 1777 bp, Zea Mays
ggccggcctcgcgtgccatgcgatgttgttccccaggcgcagcagcacggcagtcctccgtttcctcctcgtcgctcgccccggttgtctcctcctcgacctcccccgtcgcgacaccgcccgatctctctagcgcacggcggacggagaagaggaggagggggggacgatctcattcatcggaccggcgtgcctggaataataacaacggggcgagctcctcgtcgtcgaggctggacccggcggcgccgctgctgccgcgccacggcagcagcgggggccgcgagggtggtggcctgtcgtcgcagcccaagacgttcgccaacgtcttcatcgcggtggtcggcgccggcgtgctggggctgccgtacaccttctcgcgcaccgggtgggcggcgggctcgctgctgctcttctccgtcgccgcgctcaccttctactgcatgatgctgctcgttgcgtgccgccgccgcctcgccgacgagcaccctaagatcgcctcgttcggggacctgggggacgccgtgttcggcgcgcatgggcggttcgccgtggacgtgatgctggtgctcagccaattcagcttctgcgtcggctacctcatcttcatctccaacaccatggcgcacctctatccgattaccgccgcggcctcgtcctcctccgcgctcctctcccccaaggcgctcgtcatctgggcgatgctgcctttccagctggggctcaactccatcaagacgctgacgctgctcgcgccgctcagcatcttcgccgacgtcgtcgacctcggcgccatgggcgtggtcctcggccaggacgtcgccgcctggctcgccaagcccgtgcccgtggtcgccttcggcggcgcaggcgcgcttctctacgggctcggcgtctccgtgtacgcgttcgagggcatcggcatggtgctgccgctggaggcagaggcggcgaacaagagcaagttcggcgtcacgctcgggctgtccatggcgttcatcgccgtcatgtacgggctgttcggcgtcatgggctacgtcgcgttcggcgacgccacgcgggacatcatcaccaccaacctcggagccgggtggctgtcggccgccgtgcagctggggctctgcatcaacctcttcttcaccatgccggtgatgatgaaccccgtgtacgaggtcgccgagcgcctgctccacggcaagcggtactgctggtggcttaggtggctgctggtcgtcgtcgtcggactcgccgccatgtacgtgcccaacttcacggacttcctggcgctcgtcgggagcagtgtctgcgtcctcctcgggttcgtgctgccggcctcgttccacctcaaggtattcggcgccgagatggaatggcccggagtgctgtccgatgtcctgctggtcgtgatcggcctcgcgctcgccgtgttcgggacgtacacgtcgctgctgcaaatcttccaatcgtcaagcgcttgatcgacgcgcgttccgctgcgcgtcgatcatcgcattctccagggcaactacgatacatgtgttgagtgttgttcgtgagtggcttgtattggacgggggaaatctgtacgcttttcgtaccacagatttcagttactcccggtagcagtgtatgtgtatgcgtcctagatgttcctcctgctgtgcacgatgggggatacgatgaaaggacaagattttcacttcgtggaaaaagcttattttgctgttaaataaaaagatacttaattcataaaattacattaattaaaaaaataaaa

SEQ ID NO: 205115 - DNA, 749 bp, Zea Mays
ggcaattccgtacagactgctgccgttcagcttcacgtcaactgattattatccttttcatgaccggatactgaatgtggcggccccggtgtaatgtggccataaaacgcgttaaaaccaaccgtttctagacacggcctttgtgctgctggcctgctgctgcttgttcttcctgttcaccttcctcctcctccctataaatttgactagaatgcaaccaatccttggtcatgttctctggcaaacacacacacacacacacacacacacacacacacacacacacacacacacatcgtttgctgttgcaacaaagctctacacgggaagacaggctgcttctttcttgcagtctctggtccagaagcctgaagaaatggcgtcacccaacgtcacattccttgccttcttcgtggccctcgcactatcggcgcttcacaccgacgcagcggcggcggcagaaaccttgcaccataggagcgacacatggtgcgtggccaagccgtcgacgcaggaggcggcgctgcggggcaacctggagttcgcctgctccgagagcgactgcggcgccatccagggcaccggcggctgcgcccagcccgacagcctgctgtcgcgggcgtcggtggccatgaacgcctactaccaggcccgggggaggaactcgtggaactgcttcttcaacggcaccggcataatcaccatcactgaccccactcttggattcttttcacttgatcctcttctga

SEQ ID NO: 205116 - DNA, 3537 bp, Zea Mays
atgcctctcctcaacccaaccggatcctctggtggaacttccagggtgccctcgtcggcggcgcgcttctcctcctctacatcgtcgacgccgccgttggttgaaagctcagaggtcatgcctcactcggcgcggcctccggggaccggagccaacttcaaccgcgcgcgcgaccagcgcggcacccgccgcgtctttctgcgtcgcccgccgcctccgcttcggcgtcctcctcatgtcacagccaatggtcatcgaggcgagggaggcagcggcggcgggggagcgcgtcggagcgcgggagaggaggcgggcgggcggtacacgaggcgcggcggcgtggcggaccgtgaggtggcggtgagtgccagcgcggaccctgtgggacggaatgctgcgaccgtcgccactggtggtgaggctccaccgccgcgggaggaggatggcggcggacgaggtggtgttcttgtgagcaagcgcccgtctgctgcgcccgtgctcccaccgcccaagcggagggcggtctccgtcactcggcagttcccacccgcctccaggtggacctcggctgctcctgctccgctcgctggtgcagatgccgacggaggtttgcggacacgatacgaagggcaacgtgagaacagagcttctgatgcattcaagaagccggcagttgctcgtcccctcgcgggcctcaaggatggtgttggtgttggtgtgatgtcgagagcggtgtcccccaaagctgctggcacgagggttctcaaaaagccgtgtgccagggatggagctgctccaatgtcgaacacagatcgtcatgatgctggattggtgaaatcgtctgctgcacatgacagaggaaggggagcaaggattgatgagctgcgggggaagaagggcccggtgaccggcgcacgatttccaccaaagccagagatcatatctaccacacgcaccttgctacctggccatggaaaggatggcggttgccatagcaaggtgcatcggccattggagtctgggcgtgctcatggtagttctttggctgatggacgtgctgtggaaattgttgctgcttgcactggtactagtgctggagctgtacaagatggcaaattagagaatggagaggttccctccaagaaggcttgggggtctcaggtttcttccgatgctgttctgcttgatcctgcatcttatagggatgtttctgcaagagatttccctggtttaagtgggaactttggaaggaagacgctgtcatgggcactagtaaaagatagaaagcagaagtgtctggtgagggcactgtgttgggaagtaaggacatgtttacaaatcaaagcacagtcaagccagacaatgtggttcagaaatttgttacagatgctcagcatataccattttccaaaggcaagaaggaaaccgtacgcgaaaggtgggtaacaacaaatgggattcaggactctgttgagctcactaaggatcgagttatgcaagctcccatgtctgcagacatgtgccccatgcccatgacacacaaaaagaaggctgccacaactagggatttctttggtcacaagaggatggtgaaggcaaaagctctaggtcatcaacagaggatgtttgcctcgggtagtaagagcaaacgggatgatgaggtggcttccaacttgaaaattcatgacatatttagggaaatagttttaaatgaaagaaatctcgagctttacctcaatagttcatcaggcctgccttctgtgaggtgtcaaaggcaatatagatacatgaatgcagatgctaggagcagatttaaaatgttgtgcaggatgtttgagtttgtatgcaggacgcttgtacaaactatggagcagcgttcattgaagatgagaattgacaatgaagctgctaaagtaatgaaggcgttaccaggttttactaaacatggtcctattgtgggacaagttcctggagttgaagttggtgatgagtttctatacagagctcagcttgctattgctggtctacatagtgagtaccggagaggcatttccaccaccacatatagaaatggcatgcttattgcaataagcattgttgcttctggaggttatcctgatgaattgggttgctcaggtgaactgatatacactggttctggcgggaagtctgctgttaagaagaaagatgaggatcaaaagcttaagtgtgggaaccttgcactaaagaattgcatcaaaacaaagactcctgtaagagtgattcatggatttaagtgtcggaataccgatcgaggcagtcattcgggggccaaactaatcccaaaatacacttatgatggattgtatttagtggtggatttctggatggatggtaaaccaggttcaagggtgtttaagtacaagttaaaaaagattcatgggcaaccagaacttcctatgcacatagctaaaagattgaagagcttcaaaagccgtccaggcctgtgcatgactgatatatctcaagggaaggaagccactcccatctgtgtcattaatacagtcgatgatgtgcaacctggacctttccaatacaccactagaattagatatccatttgggcttacagaaaaacacaatcagggttgtgactgcaccaatggttgctcagactctgagagctgtgcctgtgctgtgaagaatggaggggagatcccatttgacttaagtggcgcaattctcaatgagaagtctgtgatatttgagtgtggttcatcttgtaaatgtcctccgtcgtgccgcaacagggtcagtcagcatgatatgaaaataccactggaagtattcaggacaaccaagacaggttggggcgtaagatctctatggtccattcctgctggcagcttcatatgtgagtatatcggtgaggtgcagcatcaaaaggcggctgacaagagaaggaacaacaattacttgtttgatgtaggccttaactatgatgacgagaatgttagcagtgtgttgctatcaaatgtttcaggtttgaactcttctagctcttgctcccaggccatggaagatgtgcgcttcactatagatgcatctgtgtatggaaacatcggaaggttcatcaaccacagctgttcaccaaatcttcaagcacaaaatgttctccgggaccatggtgacaaaaggatgccacatattatgttctttgctgcagagacaattccaccactacaggaactgacttatgactataataactctgaaatagatcgtgtccaaggtgtgaatagaagaatgaaatccaaagtttgtcaatatagttcttcgctgtgtcgtcggaggttctactaaggcatggccgactgatagtcgtgtagtagtttcttgaaaaagaaatatcctacggaatgctgtcacttgtgttttcatttaccagttgatgacactcaaacaatatgagatgttactgctagtaaagtttcgatcctagttgatgacacgagatgctgctgatattaaagaagtattattagttgtacttaaccta

SEQ ID NO: 205117 - DNA, 1927 bp, Zea Mays
aaatcaatcacatcataaatataactaacagataatatatagagaatcatgtagagacagacttgtatttgtttatttagtcctctttcaatgttcagttaagtctatgcttctagctcactacatcattccgattgagttttaatttagagacaaaaccaaaatcaaagagagaggactagtttctagcccaatccacggtggagcccagcctccactctccagtccggttttcagttggtagccacgcgcacggggacggggttctccctttgctgtcgcccccgcctccgattccgcgatgataacccaccatccctccctgatccgcccatctgtcctcaccctccgtgccgacgtcctccgtcggcgcccaacactgcacgccgtcgcctccgcgccgcctccccgattgtggtctttgcgcgccaccaccggtggaacttcgcccgtcagtggcgatggaggcaaacgcgctgtgccgcttcccacgcgtgggcccgccctgctcggcttcgtgcgtagcaacttcctcccgcttgctctcattggtgggatcatattgggtcttctagatcctactcttggatgccttgcacacaaatactccctgtcaaagtacagcacttttgggatattcgttatctcaggactgaccctgcgcactagggagcttggtgcagcgttagaagcttggcctgctggactatatggactagtatgaccttatgtttgttctgtggctgccagacttagggcatgtttggtttgtggctaaatgtgccacactttgcctaaggttagtcattcaaattgaataactaaccttgggcaaaaaagttaggcaaagtgtggcaattgaggcaacaaaccaaacatgcccttacctattctaatatcattctgtggcacaactataagtatgttggaataaagttctcactgccgtttgatccaaggcataattcaaggaaattccatgccattgattttctggcatttatttcttaccaggagtgctaattgcctttctgattatttttttcagttcctatacttctattggtcatcaatggagcacccagcacctgcaataagtttgctaatgtattatattattgtatataattgcagggatctattttgctgtttacaccctttcttgctcagtttattatgcaagttcagttcttcccccctgaatttatcactggtatatgggtcaagcacatgcctgcttttcatgatggattttctgtcttcattccaccattttttgttgccatcgattaactcatacttttgtgctccttatagcttgtttttttggcatcttacagggttagctatgttttgctgcatgccaacaacactatcaagtggagtcacactaacacagcttgttggtggtaactctgcacttgctcttgcaatgacagttgcatccaatttacttggcattataattgtacctctttctcttgcaaaatacattagcaatggtgttggggtttccttgcctactgagcaattattcaaaagtcttgtcaccagccttctaatccctcttattatagggaagactatagtgccatcttgaaatatctgaagcttcctggagacacttatgatggcttgttctttgtcaggttgctcgagaaacctcaaaaggtattgctgattttgttgatggaaatcgacaaggcttttcagttgcaagtgctgttctcctcagcctagtatgtctctaatttgaacatatgccagttgacatgttatttacttgctctgtagctcccttgatttgtccttcagcatgtcatgcttttgggtccatatatatagtgcttcactgcttccagcccaattacccatcccttttggcgaagcgggtacaagagggaaactgatgcatgcataaacctat

SEQ ID NO: 205118 - DNA, 2103 bp, Zea Mays
ccaaaatcaaagagagaggactagtttctagcccaatccacggtggagcccagcctccactctccagtccggttttcagttggtagccacgcgcacggggacggggttctccctttgctgtcgcccccgcctccgattccgcgatgataacccaccatccctccctgatccgcccatctgtcctcaccctccgtgccgacgtcctccgtcggcgcccaacactgcacgccgtcgcctccgcgccgcctccccgattgtggtctttgcgcgccaccaccggtggaacttcgcccgtcagtggcgatggaggcaaacgcgctgtgccgcttcccacgcgtgggcccgccctgctcggcttcgtgcgtagcaacttcctcccgcttgctctcattggtgggatcatattgggtcttctagatcctactcttggatgccttgcacacaaatactccctgtcaaagtacagcacttttgggatattcgttatctcaggactgaccctgcgcactagggagcttggtgcagcgttagaagcttggcctgctggactatatggactaggatctattttgctgtttacaccctttcttgctcagtttattatgcaagttcagttcttcccccctgaatttatcactgggttagctatgttttgctgcatgccaacaacactatcaagtggagtcacactaacacagcttgttggtggtaactctgcacttgctcttgcaatgacagttgcatccaatttacttggcattataattgtacctctttctcttgcaaaatacattagcaatggtgttggggtttccttgcctactgagcaattattcaaaagtcttgtcaccagccttctaatccctcttattatagggaagggcttattctgaatctcatgtaactacctttcatggggcctgtttgtttcggcttctggcagcttctggtcaccaaaagctgctgcggactgccaaacgctcagcttttaagacagcttctataaaattcgttggggcaaaaaccatccaaaatcaacataaacacataatcagttgagtcattgtgatagtaggaatccgtcactttctagatcctgagccctatgaacaactttatcttcctccacacgtaatcgtaatgatactcagattctcctcacagccagattctccccacagctagattttcagaaaagctgatcagaaaaaagctgaaccaaacaggcctatgatcaactgataagcatgatttgtttgtcgaatgtttaggagcacaatttaggcaagtattcatttcttttagtagattatcagccatgaaccacctaactacaatatatataaataaaaaactcgacctgtggggctaagacaccccccatgacattatattaagaaacacagatcgagaaaccccctcgaacccctgtcccacccagacacagcggcaccgtagcctgaccgaggccggaccttggacctgtgctttggtgtgggacagatgagaggacttttttaaccacaactaaaattcgctctcacggaaagtcgaacccaggacctaaggagtgctactcggaccacctaatcaactcaactagatgccctttcacatctgactacaatatgcaaagtataatttgaactcctctaccctaagtgcttataatgttctgtttattttgaatttagtccctctgtttcttaaacaagaaataattaaattcaccatatatcccccatgttttccttaaagactatagtgccatcttgaaatatctgaagcttcctggagacacttatgatggcttgttctttgtcaggttgctcgagaaacctcaaaaggtattgctgattttgttgatggaaatcgacaaggcttttcagttgcaagtgctgttctcctcagcctagtatgtctctaatttgaacatatgccagttgacatgttatttacttgctctgtagctcccttgatttgtccttcagcatgtcatgcttttgggtccatatatatagtgcttcactgcttccagcccaattacccatcccttttggcgaagcgggtacaagagggaaactgatgcatgcataaacctat

SEQ ID NO: 205119 - DNA, 2895 bp, Zea Mays
gcccaatccacggtggagcccagcctccactctccagtccggttttcagttggtagccacgcgcacggggacggggttctccctttgctgtcgcccccgcctccgattccgcgatgataacccaccatccctccctgatccgcccatctgtcctcaccctccgtgccgacgtcctccgtcggcgcccaacactgcacgccgtcgcctccgcgccgcctccccgattgtggtctttgcgcgccaccaccggtggaacttcgcccgtcagtggcgatggaggcaaacgcgctgtgccgcttcccacgcgtgggcccgccctgctcggcttcgtgcgtagcaacttcctcccgcttgctctcattggtgggatcatattgggtcttctagatcctactcttggatgccttgcacacaaatactccctgtcaaagtacagcacttttgggatattcgttatctcaggactgaccctgcgcactagggagcttggtgcagcgttagaagcttggcctgctggactatatggactagtatgaccttatgtttgttctgtggctgccagacttagggcatgtttggtttgtggctaaatgtgccacactttgcctaaggttagtcattcaaattgaataactaaccttgggcaaaaaagttaggcaaagtgtggcaattgaggcaacaaaccaaacatgcccttacctattctaatatcattctgtggcacaactataagtatgttggaataaagttctcactgccgtttgatccaaggcataattcaaggaaattccatgccattgattttctggcatttatttcttaccaggagtgctaattgcctttctgattatttttttcagttcctatacttctattggtcatcaatggagcacccagcacctgcaataagtttgctaatgtattatattattgtatataattgcagggatctattttgctgtttacaccctttcttgctcagtttattatgcaagttcagttcttcccccctgaatttatcactggtatatgggtcaagcacatgcctgcttttcatgatggattttctgtcttcattccaccattttttgttgccatcgattaactcatacttttgtgctccttatagcttgtttttttggcatcttacagggttagctatgttttgctgcatgccaacaacactatcaagtggagtcacactaacacagcttgttggtggtaactctgcacttgctcttgcaatgacagttgcatccaatttacttggcattataatttgttggagggggggcctctacagactgcagccgccgcgtgatggagggggagcagctcacgctcgagcagagggccgccggtactgttcatctgcatgaatagtaccacgtctccccagccaacagcccgacggcgcccaagcgtcggagttctggtacctctttctcttgcaaaatacattagcaatggtgttggggtttccttgcctactgagcaattattcaaaagtcttgtcaccagccttctaatccctcttattatagggaaggtatgtggttattcatatctttgtactccatgccataccttactatttcatttcaatacaataatactgcacccattatgttcagatctcctttcagtttaatctttggatgtaaaaacaacagggcttattctgaatctcatgtaactacctttcatggggcctgtttgtttcggcttctggcagcttctggtcaccaaaagctgctgcggactgccaaacgctcagcttttaagacagcttctataaaattcgttggggcaaaaaccatccaaaatcaacataaacacataatcagttgagtcattgtgatagtaggaatccgtcactttctagatcctgagccctatgaacaactttatcttcctccacacgtaatcgtaatgatactcagattctcctcacagccagattctccccacagctagattttcagaaaagctgatcagaaaaaagctgaaccaaacaggcctatgatcaactgataagcatgatttgtttgtcgaatgtttaggagcacaatttaggcaagtattcatttcttttagtagattatcagccatgaaccacctaactacaatatatataaataaaaaactcgacctgtggggctaagacaccccccatgacattatattaagaaacacagatcgagaaaccccctcgaacccctgtcccacccagacacagcggcaccgtagcctgaccgaggccggaccttggacctgtgctttggtgtgggacagatgagaggacttttttaaccacaactaaaattcgctctcacggaaagtcgaacccaggacctaaggagtgctactcggaccacctaatcaactcaactagatgccctttcacatctgactacaatatgcaaagtataatttgaactcctctaccctaagtgcttataatgttctgtttattttgaatttagtccctctgtttcttaaacaagaaataattaaattcaccatatatcccccatgttttccttaaagactatagtgccatcttgaaatatctgaagcttcctggagacacttatgatggcttgttctttgtcaggttgctcgagaaacctcaaaaggtattgctgattttgttgatggaaatcgacaaggcttttcagttgcaagtgctgttctcctcagcctagtatgtctctaatttgaacatatgccagttgacatgttatttacttgctctgtagctcccttgatttgtccttcagcatgtcatgcttttgggtccatatatatagtgcttcactgcttccagcccaattacccatcccttttggcgaagcgggtacaagagggaaactgatgcatgcataaacctat

SEQ ID NO: 205120 - DNA, 2730 bp, Zea Mays
gcccaatccacggtggagcccagcctccactctccagtccggttttcagttggtagccacgcgcacggggacggggttctccctttgctgtcgcccccgcctccgattccgcgatgataacccaccatccctccctgatccgcccatctgtcctcaccctccgtgccgacgtcctccgtcggcgcccaacactgcacgccgtcgcctccgcgccgcctccccgattgtggtctttgcgcgccaccaccggtggaacttcgcccgtaacaaccaaatcgaaccccctcggattctctgacactcattgggccatgcttcgattcagttgtaaatgcctagttgcctgaaaaaaagttgtaaacgcctacttgctccgcaggtcagtggcgatggaggcaaacgcgctgtgccgcttcccacgcgtgggcccgccctgctcggcttcgtgcgtagcaacttcctcccgcttgctctcattggtgggatcatattgggtcttctagatcctactcttggatgccttgcacacaaatactccctgtcaaagtacagcacttttgggatattcgttatctcaggactgaccctgcgcactagggagcttggtgcagcgttagaagcttggcctgctggactatatggactagtatgaccttatgtttgttctgtggctgccagacttagggcatgtttggtttgtggctaaatgtgccacactttgcctaaggttagtcattcaaattgaataactaaccttgggcaaaaaagttaggcaaagtgtggcaattgaggcaacaaaccaaacatgcccttacctattctaatatcattctgtggcacaactataagtatgttggaataaagttctcactgccgtttgatccaaggcataattcaaggaaattccatgccattgattttctggcatttatttcttaccaggagtgctaattgcctttctgattatttttttcagttcctatacttctattggtcatcaatggagcacccagcacctgcaataagtttgctaatgtattatattattgtatataattgcagggatctattttgctgtttacaccctttcttgctcagtttattatgcaagttcagttcttcccccctgaatttatcactgggttagctatgttttgctgcatgccaacaacactatcaagtggagtcacactaacacaggcttgttggtggtaactctgcacttgctcttgcaatgacagttgcatccaatttacttggcattataattgtacctctttctcttgcaaaatacattagcaatggtgttggggtttccttgcctactgagcaattattcaaaagtcttgtcaccagccttctaatccctcttattatagggaaggtatgtggttattcatatctttgtactccatgccataccttactatttcatttcaatacaataatactgcacccattatgttcagatctcctttcagtttaatctttggatgtaaaaacaacagggcttattctgaatctcatgtaactacctttcatggggcctgtttgtttcggcttctggcagcttctggtcaccaaaagctgctgcggactgccaaacgctcagcttttaagacagcttctataaaattcgttggggcaaaaaccatccaaaatcaacataaacacataatcagttgagtcattgtgatagtaggaatccgtcactttctagatcctgagccctatgaacaactttatcttcctccacacgtaatcgtaatgatactcagattctcctcacagccagattctccccacagctagattttcagaaaagctgatcagaaaaaagctgaaccaaacaggcctatgatcaactgataagcatgatttgtttgtcgaatgtttaggagcacaatttaggcaagtattcatttcttttagtagattatcagccatgaaccacctaactacaatatatataaataaaaaactcgacctgtggggctaagacaccccccatgacattatattaagaaacacagatcgagaaaccccctcgaacccctgtcccacccagacacagcggcaccgtagcctgaccgaggccggaccttggacctgtgctttggtgtgggacagatgagaggacttttttaaccacaactaaaattcgctctcacggaaagtcgaacccaggacctaaggagtgctactcggaccacctaatcaactcaactagatgccctttcacatctgactacaatatgcaaagtataatttgaactcctctaccctaagtgcttataatgttctgtttattttgaatttagtccctctgtttcttaaacaagaaataattaaattcaccatatatcccccatgttttccttaaagactatagtgccatcttgaaatatctgaagcttcctggagacacttatgatggcttgttctttgtcaggttgctcgagaaacctcaaaaggtattgctgattttgttgatggaaatcgacaaggcttttcagttgcaagtgctgttctcctcagcctagtatgtctctaatttgaacatatgccagttgacatgttatttacttgctctgtagctcccttgatttgtccttcagcatgtcatgcttttgggtccatatatatagtgcttcactgcttccagcccaattacccatcccttttggcgaagcgggtacaagagggaaactgatgcatgcataaacctat

SEQ ID NO: 205121 - DNA, 1172 bp, Zea Mays
ctccactctccagtccggttttcagttggtagccacgcgcacggggacggggttctccctttgctgtcgcccccgcctccgattccgcgatgataacccaccatccctccctgatccgcccatctgtcctcaccctccgtgccgacgtcctccgtcggcgcccaacactgcacgccgtcgcctccgcgccgcctccccgattgtggtctttgcgcgccaccaccggtggaacttcgcccgtcagtggcgatggaggcaaacgcgctgtgccgcttcccacgcgtgggcccgccctgctcggcttcgtgcgtagcaacttcctcccgcttgctctcattggtgggatcatattgggtcttctagatcctactcttggatgccttgcacacaaatactccctgtcaaagtacagcacttttgggatattcgttatctcaggactgaccctgcgcactagggagcttggtgcagcgttagaagcttggcctgctggactatatggactaggatctattttgctgtttacaccctttcttgctcagtttattatgcaagttcagttcttcccccctgaatttatcactgggttagctatgttttgctgcatgccaacaacactatcaagtggagtcacactaacacagcttgttggtggtaactctgcacttgctcttgcaatgacagttgcatccaatttacttggcattataattgtacctctttctcttgcaaaatacattagcaatggtgttggggtttccttgcctactgagcaattattcaaaagtcttgtcaccagccttctaatccctcttattatagggaagactatagtgccatcttgaaatatctgaagcttcctggagacacttatgatggcttgttctttgtcaggttgctcgagaaacctcaaaaggtattgctgattttgttgatggaaatcgacaaggcttttcagttgcaagtgctgttctcctcagcctagtatgtctctaatttgaacatatgccagttgacatgttatttacttgctctgtagctcccttgatttgtccttcagcatgtcatgcttttgggtccatatatatagtgcttcactgcttccagcccaattacccatcccttttggcgaagcgggtacaagagggaaactgatgcatgcataaacctat

SEQ ID NO: 205122 - DNA, 2248 bp, Zea Mays
ccggttttcagttggtagccacgcgcacggggacggggttctccctttgctgtcgcccccgcctccgattccgcgatgataacccaccatccctccctgatccgcccatctgtcctcaccctccgtgccgacgtcctccgtcggcgcccaacactgcacgccgtcgcctccgcgccgcctccccgattgtggtctttgcgcgccaccaccggtggaacttcgcccgtcagtggcgatggaggcaaacgcgctgtgccgcttcccacgcgtgggcccgccctgctcggcttcgtgcgtagcaacttcctcccgcttgctctcattggtgggatcatattgggtcttctagatcctactcttggatgccttgcacacaaatactccctgtcaaagtacagcacttttgggatattcgttatctcaggactgaccctgcgcactagggagcttggtgcagcgttagaagcttggcctgctggactatatggactattcctatacttctattggtcatcaatggagcacccagcacctgcaataagtttgctaatgtattatattattgtatataattgcagggatctattttgctgtttacaccctttcttgctcagtttattatgcaagttcagttcttcccccctgaatttatcactggtatatgggtcaagcacatgcctgcttttcatgatggattttctgtcttcattccaccattttttgttgccatcgattaactcatacttttgtgctccttatagcttgtttttttggcatcttacagggttagctatgttttgctgcatgccaacaacactatcaagtggagtcacactaacacagcttgttggtggtaactctgcacttgctcttgcaatgacagttgcatccaatttacttggcattataattgtacctctttctcttgcaaaatacattagcaatggtgttggggtttccttgcctactgagcaattattcaaaagtcttgtcaccagccttctaatccctcttattatagggaagggcttattctgaatctcatgtaactacctttcatggggcctgtttgtttcggcttctggcagcttctggtcaccaaaagctgctgcggactgccaaacgctcagcttttaagacagcttctataaaattcgttggggcaaaaaccatccaaaatcaacataaacacataatcagttgagtcattgtgatagtaggaatccgtcactttctagatcctgagccctatgaacaactttatcttcctccacacgtaatcgtaatgatactcagattctcctcacagccagattctccccacagctagattttcagaaaagctgatcagaaaaaagctgaaccaaacaggcctatgatcaactgataagcatgatttgtttgtcgaatgtttaggagcacaatttaggcaagtattcatttcttttagtagattatcagccatgaaccacctaactacaatatatataaataaaaaactcgacctgtggggctaagacaccccccatgacattatattaagaaacacagatcgagaaaccccctcgaacccctgtcccacccagacacagcggcaccgtagcctgaccgaggccggaccttggacctgtgctttggtgtgggacagatgagaggacttttttaaccacaactaaaattcgctctcacggaaagtcgaacccaggacctaaggagtgctactcggaccacctaatcaactcaactagatgccctttcacatctgactacaatatgcaaagtataatttgaactcctctaccctaagtgcttataatgttctgtttattttgaatttagtccctctgtttcttaaacaagaaataattaaattcaccatatatcccccatgttttccttaaagactatagtgccatcttgaaatatctgaagcttcctggagacacttatgatggcttgttctttgtcaggttgctcgagaaacctcaaaaggtattgctgattttgttgatggaaatcgacaaggcttttcagttgcaagtgctgttctcctcagcctagtatgtctctaatttgaacatatgccagttgacatgttatttacttgctctgtagctcccttgatttgtccttcagcatgtcatgcttttgggtccatatatatagtgcttcactgcttccagcccaattacccatcccttttggcgaagcgggtacaagagggaaactgatgcatgcataaacctat

SEQ ID NO: 205123 - DNA, 1437 bp, Zea Mays
cagttggtagccacgcgcacggggacggggttctccctttgctgtcgcccccgcctccgattccgcgatgataacccaccatccctccctgatccgcccatctgtcctcaccctccgtgccgacgtcctccgtcggcgcccaacactgcacgccgtcgcctccgcgccgcctccccgattgtggtctttgcgcgccaccaccggtggaacttcgcccgtcagtggcgatggaggcaaacgcgctgtgccgcttcccacgcgtgggcccgccctgctcggcttcgtgcgtagcaacttcctcccgcttgctctcattggtgggatcatattgggtcttctagatcctactcttggatgccttgcacacaaatactccctgtcaaagtacagcacttttgggatattcgttatctcaggactgaccctgcgcactagggagcttggtgcagcgttagaagcttggcctgctggactatatggactagtatgaccttatgtttgttctgtggctgccagacttagggcatgtttggtttgtggctaaatgtgccacactttgcctaaggttagtcattcaaattgaataactaaccttgggcaaaaaagttaggcaaagtgtggcaattgaggcaacaaaccaaacatgcccttacctattctaatatcattctgtggcacaactataagtatgttggaataaagttctcactgccgtttgatccaaggcataattcaaggaaattccatgccattgattttctggcatttatttcttaccaggagtgctaattgcctttctgattatttttttcagttcctatacttctattggtcatcaatggagcacccagcacctgcaataagtttgctaatggttagctatgttttgctgcatgccaacaacactatcaagtggagtcacactaacacagcttgttggtggtaactctgcacttgctcttgcaatgacagttgcatccaatttacttggcattataattgtacctctttctcttgcaaaatacattagcaatggtgttggggtttccttgcctactgagcaattattcaaaagtcttgtcaccagccttctaatccctcttattatagggaaggtatgtggttattcatatctttgtactccatgccataccttactatttcatttcaatacaataatactgcacccattatgttcagatctcctttcagtttaatctttggatgtaaaaacaacagggcttattctgaatctcatgtaactacctttcatggggcctgtttgtttcggcttctggcagcttctggtcaccaaaagctgctgcggactgccaaacgctcagcttttaagacagcttctataaaattcgttggggcaaaaaccatccaaaatcaacataaacacataatcagttgagtcattgtgatagtaggaat

SEQ ID NO: 205124 - DNA, 1142 bp, Zea Mays
cagttggtagccacgcgcacggggacggggttctccctttgctgtcgcccccgcctccgattccgcgatgataacccaccatccctccctgatccgcccatctgtcctcaccctccgtgccgacgtcctccgtcggcgcccaacactgcacgccgtcgcctccgcgccgcctccccgattgtggtctttgcgcgccaccaccggtggaacttcgcccgtcagtggcgatggaggcaaacgcgctgtgccgcttcccacgcgtgggcccgccctgctcggcttcgtgcgtagcaacttcctcccgcttgctctcattggtgggatcatattgggtcttctagatcctactcttggatgccttgcacacaaatactccctgtcaaagtacagcacttttgggatattcgttatctcagggatctattttgctgtttacaccctttcttgctcagtttattatgcaagttcagttcttcccccctgaatttatcactggtatatgggtcaagcacatgcctgcttttcatgatggattttctgtcttcattccaccattttttgttgccatcgattaactcatacttttgtgctccttatagcttgtttttttggcatcttacagggttagctatgttttgctgcatgccaacaacactatcaagtggagtcacactaacacagcttgttggtggtaactctgcacttgctcttgcaatgacagttgcatccaatttacttggcattataattgtacctctttctcttgcaaaatacattagcaatggtgttggggtttccttgcctactgagcaattattcaaaagtcttgtcaccagccttctaatccctcttattatagggaaggttgctcgagaaacctcaaaaggtattgctgattttgttgatggaaatcgacaaggcttttcagttgcaagtgctgttctcctcagcctagtatgtctctaatttgaacatatgccagttgacatgttatttacttgctctgtagctcccttgatttgtccttcagcatgtcatgcttttgggtccatatatatagtgcttcactgcttccagcccaattacccatcccttttggcgaagcgggtacaagagggaaactgatgcatgcataaacctat

SEQ ID NO: 205125 - DNA, 2131 bp, Zea Mays
cagttggtagccacgcgcacggggacggggttctccctttgctgtcgcccccgcctccgattccgcgatgataacccaccatccctccctgatccgcccatctgtcctcaccctccgtgccgacgtcctccgtcggcgcccaacactgcacgccgtcgcctccgcgccgcctccccgattgtggtctttgcgcgccaccaccggtggaacttcgcccgtcagtggcgatggaggcaaacgcgctgtgccgcttcccacgcgtgggcccgccctgctcggcttcgtgcgtagcaacttcctcccgcttgctctcattggtgggatcatattgggtcttctagatcctactcttggatgccttgcacacaaatactccctgtcaaagtacagcacttttgggatattcgttatctcaggactgaccctgcgcactagggagcttggtgcagcgttagaagcttggcctgctggactatatggactattcctatacttctattggtcatcaatggagcacccagcacctgcaataagtttgctaatggttagctatgttttgctgcatgccaacaacactatcaagtggagtcacactaacacagcttgttggtggtaactctgcacttgctcttgcaatgacagttgcatccaatttacttggcattataattgtacctctttctcttgcaaaatacattagcaatggtgttggggtttccttgcctactgagcaattattcaaaagtcttgtcaccagccttctaatccctcttattatagggaaggtatgtggttattcatatctttgtactccatgccataccttactatttcatttcaatacaataatactgcacccattatgttcagatctcctttcagtttaatctttggatgtaaaaacaacagggcttattctgaatctcatgtaactacctttcatggggcctgtttgtttcggcttctggcagcttctggtcaccaaaagctgctgcggactgccaaacgctcagcttttaagacagcttctataaaattcgttggggcaaaaaccatccaaaatcaacataaacacataatcagttgagtcattgtgatagtaggaatccgtcactttctagatcctgagccctatgaacaactttatcttcctccacacgtaatcgtaatgatactcagattctcctcacagccagattctccccacagctagattttcagaaaagctgatcagaaaaaagctgaaccaaacaggcctatgatcaactgataagcatgatttgtttgtcgaatgtttaggagcacaatttaggcaagtattcatttcttttagtagattatcagccatgaaccacctaactacaatatatataaataaaaaactcgacctgtggggctaagacaccccccatgacattatattaagaaacacagatcgagaaaccccctcgaacccctgtcccacccagacacagcggcaccgtagcctgaccgaggccggaccttggacctgtgctttggtgtgggacagatgagaggacttttttaaccacaactaaaattcgctctcacggaaagtcgaacccaggacctaaggagtgctactcggaccacctaatcaactcaactagatgccctttcacatctgactacaatatgcaaagtataatttgaactcctctaccctaagtgcttataatgttctgtttattttgaatttagtccctctgtttcttaaacaagaaataattaaattcaccatatatcccccatgttttccttaaagactatagtgccatcttgaaatatctgaagcttcctggagacacttatgatggcttgttctttgtcaggttgctcgagaaacctcaaaaggtattgctgattttgttgatggaaatcgacaaggcttttcagttgcaagtgctgttctcctcagcctagtatgtctctaatttgaacatatgccagttgacatgttatttacttgctctgtagctcccttgatttgtccttcagcatgtcatgcttttgggtccatatatatagtgcttcactgcttccagcccaattacccatcccttttggcgaagcgggtacaagagggaaactgatgcatgcataaacctat

SEQ ID NO: 205126 - DNA, 1527 bp, Zea Mays
ctttctgccccgacacgccctccaaaaatccgcaagccagaacccaacccccctttccccgtccaacgtcctctagccgcctcgccgaactctctctcacacacacacagtctctctgctccacgctcgccgcttttccgctccacccctcctctctttctccctccctctctttctctctcctgccccaaccaaccaatggaggctctcgcgggcgccgcatcctcctccgttctccccgcgcgccacccgccctcccgcgtggccgcgcagtccctcgcgctccgccctagccgctgcggtcccctccgcgcggttagcgccggcggtgtcagtggcaaggacgacgcccacgccgccaacgggtctcccgtcctcaagctgacaagtcacagaaggcttcatcaactaacgttagtactgactctagtggatctagagctggcctgtttagaacacccatatcaggtggtgtgcagagtgcaactttcgcccacggtctacctccgccggctttggctgttcgcaatttgatggaacaggcgcggtttgcccacctgtgctctgtcatgtctggcatgcaccaccgccgtactggatatccgtttggttcacttgtcgactttgctaacgattcaatgggccacccaattttttcgctgtcacccttggcaatccatacgaggaacttactcgctgacccaagatgcacgcttgttgtccaggtgcctggatggagtggactgtcgaacgcgcgagtcaccatatttggtgatgtttaccctttgccagctgaacaacaggaatgggcacataagcaatatgtagcaaaacatcagcagtgggcatcacagcagtggggaaacttttactattacaggatgcacaacataagtgacatatacttcatcgggggcttcggaactgtcgcatggatagatgttaaggagtatgaaacgattcaacctgacaagatagcagttgatggtggtgacttgcaaagtttaaaggagttgaacgctattttctctaaaccacttcgggaggtcctatcatcagaaggggaggttgatgatgctgcgcttatatcagtagatagcaaagggatagatatacgggttcgacagggtgcacagttcaatattcagaggctagcatttgatgtccctcataaggttgagactctggaggaagccaagaaagcactccacaagataatcaaagacaagcagcaaataaagtgaagttgcaggagctggctctacccatttttctggtggtgtaaggtttcattgcaaccggaccaaggattacgtaatggtagcaggtagcatgatacaagtgaaaacgatggctgtttttttaaataatgagagtctcgctctccagctgtggtgaagattgtatatatgctcgtgttgccttattaataattattattgtgcggttgcttcttgaggaaatcggaccttcttgttctctatttccggcttctggctggctacctgggtaccagcatcttttttt

SEQ ID NO: 205127 - DNA, 649 bp, Zea Mays
gtctggacttctgattgtgacatatacttcatcgggggcttcggaactgtcgcatggatagatgttaaggagtatgaaacgattcaacctgacaagatagcagttgatggtggtgacttgcaaagtttaaaggagttgaacgctattttctctaaaccacttcgggaggtcctatcatcagaaggggaggttgatgatgctgcgcttatatcagtagatagcaaagggatagatatacgggttcgacagggtgcacagttcaatattcagaggctagcatttgatgtccctcataaggttgagactctggaggaagccaagaaagcactccacaagataatcaaagacaagcagcaaataaagtgaagttgcaggagctggctctacccatttttctggtggtgtaaggtttcattgcaaccggaccaaggattacgtaatggtagcaggtagcatgatacaagtgaaaacgatggctgtttttttaaataatgagagtctcgctctccagctgtggtgaagattgtatatatgctcgtgttgccttattaataattattattgtgcggttgcttcttgaggaaatcggaccttcttgttctctatttccggcttctggctggctacctgggtaccagcatcttttttt

SEQ ID NO: 205128 - DNA, 337 bp, Zea Mays
cagaagtcgatcgacgctcgatccttgttcagaaagtcagtgtcccgagtcacagcatgctgaacatcgtcacagtccgttgtgggcactgcactagcctgctgtcggtgaacttgagaggactcatccaatcacttcctgtccagaaccaccactactcccagcagcaggagaatttcaccgtccaaaatatgggttttactgaaaattaccctgagtacgcaccttcgtaccgcatgccaacgacgctgtcagcgaaaggtgatctggatcatatgctgcacgtgcgcgggtcaaatgactgtggattttttgtgatgagttacatgaagtctta

SEQ ID NO: 205129 - DNA, 3085 bp, Zea Mays
gtgaactgccgatgcggccacgcgggtggggttaactggggcagtggcggtgttggcttccaagtgtgctaaactccatcggctcatctgccattgcatcaaacatcaagcaccatgcagagttcgctcccttgttctctccagatcacttttctcccctgaaagcttaccatgcgactgctaaaagtgtccttgatgcgctgctgataaactggaatgcgacatatgattattacaacaaaatgaatgtaaaacaagcatattacctgtccatggagtttttacagggaagggctctcacaaatgctattggcaatctagagattaccggtgaatatgcagaagcattaaaacaacttggacaaaacctggaggatgtcgctagccaggaaccagatgctgccctgggcaatggtggtttaggccgcctggcttcttgttttttggattctttagcaacattaaattatccagcatggggatatggacttcgctatgaatatggcctctttaagcagatcataacaaaggatggtcaggaggagattgctgagaattggcttgagatgggatatccttgggaggttgtaagaaatgatgtctcttatcctgtgaaattctatggtaaagtggtggaaggcactgatggtaggaagcactggattggaggagaaaatatcaaggctgtggcacatgatgtccctattcctggctacaaaactagaactaccaataatctgcgtctttggtcaacaactgtaccagcacaagattttgacttggcagcttttaattctggagatcataccaaggcatatgaagctcatctaaacgctaaaaagatatgccacatattgtatcctggggatgaatcactagaggggaaagttctccgcttgaagcaacaatatacattgtgttcagcctcactacaggacatcattgctcgttttgagagtagagctggcgagtctctcaactgggaggacttcccctccaaagttgcagtgcagatgaatgacactcatccaacactatgcattcctgagttaatgagaatactgatggatgttaagggattaagctggagtgaggcatggagtattacagaaagctctagagaagtggagcttggacataatgcagaaacttttacctcgacatgttgagataatagaaacaattgatgaagagctgataaacaacatagtctcaaagtatggaaccacagatactgaactgttgaaaaagaagctgaaagagatgaggattctggataatgttgaccttccagcttccatttcccaactatttgttaaacccaaagacaaaaaggaatctcctgctaaatcaaagcaaaagttacttgttaaatctttggagactattgttgatgttgaggagaaaactgagttggaagaggaggcggaggttctatcagagatagaggaggaaaaacttgaatctgaagaagtagaggcagaagaagagagttctgaggatgagttagatccatttgtaaagtctgatcctaagttaccaagagttgtccgaatggcaaacctctgtgttgttggtgggcattcagtaaatggtgtagctgaaattcacagtgaaattgtgaaacaggatgtgttcaacagcttctatgagatgtggccaactaaatttcagaataaaacaaatggagtgactcccaggcgttggatccggttttgtaatcctgcattaagtgcattaatttcaaagtggattggttctgatgactgggtgcttaatacagacaaactggcagaactgaagaagtttgctgataatgaagatctgcattcagagtggcgtgctgctaagaaggctaacaaaatgaaggttgtttctcttataagggagaagacaggatatattgtcagtccagatgcaatgtttgatgtgcaggtgaaaaggatacatgaatataagcggcagctgctaaatatccttggaattgtctaccgctacaagaagatgaaagaaatgagcacagaagaaagagcaaagagctttgttccaagggtatgcatattcggtgggaaagcatttgccacatatatacaggcaaaaaggatcgttaaatttattacagatgtggcagctaccgtgaaccatgattcagacattggagatttgttgaaggtcgtatttgttccagactataatgttagtgttgccgaggcgctaattcctgccagtgaattgtcacagcatatcagtactgctggaatggaagctagtgggaccagtaacatgaagtttgcaatgaacggttgcattcttattggaactttagatggtgcaaatgtggaaatcagagaggaggttggagaggaaaactttttcctttttggtgcagaggcacatgaaattgctggtttgcggaaagaaagagccgagggaaagtttgtgcctgacccaagatttgaggaggttaaggaatttgtccgcagtggtgtctttgggacttacagctatgatgaattgatgggttctttggaaggaaatgaaggttacggacgtgcagattatttccttgttggcaaggacttccccagctatattgaatgccaagaaaaagttgatgaggcgtaccgagatcagaagttatggacaaggatgtctatcctcaacacggctggctcatccaagttcagcagcgataggacgattcatgagtacgccaaggatatctgggatatcagccctgccatccttccctagaccagccccttagcaggaagcgctggtcacctcagttttgtgtagacaaaatctaggcatcgataaatgatgggggactatgcatggtgttttggcagcactgttcagtaccttgccttctaaatctggtttttggtgtgtgtgtgtaagctaataaatgtcgaggcaggattgtaggaacaccattgatcatttggctcgctggtgacctggtgacgtatggtgtaattagtagttgtttgcctcctggagcttgctggcttctgtaatggtattttcgtaacgaaaatggcgggaaagtacgggggccgctagtgctattgtgacgtta

SEQ ID NO: 205130 - DNA, 3027 bp, Zea Mays
ggcacggcaacagggaggagagaagaggcttccaagtgtgctaaactccatcggctcatctgccattgcatcaaacatcaagcaccatgcagagttcgctcccttgttctctccagatcacttttctcccctgaaagcttaccatgcgactgctaaaagtgtccttgatgcgctgctgataaactggaatgcgacatatgattattacaacaaaatgaatgtaaaacaagcatattacctgtccatggagtttttacagggaagggctctcacaaatgctattggcaatctagagattaccggtgaatatgcagaagcattaaaacaacttggacaaaacctggaggatgtcgctagccaggaaccagatgctgccctgggcaatggtggtttaggccgcctggcttcttgttttttggattctttagcaacattaaattatccagcatggggatatggacttcgctatgaatatggcctctttaagcagatcataacaaaggatggtcaggaggagattgctgagaattggcttgagatgggatatccttgggaggttgtaagaaatgatgtctcttatcctgtgaaattctatggtaaagtggtggaaggcactgatggtaggaagcactggattggaggagaaaatatcaaggctgtggcacatgatgtccctattcctggctacaaaactagaactaccaataatctgcgtctttggtcaacaactgtaccagcacaagattttgacttggcagcttttaattctggagatcataccaagatatgccacatattgtatcctggggatgaatcactagaggggaaagttctccgcttgaagcaacaatatacattgtgttcagcctcactacaggacatcattgctcgttttgagagtagagctggcgagtctctcaactgggaggacttcccctccaaagttgcagtgcagatgaatgacactcatccaacactatgcattcctgagttaatgagaatactgatggatgttaagggattaagctggagtgaggcatggagtattacagaaagctctagagaagtggagcttggacataatgcagaaacttttacctcgacatgttgagataatagaaacaattgatgaagagctgataaacaacatagtctcaaagtatggaaccacagatactgaactgttgaaaaagaagctgaaagagatgaggattctggataatgttgaccttccagcttccatttcccaactatttgttaaacccaaagacaaaaaggaatctcctgctaaatcaaagcaaaagttacttgttaaatctttggagactattgttgatgttgaggagaaaactgagttggaagaggaggcggaggttctatcagagatagaggaggaaaaacttgaatctgaagaagtagaggcagaagaagagagttctgaggatgagttagatccatttgtaaagtctgatcctaagttaccaagagttgtccgaatggcaaacctctgtgttgttggtgggcattcagtaaatggtgtagctgaaattcacagtgaaattgtgaaacaggatgtgttcaacagcttctatgagatgtggccaactaaatttcagaataaaacaaatggagtgactcccaggcgttggatccggttttgtaatcctgcattaagtgcattaatttcaaagtggattggttctgatgactgggtgcttaatacagacaaactggcagaactgaagaagtttgctgataatgaagatctgcattcagagtggcgtgctgctaagaaggctaacaaaatgaaggttgtttctcttataagggagaagacaggatatattgtcagtccagatgcaatgtttgatgtgcaggtgaaaaggatacatgaatataagcggcagctgctaaatatccttggaattgtctaccgctacaagaagatgaaagaaatgagcacagaagaaagagcaaagagctttgttccaagggtatgcatattcggtgggaaagcatttgccacatatatacaggcaaaaaggatcgttaaatttattacagatgtggcagctaccgtgaaccatgattcagacattggagatttgttgaaggtcgtatttgttccagactataatgttagtgttgccgaggcgctaattcctgccagtgaattgtcacagcatatcagtactgctggaatggaagctagtgggaccagtaacatgaagtttgcaatgaacggttgcattcttattggaactttagatggtgcaaatgtggaaatcagagaggaggttggagaggaaaactttttcctttttggtgcagaggcacatgaaattgctggtttgcggaaagaaagagccgagggaaagtttgtgcctgacccaagatttgaggaggttaaggaatttgtccgcagtggtgtctttgggacttacagctatgatgaattgatgggttctttggaaggaaatgaaggttacggacgtgcagattatttccttgttggcaaggacttccccagctatattgaatgccaagaaaaagttgatgaggcgtaccgagatcagaagttatggacaaggatgtctatcctcaacacggctggctcatccaagttcagcagcgataggacgattcatgagtacgccaaggatatctgggatatcagccctgccatccttccctagaccagccccttagcaggaagcgctggtcacctcagttttgtgtagacaaaatctaggcatcgataaatgatgggggactatgcatggtgttttggcagcactgttcagtaccttgccttctaaatctggtttttggtgtgtgtgtgtaagctaataaatgtcgaggcaggattgtaggaacaccattgatcatttggctcgctggtgacctggtgacgtatggtgtaattagtagttgtttgcctcctggagcttgctggcttctgtaatggtattttcgtaacgaaaatggcgggaaagtacgggggccgctagtgctattgtgacgtta

SEQ ID NO: 205131 - DNA, 3243 bp, Zea Mays
acggacacttcacgcaccttgcagttgcagcggcggtggcacggcaacagggaggagagaagaacactccactgcacgcgcagcaatggcgacgaccacctcgccgccgctgcagctcgccagcgcctcccgcccgcacgcctccgcctccggtggtggcggcggaggtggggttctcctcgctggcggttccggaggtggggtcgcgccaggttggggtcgagggcgattgcagcggcgggtgtcagcgcgcagcgtggcgagcgatcgggacgtgcaaggccccgtctcgcccgcggaagggcttccaagtgtgctaaactccatcggctcatctgccattgcatcaaacatcaagcaccatgcagagttcgctcccttgttctctccagatcacttttctcccctgaaagcttaccatgcgactgctaaaagtgtccttgatgcgctgctgataaactggaatgcgacatatgattattacaacaaaatgaatgtaaaacaagcatattacctgtccatggagtttttacagggaagggctctcacaaatgctattggcaatctagagattaccggtgaatatgcagaagcattaaaacaacttggacaaaacctggaggatgtcgctagccaggaaccagatgctgccctgggcaatggtggtttaggccgcctggcttcttgttttttggattctttagcaacattaaattatccagcatggggatatggacttcgctatgaatatggcctctttaagcagatcataacaaaggatggtcaggaggagattgctgagaattggcttgagatgggatatccttgggaggttgtaagaaatgatgtctcttatcctgtgaaattctatggtaaagtggtggaaggcactgatggtaggaagcactggattggaggagaaaatatcaaggctgtggcacatgatgtccctattcctggctacaaaactagaactaccaataatctgcgtctttggtcaacaactgtaccagcacaagattttgacttggcagcttttaattctggagatcataccaaggcatatgaagctcatctaaacgctaaaaagatatgccacatattgtatcctggggatgaatcactagaggggaaagttctccgcttgaagcaacaatatacattgtgttcagcctcactacaggacttcccctccaaagttgcagtgcagatgaatgacactcatccaacactatgcattcctgagttaatgagaatactgatggatgttaagggattaagctggagtgaggcatggagtattacagaaagaaccgtggcatacactaaccatacagtgcttcctgaagctctagagaagtggagcttggacataatgcagaaacttttacctcgacatgttgagataatagaaacaattgatgaagagctgataaacaacatagtctcaaagtatggaaccacagatactgaactgttgaaaaagaagctgaaagagatgaggattctggataatgttgaccttccagcttccatttcccaactatttgttaaacccaaagacaaaaaggaatctcctgctaaatcaaagcaaaagttacttgttaaatctttggagactattgttgatgttgaggagaaaactgagttggaagaggaggcggaggttctatcagagatagaggaggaaaaacttgaatctgaagaagtagaggcagaagaagagagttctgaggatgagttagatccatttgtaaagtctgatcctaagttaccaagagttgtccgaatggcaaacctctgtgttgttggtgggcattcagtaaatggtgtagctgaaattcacagtgaaattgtgaaacaggatgtgttcaacagcttctatgagatgtggccaactaaatttcagaataaaacaaatggagtgactcccaggcgttggatccggttttgtaatcctgcattaagtgcattaatttcaaagtggattggttctgatgactgggtgcttaatacagacaaactggcagaactgaagaagtttgctgataatgaagatctgcattcagagtggcgtgctgctaagaaggctaacaaaatgaaggttgtttctcttataagggagaagacaggatatattgtcagtccagatgcaatgtttgatgtgcaggtgaaaaggatacatgaatataagcggcagctgctaaatatccttggaattgtctaccgctacaagaagatgaaagaaatgagcacagaagaaagagcaaagagctttgttccaagggtatgcatattcggtgggaaagcatttgccacatatatacaggcaaaaaggatcgttaaatttattacagatgtggcagctaccgtgaaccatgattcagacattggagatttgttgaaggtcgtatttgttccagactataatgttagtgttgccgaggcgctaattcctgccagtgaattgtcacagcatatcagatggtgcaaatgtggaaatcagagaggaggttggagaggaaaactttttcctttttggtgcagaggcacatgaaattgctggtttgcggaaagaaagagccgagggaaagtttgtgcctgacccaagatttgaggaggttaaggaatttgtccgcagtggtgtctttgggacttacagctatgatgaattgatgggttctttggaaggaaatgaaggttacggacgtgcagattatttccttgttggcaaggacttccccagctatattgaatgccaagaaaaagttgatgaggcgtaccgagatcagaagttatggacaaggatgtctatcctcaacacggctggctcatccaagttcagcagcgataggacgattcatgagtacgccaaggatatctgggatatcagccctgccatccttccctagaccagccccttagcaggaagcgctggtcacctcagttttgtgtagacaaaatctaggcatcgataaatgatgggggactatgcatggtgttttggcagcactgttcagtaccttgccttctaaatctggtttttggtgtgtgtgtgtaagctaataaatgtcgaggcaggattgtaggaacaccattgatcatttggctcgctggtgacctggtgacgtatggtgtaattagtagttgtttgcctcctggagcttgctggcttctgtaatggtattttcgtaacgaaaatggcgggaaagtacgggggccgctagtgctattgtgacgtta

SEQ ID NO: 205132 - DNA, 815 bp, Zea Mays
gaggtgcgagcgcgacacgcgctgacctactcgacggcctccacctccgtcttgaggcgaagcgtaggaccaactctttcgaagggaaattatatctcaggtgcttaggagtctgccatggccagcgagaataaggtatttaggttcgaggaagtcgccaagcacaacgtcaccaaggactgctggatcatcatcgccggcaaggtgtatgatgtcactccttttatggatgagcatcctggtggagatgaggttttgctagctgtaactgggaaagatgctacagctgattttgaagatattggccacagtgattccgcaagggacatgatggagaagtaccacatcgggcagatagatgcttcaacaatcccagcaaagcgaacttatgtgcacccccagcaagcgcccagccactcagacaagaataatgatctcctcatcaagatcctgcagttccttgtgcccattatgatcctgggccttgcatttggtatacgtcagtacaccaaatcagagtagtactgttcttgaagacttgcctttggagtctgttttatggtaatggtttggatgagaacagttcagtaattgcttagtgtatttgtcaggtggatgttatctcattggtcatatactatgtattatggacatccatgtgttgccgaaatgtgctcttttccccatgaaccgaggcatacaagatgaattctgactcttccatgaaccgagtagttgataccagattattgcagtaatgtttgttttgtgtatgcgcacttggatgtcgcaataaacagaaccaaaccataaac

SEQ ID NO: 205133 - DNA, 1522 bp, Zea Mays
tgccacagtgccataagtgagtgttgccccgtcaatgtcgctggagccaagaaaagcaaggcaaactgcaaagccactctctttcctcctcggcctctggcttcctcccctcccgacttctcctccaaatcgctgcctttttgttagtttttttttctattttgcttcctctcagttcttggaaggaaaggttcggaatccgttccaaacaaacaaacatacacaaagtaatatcttccctcagtatgttcatcttctggcttctttctatgtttctttgatcaggcggctgcaatgggaggtagcggaacgctgatctcggtgtaccccgatgagctcaccttcctttgagctggagaagccgtgctattgcaatctcaaggtggtgaacaacagcgagcaccacgtcgcattcaaggtcaaaacgacatcaccgaggaagtattttgtccggccgaacgcgagcatcgtccagccatgggattcttgcacaataacgattacgctgcaggcacagaaagagtacccaccagatatgcaatgcaaggacaagttcttgattcagagcaccaaggtggctgccagcaccgacatggatgagatcccccctgatacgttcaacaaggaaaccgacaaggtaatcgaggaaatgaagctcagggttgtttacacgttacctagtggtggaggttcagatgactctagcgtatcgtctttaggaagccggagcttcaaagcagcgtctgacgatctgatgatgctgaagaatgcaagcatcgaagagatccagacaattcagcgggtgaaggaagaaagagataacatgcttcagcaaaaccagcaaatgcaacgtgaattggatgtgcttcggaggcgtaggagccgcaaaggtgacgcaggtttctccttgacgtttgctgcgtttgctgggctaataggtgtcctggtggggctcctgatgagcctcatcttctcttcgccgccggttgatgcataagatgcgagaaaaaggttgcagcctatggaagcattaattgttcagaccgacatggggagaaagctcgctcggcaaaagaagaagatgaaacttttgtctagtctccattttcattcttttgttgtttgcaccgtagttatatgaaacgatgataacgggttgcagatctttgatctttccacccgtgcttggttcatcctccatttgtatttgcccctcgttttcttattctttctgtatagtaagtatatcaggacggaagctgtatccattcagcgatttgggtagtgaggaactagtccaggagtatcaagaaagagcgttgatcatgtctactgtattagcagcctctttggaacaaagagaagccctttggagaaacacatgatgtaggaaaagaatgtcgaaacatctttgaatcgtatggatggagaaaacacacgacattataagattgaaccaaatataggaatcgatgagagatagcgacaaaggaaattttcatgaggtttgacctattcgtac

SEQ ID NO: 205134 - DNA, 1299 bp, Zea Mays
tgccacagtgccataagtgagtgttgccccgtcaatgtcgctggagccaagaaaagcaaggcggctgcaatgggaggtagcggaacgctgatctcggtgtaccccgatgagctcaccttcctgtttgagctggagaagccgtgctattgcaatctcaaggtggtgaacaacagcgagcaccacgtcgcattcaaggtcaaaacgacatcaccgaggaagtattttgtccggccgaacgcgagcatcgtccagccatgggattcttgcacaataacgattacgctgcaggcacagaaagagtacccaccagatatgcaatgcaaggacaagttcttgattcagagcaccaaggtggctgccagcaccgacatggatgagatcccccctgatacgttcaacaaggaaaccgacaaggtaatcgaggaaatgaagctcagggttgtttacacgttacctagtggtggaggttcagatgactctagcgtatcgtctttaggaagccggagcttcaaagcagcgtctgacgatctgatgatgctgaagaatgcaagcatcgaagagatccagacaattcagcgggtgaaggaagaaagagataacatgcttcagcaaaaccagcaaatgcaacgtgaattggatgtgcttcggaggcgtaggagccgcaaaggtgacgcaggtttctccttgacgtttgctgcgtttgctgggctaataggtgtcctggtggggctcctgatgagcctcatcttctcttcgccgccggttgatgcataagatgcgagaaaaaggttgcagcctatggaagcattaattgttcagaccgacatggggagaaagctcgctcggcaaaagaagaagatgaaacttttgtctagtctccattttcattcttttgttgtttgcaccgtagttatatgaaacgatgataacgggttgcagatctttgatctttccacccgtgcttggttcatcctccatttgtatttgcccctcgttttcttattctttctgtatagtaagtatatcaggacggaagctgtatccattcagcgatttgggtagtgaggaactagtccaggagtatcaagaaagagcgttgatcatgtctactgtattagcagcctctttggaacaaagagaagccctttggagaaacacatgatgtaggaaaagaatgtcgaaacatctttgaatcgtatggatggagaaaacacacgacattataagattgaaccaaatataggaatcgatgagagatagcgacaaaggaaattttcatgaggtttgacctattcgtac

SEQ ID NO: 205135 - DNA, 1524 bp, Zea Mays
acagcacatgccagcgcgacgcggatcctcacacctgcaataagtttaaggacgggattgcactttactggataaataaaacctcagaaaggagctgccacagtgccataagtgagtgttgccccgtcaatgtcgctggagccaagaaaagcaaggcaaactgcaaagccactctctttcctcctcggcctctggcttcctcccctcccgacttctcctccaaatcgctgcctttttgttagtttttttttctattttgcttcctctcagttcttggaaggaaaggcggctgcaatgggaggtagcggaacgctgatctcggtgtaccccgatgagctcaccttcctgtttgagctggagaagccgtgctattgcaatctcaaggtggtgaacaacagcgagcaccacgtcgcattcaaggtcaaaacgacatcaccgaggaagtattttgtccggccgaacgcgagcatcgtccagccatgggattcttgcacaataacgattacgctgcaggcacagaaagagtacccaccagatatgcaatgcaaggacaagttcttgattcagagcaccaaggtggctgccagcaccgacatggatgagatcccccctgatacgttcaacaaggaaaccgacaaggtaatcgaggaaatgaagctcagggttgtttacacgttacctagtggtggaggttcagatgactctagcgtatcgtctttaggaagccggagcttcaaagcagcgtctgacgatctgatgatgctgaagaatgcaagcatcgaagagatccagacaattcagcgggtgaaggaagaaagagataacatgcttcagcaaaaccagcaaatgcaacgtgaattggatgtgcttcggaggcgtaggagccgcaaaggtgacgcaggtttctccttgacgtttgctgcgtttgctgggctaataggtgtcctggtggggctcctgatgagcctcatcttctcttcgccgccggttgatgcataagatgcgagaaaaaggttgcagcctatggaagcattaattgttcagaccgacatggggagaaagctcgctcggcaaaagaagaagatgaaacttttgtctagtctccattttcattcttttgttgtttgcaccgtagttatatgaaacgatgataacgggttgcagatctttgatctttccacccgtgcttggttcatcctccatttgtatttgcccctcgttttcttattctttctgtatagtaagtatatcaggacggaagctgtatccattcagcgatttgggtagtgaggaactagtccaggagtatcaagaaagagcgttgatcatgtctactgtattagcagcctctttggaacaaagagaagccctttggagaaacacatgatgtaggaaaagaatgtcgaaacatctttgaatcgtatggatggagaaaacacacgacattataagattgaaccaaatataggaatcgatgagagatagcgacaaaggaaattttcatgaggtttgacctattcgtac

SEQ ID NO: 205136 - DNA, 2870 bp, Zea Mays
tagggctaccgcattttttatttgtttcggtagaacgacaatttgatcataattaggaaatatattattgttttgtctagtaaaaaaaatcttttctcgataacactggttgaaataagttttggatatggccatcttggccaaatcatgggattaaactgttgagtttaggtggatgaaccatgaaccagcatattagtattatggatgaggtggttatagaatgaaccgattaagatacgcttccattctggaaagggagcatatgcccttgtctcttggttttttttttacgaaggggcgaagccccctatttcattaagaaataggaaagtttgaaacatccacaaccacgcggcacatcatcccaaaagatcgaacacggccagaaccctatctagactctaaacactatcaaactagattagtgaagagcctaagatagcagagaaagtttggcctacgattaactacataagactttcttatttacaacccaatcagacaggcagaagccacaaaaggaactgaacaagccaaccatcaagagacaaacaaacttcatcaccatcttccaagttccagcttccatatcaaccagaaatgcgcctatctaaagggcaccacccaaaggcccggccgaatgcctcacttgccgtctttcggattagcttgcttcctagaaccaccattttttgctccttctttttctgacgagtagcccatgaatccagctagaagcagcaaagaaaaataatgttagaaggatcaagcaaatgtttctttccaaagcaccaatcatttctagtgcgccaaatagcccagaataaagcaccacaaccaaacaaaaccaaattagcagttttgtcttttggtttacttaaccaattgtcataaaggtagctgatactattcggaatcagtctcaaattcaaggcaacttgaatcactctccacatatactttgcaatggggcaatgaaagaacagatgatcgatagattcatcaaccccatagaaacagcaatccaaagaaccaatccagttccttttcttcaagttgtccttagtaagaattttatttcttacaactaaccaaaagaaaacctttattttatgaggcaatttagatttccacaagaacttatatgaaatcaaaatttgatcttccattttctttttgtacatagggttaactgagaagccttttttccccagattccacacaattttatcctcctgatcagacaaagacacctgattacaacttatcatttcatcgaataacatcctcaaattacccacaatccttcttctaaaagtaagagtctcaaaattagatgtgaatacatcattaacggtaacatctttgtcatagaccaagtaaaaaagaacaggaaactgaacagacagaggcaaattaccaatccaaatacttttccagaaactagtcttcagaccattaccaaccgcagatttacagtatttataaaaattgtcacgcaaactcagaatttttttccagaaatgagaatcactttgtttttgtttaactaaaataagggtttttcccttaatgtatttactggcaataattttttgccataagcctctcgaattttcaatattccaaaacccttgtctcttggtgtcaaggaaattcttcttctggagtaatccagatagtttgtttacaatagttgtacacttagctaacaaattagctgacttattagcctcctgtttcaatgagctagagctaatttcatctaaaaaatagctggctaacaattagctctatgctccaaacaggaactaactctcagctacactggctgatgtgcaaagatgactaacaagcatataaatccccatcactgagcaatttgaattttttctgcccaagactgtaggtgtgcaaaattcatggcttcagacaccggcaagaagctcattcagatcgatgtgagctcggatacagtgtgcccttggtgcttcgtcggtaaaaagaaccttgagaaagcaatggagcaaagcatgggcaagtttgatttcgaggtccgttggcatccattctttctgaaccccgacgcgcctaaggagggcgtcaagaaatctgacttcttcaagatgaagttcggtcctgtccaatatgagggtgcgatgtctcgcatgactgagatatttcgaggactcgggcttgaatatgacatgtcaggattgacagggaacacgatggatagtcataggctcataacacatgctggacaccaaggctatgacaagcaaaatgctcttgttgaagaattgttcctcaattaccattgccaaggaaagtacattggtgacaagcaggttttgctggatgctgcaagaaaggtgggcatagaaggggccgaggaactgcttgaagatcctaccaaaggagtccatgaggttcaggaagagctcaagaagtactcatcggacatctccggggtcccacattttgtgatcaataataaatatcaactcagtgggggccagccaccaaatgaattcatgagggcgtttgagatggctgcaaaagatggagcttaatggcgcttatttgcgagaaaaaactgtggaaccagttgtgtttcgtagttttgatgtggtgatattagtgacgaagatggtgtggatgttcacttttgaatagagttctaggtgattggatatggaacatgggttatgtcctgtaaatagaggccagtctgtatatttgatttgatttcaaccgaaagctgtggttttcagaacctgagatttcagcatgaaaacctattgtaagcacccctgcggacattaacatcaagaaaaaatctataaaaataaattttcgcaatg

SEQ ID NO: 205137 - DNA, 3309 bp, Zea Mays
gtccctgtcccgagcggtggcggttggtgggaactgtgcgcggtgcagttgataaacttctagctttcctgtgagggacgggcgaccttttcccgtgcgtgcgtgaaatcgcccagcctacgggactgattgggcttgaagttgtggcgcgtacgagagatgcctcatgccagagcttctgttattagagactgaagttctgcaagcgcgtgctgctgctctggagttttagcagctgtgttgagtggttgggagccatggagtcacggatggatcagtacgaggttttggagcagattggtcgcggcgcctttggtgctgccatcctcgtcaaccacaagacagagaaaaagaagtatgtgttgaagaaaatacgtcttgcaaggcagacagagcgatgccgcaagtctgctcaccaggagatggctcttattgctcgcttgcaacatccttacatcgttgagttcaaggaggcatgggttgagaagggctgctatgtttgcattgtgacgggatactgtgaaggtggcgatatggctgaattgatgaaaaaagcgaatgggacatacttcccagaggagaaactactgagatggtttgcgcaattggcattagctgttgactacttgcattcaaactttgttttgcatcgagatctcaagtgctcaaacatatttcttaccaaagaacaggatattcgtcttggagattttggcctggccaagactttaaaggcagatgatctagcctcttcggttgtgggaacaccaaattatatgtgcccagagttgcttacagacattccctatggattcaagtcagatatatggtctcttggatgttgtatgtatgagatggctgctcatcgacctgctttcaaggcttttgatatggctggactgataagtaagataaatcgctcctccattggccctttgcctactttctattcttcatctatgaaaacacttatcaaaagcatgttgaggaagagtcctgaacatcgacctactgcatccgagattataaaaaatccatacctccaaccttatgtgaatcaataccgtccatttgctaatatattacatcctggtcgatcaccagagaaacctggcaccgattcacggagcagtcagaaaagtatgtctgggagtcagtgtagtagcatttctggaactggcagtgatatggatagcatacaatcaaatgaaagaaacacgtcaggactagcttcaagttccagcaacaccattgataccgagggtgctgaaactactgaacttcagagacataaagatactgcttgtcctggactcaagagacaagattcatcaaaatccgtacaagataatcaacatcctggacatgagaataagcaaccaaagataattaagaagatactaacaactctaagagaggagagcaaatttagggaaagcaattctcctgttagagctagccgtgtaaagctaaattcacctagcaatagagaacgctcatctgacgactcaaagcaaagtgatatttcctccagttcaaggtctagtgaagttatgtcacatgaatcagcaaatgcaagctgtgaacctgtcaaacgaggacatgcatctcctcccttgaagcatttgtcaccaattgttgagcattctccgaaggttaaaattaaagtagatgagctattacatccacaccttgccaagcaggttggagaagttgttgatgcagctgcagggaaggttaagaacagaacaccgcccatttttattaaatgcaccagtattcctactcggaggcaaggagtagcaagtccaagccgtcaacacactggggtaaagcgagctcacaataaggtcatggcagagcatgcaaggaatccttgtcagcatctccatagtccaagcaacgctcttgtgaaacttccaagtgttccaatggttcctccaagtcatctagaagatcttaagagaaaaccagacaatacacgagcaaaatctgctcctcctagggctttagcaaccaaggaagacaacagtgcttgctccagttctacgattggtaatgctgaaaacaccaaccagtctgaaccgtctgaacctgactcaccaacttatttggtctcatcctgcaaatgtttgatacctgacactatcatacaaaagcacggcataacaagtaaaaaaagttcagaaatcatcacaaccaattgtgagaagaaaatgactagtaatggtgatcttagtctaagcgcagccatggtgcaatcttctgatattcctgaacaagagtttatttgcaaggatggaatgctctccagtcaggtgggtcagtgcagtgaaacagttactgtaccaagcgatgaagacaagttcacagtgcgggaactgctttcatcagtaccagatctttgttccttggtcccaacaacaatgatgaacactgagccaggaagaggacccactctcacccagtcatcagagaaaccatcgggtcctcatttaaatcctcctccagttgaggacattatacatgtcataagccacagcagtttccatgtgaatggtgagcaggcagtaaaagaaactggatcagagagcattgatgttgacaaacgtcttaacatggtaagagaagagataggtgtaagaagcaccgagccaaacctcataccttctggacctatagattctgatacggtgaagccaaatgtagtagaagctaatattacctttcagaaaccatccagtacagatgccataaaactgccaaccataccggaaggaaattttagtactctggagaccaacaatgggtttaagcaggaagcagctccggctaaggaaatactagatgtgacatctttcaggcagcgagctgaggctctggaaggtctcttagaactttctgcagaattactggaacacagtaggctggaggagcttgcgattgttctaaagccatttgggaaggccaaggtgtcccctcgagaaacagcaatatggttggctaaaagtttcaaaggcttgatgaatgacgaagcaagccgcagttcaacgtgagtacgcgtagcttttgtgccaccctttttactttggttgatttctgcttgtgctctgaagatgctatggttgtcttgttcatatctggcttcttggtatcgtgtgtcggtgtttccatttcgatagttattcattctttacagcacatgttgtaaatagcccagatttgtgaacagaaaataatacatgccagaaatggtgttaatttacatggttgaagtaacagagactaatttgatcaattattgttttg

SEQ ID NO: 205138 - DNA, 2946 bp, Zea Mays
gggatggtccaaggagagcttggggctcgctgccacctcgcgcgccagcgcctaaataaatcactcccacgcacacccaccaccgcgccgagcacctcctccttcccttccttctctctcccaccctcctcactagctctatctagctgagtgaactgaacagcccactggctcgtcttagctaagctcagctgtaaagctaaggttcggagtagctagcgtggtggccggagagtgtagcgagcggcgttcagctcaccgggggctgctgggtgagtgagggagccagcgtcgtgagagcgctccaagatgattacggggacggacttctaccacgtcatgacggccgtggtgccgctgtacgtggcgatgatcctggcctacgggtcggtgcggtggtggcgcatcttctcgccggaccagtgctccgggatcaaccgcttcgtggcgctcttcgcggtgccgctgctgtccttccacttcatctccaccaacaacccctacaccatgaacctgcgcttcatcgccgccgacacgctgcagaagctcatggtgctggccatgctcaccgcgtggagccacctcagccgccggggcagcctggagtggaccatcacgctcttctccctctccacgctgcccaacacgctcgtcatgggcatccccctgctcaagggcatgtacggcgacttctccggcagcctcatggtgcagatcgtcgtgctccagtgcatcatctggtacacgctcatgctcttcatgttcgagtaccgcggcgcgcggatgctcatcaccgagcagttcccggacaacgccggggccatcgcctccatcgtcgtcgacccggacgtggtctccctcgacggccgcagggacgccatcgagacggaggccgaggtcaaggaggacggcaggatacacgtcaccgtgcgccgctccaacgcctcgcgctccgacatctactcgcgccgctccatgggcttctccagcaccacgccgcgccccagcaacctgaccaacgccgagatctactcgctgcagtcgtcgcgcaacccgaccccgcggggctccagcttcaaccacaacgacttctactccatggtcggccgcagctccaacttcggcgcggccgacgcgttcggcatccgcaccggcgccacgccgcgcccgtccaactacgaggacgacgcgtccaagcccaagtaccctctccccgtggtgaatgcgacgtccggggcgggggcggctcactaccccgcgccgaacccggccgtggccgcggcgcccaagggcgccaggaaggcggcgacgaacgggcaggccaagggcgaggacctccacatgttcgtctggagctccagcgcgtcgcccgtgtcggacgtcttcggcggtggcgccccggactacaacgaggccgcggccgccaagtccccccgcaaaatggatggaggcaaggacagggacgactacgtggagcgcgacgagttcagcttcgggaacaggggcgcgatggacagggacgcggaggcgggggacgggaaagccgcggcggcgggcggggaccccagcacggtggccgcgccgacggcgatgccgccgacgagcgtcatgacccggctgatcctgatcatggtgtggcgcaagctcatccgcaacccaaacacctactccagcctcatcggcgtcatctggtcgctcgtctgcttcaggtggaacttccagatgccggccatcgtcctgcagtccatctccatcctgtcggacgcggggctcgggatggccatgttcagtctcgggctgttcatggcgctgcagccgcggatcatcgcgtgcgggaacaaggtggcgacgttcgccatggcggtgcgcttcctgaccggtccggcggttatggcggccgcgtccttcgccgtgggcctccgcggcacgcttctgcacgtcgccatcgtccaggtacttctgacttctgagggtggggaggggaagacggatagatttcacaatataccccgccggcacgcccgcctgcaacagcaagaatcatcgctgcgctgtttcctttctcggtccccctcctccctcgtgctcgcctctctctcccacctctctcgccgtggccttttgcgctcggcggacagcacaaaagttaccctttttttctcactgtgcttttggttttttgcttcgccaaacggcggaacgagcaggcagctctgcctcagggcattgtccccttcgtcttcgcaaaggagtacaacgtgcaccctgacattctcagcaccgcagtcatttttggcatgctcatcgccctgccgatcacgctcgtctactacatcctgctcggcctgtgaccgacccgtgggtgatggcaatggcatgccccgcattgctgtaactgtaaagaccgctgctgccactttccgttcaagggaggcaagtgaggagactgtctgctacgacatttgcttggcgcttcaaaaatgagtggcttgtttctctctctcttctatctattttttattttttctctagaagtaggtgtgaggattgtatggatggaaagtgtgggaggtggacaagtcgcggtagctaggtaggacgacaatggtgaggcaaaacggaccaaaaggaggtgcaagtacaaaagcttgaagggaacaggagatccagtttaagcacgtcacgggatgggttggatatttcaacgggttcagggtattttggttggctgcgctgaccgatgtaaaatcagcgcgccattgtgacaggagatcgatcttgcttgagataaacagctcacctccggagtttgatggcttgagataagggctcaactcaaaatagacagaaatatataccgtatttgtcactgaaacaaatcagtcttttatacacttggtattttaaaaaaaattgaactttcttattcgacttggaattttcttg

SEQ ID NO: 205139 - DNA, 1399 bp, Zea Mays
acatcccgtcgcgtcgcgtcgcggattacggaggaaccctctaggctccggttccggaaacagcgggcgccattcccgggcgaggaggccggcccagatccgagtacggcggcggcggctgcggcggcgagatgactggtggcggcccggccgcggcgtcgcaggcgtacggcgaggcatggtactgggacgagcgctaccgcaaggaggccgggcccttcgactggtaccagaagtacccggccctggcgccgctgctccgcctctacctcgcgccgcaccaacgcctcctcctcgttggctgcggcaactccgtctttggtgagaacatgattgacgatggttatcaagatgttgtcaacattgatatatcttctgtggtaattgagcaaatgaagaagaaataccacgataagcctcaacttaaatgtatggtctttgttcttgagtacctctgcagtatatcccacataatctgataccgtgtatttcccttgattggcaagacatgaagatggatgtaaagaacatgtcagattttgagtctggttcttttgatgctgttattgacaaaggaacactggattctcttatgtgtggtcaaaattcccaagagaatgcaacgaaaatgctagaggaggtcaacaggtaaataatacaatgatatttaccgtgatatatattgcttgattggatacagcttctatttaccggtcctgcatgcagaatcctcaaggaaaatggtgtctacatgctgatcacttatggggatccaagttaccgcttgcgtctcttgaaggacatggaaaaatggacagtaaagctccatgtcatagatgggagaaaagttcgaatcagaacaaatgggaactgacaaagccattgcctctagaggaccatagcacatcactagctgcacttcttggccccaaacctgatgtccactacatctatgtctgtgtaaagggcaacggtggcgcaagtgtggattctaaagctggagaagctgccaattgatttctcctataaccctctgaactgacgtgcgtaaccggtgtagcaaataatgtagagaaatagaacagatgttgtacctcgaattgatcgttgttgttttattggataataaccagcgtgtgaattgtagaacagatatcgcacctcaatttgcagttgtttcattgaataaccagtgtgtgaataatgtagaacagatgttgtaccgcttgtttcagtgtttcatgaattcgattgaccctgtcagtgatcctgtgcttgtaccggatgttctagatcaactgagttagatgtttgcatgattgcatcattgcatggtacttgggattaggctatcagctgtgtaggttacttatatccttatatactattatattattat

SEQ ID NO: 205140 - DNA, 1338 bp, Zea Mays
acatcccgtcgcgtcgcgtcgcggattacggaggaaccctctaggctccggttccggaaacagcgggcgccattcccgggcgaggaggccggcccagatccgagtacggcggcggcggctgcggcggcgagatgactggtggcggcccggccgcggcgtcgcaggcgtacggcgaggcatggtactgggacgagcgctaccgcaaggaggccgggcccttcgactggtaccagaagtacccggccctggcgccgctgctccgcctctacctcgcgccgcaccaacgcctcctcctcgttggctgcggcaactccgtctttggtgagaacatgattgacgatggttatcaagatgttgtcaacattgatatatcttctgtggtaattgagcaaatgaagaagaaataccacgataagcctcaacttaaatacatgaagatggatgtaaagaacatgtcagattttgagtctggttcttttgatgctgttattgacaaaggaacactggattctcttatgtgtggtcaaaattcccaagagaatgcaacgaaaatgctagaggaggtcaacagaatcctcaaggaaaatggtgtctacatgctgatcacttatggggatccaagttaccgcttgcgtctcttgaaggacatggaaaaatggacagtaaagctccatgtcataggttagttagttactcaccatcaggccaattcaactgcaccttccggtatttgcagagctccaatcacattgaccttttctcatatccaaaaaagatgggagaaaagttcgaatcagaacaaatgggaactgacaaagccattgcctctagaggaccatagcacatcactagctgcacttcttggccccaaacctgatgtccactacatctatgtctgtgtaaagggcaacggtggcgcaagtgtggattctaaagctggagaagctgccaattgatttctcctataaccctctgaactgacgtgcgtaaccggtgtagcaaataatgtagagaaatagaacagatgttgtacctcgaattgatcgttgttgttttattggataataaccagcgtgtgaattgtagaacagatatcgcacctcaatttgcagttgtttcattgaataaccagtgtgtgaataatgtagaacagatgttgtaccgcttgtttcagtgtttcatgaattcgattgaccctgtcagtgatcctgtgcttgtaccggatgttctagatcaactgagttagatgtttgcatgattgcatcattgcatggtacttgggattaggctatcagctgtgtaggttacttatatccttatatactattatattattat

SEQ ID NO: 205141 - DNA, 1240 bp, Zea Mays
acatcccgtcgcgtcgcgtcgcggattacggaggaaccctctaggctccggttccggaaacagcgggcgccattcccgggcgaggaggccggcccagatccgagtacggcggcggcggctgcggcggcgagatgactggtggcggcccggccgcggcgtcgcaggcgtacggcgaggcatggtactgggacgagcgctaccgcaaggaggccgggcccttcgactggtaccagaagtacccggccctggcgccgctgctccgcctctacctcgcgccgcaccaacgcctcctcctcgttggctgcggcaactccgtctttggtgagaacatgattgacgatggttatcaagatgttgtcaacattgatatatcttctgtggtaattgagcaaatgaagaagaaataccacgataagcctcaacttaaatatggatgtaaagaacatgtcagattttgagtctggttcttttgatgctgttattgacaaaggaacactggattctcttatgtgtggtcaaaattcccaagagaatgcaacgaaaatgctagaggaggtcaacagaatcctcaaggaaaatggtgtctacatgctgatcacttatggggatccaagttaccgcttgcgtctcttgaaggacatggaaaaatggacagtaaagctccatgtcatagaaagatgggagaaaagttcgaatcagaacaaatgggaactgacaaagccattgcctctagaggaccatagcacatcactagctgcacttcttggccccaaacctgatgtccactacatctatgtctgtgtaaagggcaacggtggcgcaagtgtggattctaaagctggagaagctgccaattgatttctcctataaccctctgaactgacgtgcgtaaccggtgtagcaaataatgtagagaaatagaacagatgttgtacctcgaattgatcgttgttgttttattggataataaccagcgtgtgaattgtagaacagatatcgcacctcaatttgcagttgtttcattgaataaccagtgtgtgaataatgtagaacagatgttgtaccgcttgtttcagtgtttcatgaattcgattgaccctgtcagtgatcctgtgcttgtaccggatgttctagatcaactgagttagatgtttgcatgattgcatcattgcatggtacttgggattaggctatcagctgtgtaggttacttatatccttatatactattatattattat

SEQ ID NO: 205142 - DNA, 2156 bp, Zea Mays
aaatctgttcattgccggctacctttcataaataacttatgaggccaaactaaagagggcagggcaggcgaatcgaaggaaaagtagtcaggagaggcgtttccctcgcaatcgaccatcacagatcaaatcgctgcaactagctagggtttcgtcgcctcatctctcgtcgatccatcgatggcgtccgagggcgaaaacaagaggatgatcacgctcaggagctccgacttagaggagttcgaggtggaggaagcggtggccatggagtcgcagactctccgccacatgatcgaggacgactgcgccgacaacggcatcccgctccccaacgtcaactccaggatcctctctaaggtcatcgagtactgcaacagtcacgtccacgccgccgccaaacccgctgactccgctgcctccgagggcggcgaggacctcaagagctgggacgcgaagttcgtcaaggtggaccaggctacgctcttcgacctcatcctggctgccaactatctgaacatcaagggattgctggacctgacctgccagacggttgctgacatgatcaagggcaagactccggaggagatccgcaagacattcagcatcaagaacgacttcacccaagaggaggaggatgagatccgcatggagaaccagtgggccttcgagtgattgttgtcttcctttccctgccatggcgaagcccgtctccatccaggtgtggaaccccagcggcaagtaccgcgtggtgagcaccaagtccatgccgggcacacgatggatccgcctgctcaccgacaacgactgccgccttgagatatgcaccgagcacaagaccatcctctccgtggacgacatcctggcgctcatcggcgatcgctgcgacggcgtcattggacagctcaccgaggactggggggacgtgctcttctctgcgctcaagcgcgccggaggcacggtcttcagcaacatggccgtcggctacaacaacgtcgatgtcgaggctgccaacaggaatggcatcgcaatcggcaacacgccgggcgttctgacggagacgacggctgagctcgccgcctccctctcgctggcggcagccaggaggatcgtcgaggctgaccagttcatgagggctggcctctatgacggatggctcccacacctgttcgttggcaacctgctcaagggccaaactgttggagtcattggagctggtcgcattggctccgcctatgcacgcatgatgattgagggtttcaagatgaacctcatctactacgacctgtatcaggccacacgtcttgagaatttcgtcacagcatatgggcagttcctcaaagcaaacggtgaggagcctgtcacctggaagagggccgccaccatggaggatgtcctcagggaggctgacgtgataagtctgcatccggtgctggacaagaccacctaccatctgataaaccccgagaggctggccatcatgaagaaggaggctgttcttgtgaacgcaagccgagggcccgtgatcgatgaggccgcgctggtggagcacctcaaggctaaccccatgttccgcgttggcctcgatgtctttgaggatgagccttacatgaaacctggactcgctgacatgaagaacgccgtcgtggtaccgcacatcgcatcagcctccaagtggacacgcgagggaatggcaaccctgtctgctctcaacgttcttggtaagatcaaggggtaccctgtgtgggggaaccccaatcaggtggagcccttcttgcaggagaatttgacgccaccgcctgcctgcccaagcatcgttaatgccaaacaaattggcctgccatcggcaaagctttaggagcgaacactgacaggctggtatctacatgttgaagatgtgtcgtcgtcgtctccaccacgcgcacatatatgtacatgcatgtggattgaggtcatgcatctgcagagcaggtagcacatattaatttggatcatatatattgaccaatacacactgtatgctagattgctaggttgctgtgcatggatcatattgatcaatgacgaccaggcctccctccgtttcccttctatatttaggacctatttggttccttaagtccaatttggttccttaagtccatggactaaactcccgt

SEQ ID NO: 205143 - DNA, 3018 bp, Zea Mays
acagcactccacctcactgctccagtcgcgagccgcagctgcgcgtcgcgtcgcatcgcacgcatctctcctgccctccagctccaaagcttcgtcgtctgcgtcgccccgcgccccgtcttgctcgctccaagctagacaccataccacccaggttttgttttatgcttgttcatttgtctatggacaatggactagttgctgcactgcttttgtgagtcaccatgggaagcagtggagcagatacatcgtctaagccaaacaaggcatccgccccacaggagcagcaacaacctgctacctcaggtgctgcaacaccggctgtttatccagactggtccagcttccaggcatatcctccaatcccaccacatgggttcttcccctcacctgtggcatcaagtccacagggtcatccttacatgtggggagctcagcctatgattccaccatatggagcaccgccatatgtcatgtaccctcctggagtgtatgcacacccatctatggcctcgggtgcacatccatttactccttatgccattacttctccaaatggcaatgctgatgctactggaactactgctgtagcttgtgatactgatggcaagccctctgaaggcaaagataaaagtccaactaagagacccaaaggaactttgggcagcttgaacatgcttactggaaagaaccccagtgaacatggtaagacctcaggtgcatcagctaatggagccacttctcaaagtggcgaaagtggcagtgacagttcaagcgaagggagtgaaggaaattctcataatgtaagtattgctgaattgttcattcatttttgttgtatattcgttatgtatgcaaaataatttggtctgtgtatccaatgaaagaattttaaaaatactccctccagtaaaaaatgatatttttgtctttttagtctttgaagtataactttggcctcattttttgtactgaaatctagttacaatgtctaataaattatgtgatatcaaattttttactgccgaaaactctacccttctgtatatccaaactgaatattttgagagctctcattggttaaagtttcaaaagtttgaccagattttagtcaaaggatcatagaaatgttttttccaatatcctgtctcctgacatgattgatgtactttgttagtttatttgatgtccaaatatttcggaccacactatcatgccttttgagttgctgtgcattcttgtcacagttgtgtttacaatttaattgcatatggtcaatatttctggcattcattatgcgttgattttatcttgggagctcttttaatgcatgtgcatcgttgagtaatttttacaggattcatacaagcatagtggacaggaacaagatggagacgtacgaagttcccagaatggtgcatcacgttctccatctgagggaaaatttaaccaagctatggcaatcatgcccatgccatcaagtggcccagtaactggtccaactacaaacctgaatattgggatggactattgggccaacacagcaagctctgctcctgtaattcatggcaaagtgaccccaacaacagttccaggggctgtggtcccagcagagcaatggatacaggatgaacgtgaactcaaaaggcaaaaaagaaaacagtctaatagggagtctgcacgcagatctaggttgcgtaaacaggctgaatgtgaggagttggctcaacgtgctgatgttttaaagcaggaaaatgcttcacttagagatgaagtaaaccgtatcagaaaagagtatgaggaacttctatcaaagaataattcactaaaggaaaaacttgaaggcaaacaacacaaaactgatgaggcaggacttaacaacaagctgcaacattctggcaatgacatccagaaaaaaggaaactaatcgagctatcatgcaatgcttgcatagcatggccctaactagattattgggaggcgcaattgtagtatgcgtgttaactccttactttattgcagttaattgttaccaggttgtgataatgttgatgccaaccttgtgtgtgggtgtttcctgtttcagatctatcttggcttatcttttagaagtcaagatgtgactgaagatgtaggctgtgacccagttcactgtatctgaaatagtggataaactcaaatttacaatttgtattgctgactaatattgttatgtatacctggcaaaaggttttctttgaattcagtctctggttgaacattttgctggtctaccactgctgcatagcttatttatactgtttatatcagttgtttctagttattctctatagataattaacaaatagatgaggaagaacgtctcaacctctgcaacaatgaatgtgtgtgtgcgtgcgtgtgtagtatgcaagtccctctttttgcgtcgtctattttcgggtgtaggggtgtgcgtgtagtatgcaagtccctcttttttgcgtcatctattttatactccctcctgtcccaaaatataattcgttttagatcaaacacatattgattaattgatctatggatgtagtttgtatgtctgtctattcattatcacttatttgaatgtgaataaaaaaaaagagggctagaaagaactatattatgggacggagggagtatttcacattgatctatggatgtagtttgtatgtctgtctattcattatcacttatttgaatgtgaacaaaaaaaagagggctagaaagaactatattatgggacggagggagtatttcacatcgaagtttccaggtttgtttcaaccctgttcaaattgtgagccttggctgtatttgattttaagtttgaataatccacctgctgtaggtagtttggttaaaagacattgctatttttctgcttagtgatactgatatcagttattcatttctcgtccatctatttttgaagtgtcagtagtggtttgttaaacttgttttcctgagcttgctcctgattctggcaagtttttgggc

SEQ ID NO: 205144 - DNA, 2145 bp, Zea Mays
ttcaaatcttttaggccgcacgctgctatcctcatcagtcttctccgcttttccccccatctccttctgggcgcaccaggaaaaaaattgatacattcctcggcagctgcgcgagtcctctgttgatacccccggcgacccaaagcccccgtccgagcagcagcagcagcagcctaacaggattggggatttttttttgcttcgtgttctccttctcctgctgtaggcgttgattcgggtgatgagagatgggcttcttggcgtgcttgtgccgatgccctcaggacggggacgacgacgagaaggagggggagcagttcagaatcaaccaccagtggactacccaaaatcttctgaaagcagcccattgaaggctgagagagtggttcatatggacggagcccagctaattggtagacatgatgaagcaacaatcttcacgttgcgtcagcttgctgaggctaccaataattttaggcaggactctcttttggggcgagggggattcggttgcgtctacaaggcaactcttagtaatggacaggttgttgcagtcaaacaacttgatctaaatgggcttcaagggaacagagaattcctcgtggaggttctcatgctcaacctcctgcatcaccctaatcttgtcaatctgcatgggtactgtgttgatggcgatcaacgcttgctcgtttatgagtatatgccattgggatcactagaagatcatctacatgatcttgcacctaatcaacaacctctagattggaaaacacggatgaagatagctgctggtgcagcggctggtttggaatacctccatgataaggcaaatcctccagttatttaccgagacattaaaccatcaaacattctccttggcgaaggctatcatgcaaaattgtccgactttggacttgctaagcttggtcctgtaggcgacaagactcatgtgacaacacgcgtcatggggacacatggttattgtgctcctgaatatgccttaactggacagctgacagtgaagtctgacatctatagttttggcgtcgttttccttgagctaattacaggtcgaagaccacaagacagtgatcggcctcctgaggaacaagacctagttgcatgggctcgtccattgttcaaagaccaaaagaagtttcgcaagatggctgatccttcgttgtgtggccgcttcccaaagaggggtttattccaggcactggctattgcagcaatgtgtttgcaggagaaggcaaaaagccgacctcccatgagggaagttgccgcagctctctcttatttagcatcacaagcatacgacaggaacaacaacgctgctgctcatcgtaatcgtgccgggccttcaacaccgagagttctggacgaccagattggccaggacacctgcacattagctaatcaacagggagctcagatgtccatgcatgtcgggacagaccacgccatgcctgaagtgaaggaagcttcctgtagtggttcacatcgtggaggacggggcagggttaccccgaatggcgctgatagggagcgtgcacttgcggacgccaacgtgtgggccgaggcttggaggcgccaggagaaggcaagcaagatgcgatagcgaccagagcctgactgcatgagttttgacatgtcactgcaaagatgcttactttgcatacattttgaaagagaactgtgggctacacgaagggttgttagaatagaaagaggaataatgcgcagtggaaatgcagagcttcaccagagtgagcgcttcgaagatttcaccggtgaatctacagtactcagacttgtttcagtgcgtacatggatttagcttactttatacacagacacttcacactccatagatgcatgtaatagctcaataataggcacagtagactacacaatctgtctgtagttcagcggttttggaaaattaataacataggatccgccgttaggttgcatgaaatgctatgatccgttggcgggtcttgcattctctattgggtcaacgtctacatatttgtacatcgttcaaccatttacatgatgaaatatacaattaagacttctaagttggtactgttaaaaataattatgatactgaagacaacaattgatagtacaactttg

SEQ ID NO: 205145 - DNA, 922 bp, Zea Mays
gttaaagcaacataatgcttccgtgcatttaatctatgcatagggctgacaaatgtgtactagcatcttctggctttcagggtgatattaaagctctgcacaagaacctagctgccagagaattgctataccaacaccagcataacaaaaggatgagctgccctgccatggcacagctcctctccaataccctgtactacaagcgcttcttcccatattacgccttcaatgtgctcgggaaagggtgtgttttcacctatgatgcagtaggttcctatgagagaactggttatagtgctcagggaacgggatctactttgattatgccagtcctggacaatcaactaaaatcaccaagtcctctattgctccctgccagggatgctgtcacaccattgtcggagtcagaggccatcgatctagttaaggatgtgtttgcatctgcaactgagagagacatctacactggagacaagttggaaattgtagtcatcaacaaagtcgggactaagcgcgagtacatcgacctgaggaaggactaagccaacgcttcagttgtgctgcagctgtcatttgcttcggacatgtttcctagtctggggatttatgtctaaagccgttgcttgcatagaaacatatgttattacttgcatatgtcctgtaccagggttcagtcagcttgttttttttttgttgaaacaaattgcttggatattgaagcggtacttactggcggaaagtctatatttggttgggagcttaacattaatggcctcatccgaaatgtcacaatcacaagtctctttatatctcttctactcattcggattcgaattgccttttgtctttaaagatctttaacttttatgtagtacctcccttttaaattatatgatgtttttagtttcttttagtatattgt

SEQ ID NO: 205146 - DNA, 638 bp, Zea Mays
ccctgccctcctccaccagtagatacatgtttggaatggagttatctgcgtggaggactgacgacgctcgaccgggactatggactgattaacaatatccaccatgacatcggaactcatgtcatccatcaccttttccctcaaatcccacattaccatctcattgaggcgaccgaggcagcaaaaccggttcttggcaagtactacaaagaaccaaagaagtcgggtcctctcccgtggcacctgtttggggtgctagcacaaagcttgaagcaagaccactatgttagcgacaccggagacgtagtgtactaccaaactgactcgaaaacgaacacctctgcacaaaaatctgattgacacagactatagaacgtagcgtattcttcatttttctcaggcgggctgtgcctgaagacctggccagcctcctgagacctctgattggtgtgtgtgtgaccgggttcgtcaattcaagaatgtaaggtggcgaagtattatcatgtatttgagtgagggtataattctttccaatggtcgaagtcggatgctgcttccgatgtaacgaactgtgattctttgggcaagaggtgtactattacagtaaagagtgaaaaaaaagagttagctacatgaaa

SEQ ID NO: 205147 - DNA, 1478 bp, Zea Mays
cttgggtttttgggttttgtgcccgccacctgatcgcgggagccgtcgccttccttcctcctccccgccgcctcagccctcatggtcatggagaccggagaccccgggaagctgttgcgcgggcattccctctctcgtgttcctcccgcttcccctttccctcggctcaggcctcagggagatttggttagggcaggggacgaacgagcgcgggcgtcaggtatgccgggagaggaggacgtccgcaaggtctcgcgcgaggacatacagcttgtccagaacctcatcgagcgttgccttcagctatatatgaaccagaaagaagtggtggacaccctatctttccaggcaaaaatagaacctagtttcactgagatcgtctggcagagactcgaggaagagaaccgtgatttttttaaggcatactatgcgaggctgatgcttatgaatcaaatagtgtccttcaataagcttcttgagcagcagcatcagattatgaataaagatcatcattatgggatgcctgctatgccttctactgctcctaatggctcaaacactaacatgttgaaccaagccatgccatttctgccagacactatccccagtactgcaatgcaagataacttgttgagtaatggaggttctagtagtatagtaaatggtgctccatccaatgaccagtgtagctattctggtaaagttgctcatggccttcctggtgtcatggatgcttcatcaagccttctagcagcacacaaatcgacagttgggcagtttaatggacacaatggaacaacgacaaagacagagtctgactactcaagcaactcagattttggattaggcaatgagaccgtgttcctggagcagtcatttggagatatatcaggtggatcgtttagcagctctgagttgaatggacaaccagtaggttcatcttcgtatggtttcttgagccagattccttgtaatttcagcctttcggattggacagattgtttcagccaaagctcagaaatttttgagaattacggtgggtcccctttcatcccttacgatgcaaataacatcccagagtctagcgctcgagaaaatacaggttgagcagtgttccatttgtacatactattttgggcagaaacaaaaatatctacagtcgtgatcgtggaactagctgacttggtggcaaccgtttctttttctgttataggttttgatgcttcttagagtagaagcatggatggcttcttttgaagggtaggaccaaataatctgtcattgaatggtgtcaacaaaatcatcttctgagggtaatgtggtggtaaactgtattcgttgtactccttccgtttctttttagttgtcgctggatagttcaattttgcactgtccagcgacaactaaaacgaaacggagggagggagtagctttctagtgtggaagctcttcgataacgtgaaagttctgcttttgac

SEQ ID NO: 205148 - DNA, 1730 bp, Zea Mays
ccagccacggccacggggggcgctctcgagagaaagatccagccccaaaggcccaaacccgaaacccctctcttcttcctccttccattggggtcgcgtccaacaagaggttggccagccatcccgcgcgagccacttcctctctcctccccatcggatccagcgccacgcggatccgcaaggcaatccatggcctctacccaggcggaagcggaggcgggggcaccggccccgcccgaggcggcggaggcgaaggagaagggcaagcagggcggggtgctggggagggtgtggcgggcgctcttcggtggccgcgaggacttcgagaagcggctgcagtacctgtccaaggaggaggcagccgtgcacgcgcggatgcgccggcggacgcagttctcgcgccgcgccgtgcggaacctcatcgtactctccgtcctcgccgaggtgttagctgttgtttatgccatcatgacgacaagaaatgaggatctaacttggcaaatgagggcaatacgagtgctacctatgttcattcttcctgctgtatcctctgtcatatattcaacagttgttaacttcacaaggatgtttgagcagaaagaccagaagacccttgaaaaattgagggctgagaggaaagccaagattgatgagcttaaagagagaacaaattattatctaacacagcagcttattcagaaatatgatcttgatccagccgcaaaggctgcagcagcttctgttttggcatctaagcttggggaggagactggcttaaaagttcatgttggagaagaaccaaagctggatgctgcagtggccagaagcaatgatgttgagatagtaccttcagatggtttgagaaacaggaagcaacccagtgcaagaggaagcaggactgggagccccacttctcataccccagcacagggaactgaaactaatctacctcctgctcctgctagtgctggcctggaaactgcaccagctccagtggtggtagagcatcatcaaggttcaggggctagtgatggtggtggatggattgcaaagattgctgccttacttgtgggggaggacccatcacagtcgtatgctttgatatgtggcagctgccatatgcataacggcttggcccgaaaggaagattacccacatgttacttactactgcccgcattgtcatgcattaaacacatcaaaacagtccatggggcaatactcaggctccaactcaggccggagctacccgaggaaggaaagacagacaagcaacaagtggaggcaagttgatggttcttatgacttgtactgttgatgtgtgtggaactagtttatctttagacttatatcgtcatgtgttcaactggtggagccacaaatttagcactgttgtaaattggaaatagtgagtgatatgatcctcggaagcatagcacgcaaaaacaagaaatgggacatggtgtacatccttgagtggatgattttttgttgtcatatagagcgcgaagtcttcttcctgcgagacaaaaagctatatgacgttcagacaagatggtggtgcaggatataacataagatcattgcttgttcagagaacagcgacatgtagaattttttgcgtttgtcttgaccttcggtcttttctttgttgtttgttacattaccaccttacagcatttcgtacacagtttccttatgatgttgaaaccgtacttttcatttggcgtt

SEQ ID NO: 205149 - DNA, 998 bp, Zea Mays
gaagtggaagcaatgatgttgagatagtaccttcagatggtttgagaaacaggaagcaacccagtgcaagaggaagcaggactgggagccccacttctcataccccagcacagggaactgaaactaatctacctcctgctcctgctagtgctggcctggaaactgcaccagctccagtggtggtagagcatcatcaaggttcaggggctagtgatggtggtggatggattgcaaagattgctgccttacttgtgggggaggacccatcacagtcgtatgctttgatatgtggcagctgccatatgcataacggcttggcccgaaaggaagattacccacatgttacttactactgcccgcattgtcatgcattaaacacatcaaaacagtccatggggcaatactcaggctccaactcaggccggtcgacccctgttgttctggctgatggattatctacttccagttcagtacaagagactgaattgagtaacctgacgacattgcaggagctacccgaggaaggaaagacagacaagcaacaagtggaggcaagttgatggttcttatgacttgtactgttgatgtgtgtggaactagtttatctttagacttatatcgtcatgtgttcaactggtggagccacaaatttagcactgttgtaaattggaaatagtgagtgatatgatcctcggaagcatagcacgcaaaaacaagaaatgggacatggtgtacatccttgagtggatgattttttgttgtcatatagagcgcgaagtcttcttcctgcgagacaaaaagctatatgacgttcagacaagatggtggtgcaggatataacataagatcattgcttgttcagagaacagcgacatgtagaattttttgcgtttgtcttgaccttcggtcttttctttgttgtttgttacattaccaccttacagcatttcgtacacagtttccttatgatgttgaaaccgtacttttcatttggcgtt

SEQ ID NO: 205150 - DNA, 1938 bp, Zea Mays
gtgtttatttgcataggtaggtgatacgtgggaagcaggcatctcaaggttgcaatagacagtgtttgtgtttagaatattgtgccagtgcctcaattttattagatgaacattgggacgtcagctatttgactggaccaatagtgtgtaaacggaaaatgaacgccgctgcttttctgtcaaacttaagtcccctttgagttcatcatgggatctgttttatttttcactatgctccttcagttatgtgaatcattgttcttttttttttctgggggggggataataaagttatggtgtttgcattatgaatgcatgttaccatgattttaggatttcatagagttttaaaacttcgctgccgttgaaatactaaaatagatgctcctccacatgatacttatcttttctgctcttacgatattctcctcctttttggttgttgattcattgtatatgatgcagcttacttttcatattgaacctgtactcttgtagtgacttatcttcactgcatatccctagcttgtagtttctactggtttgattgttcagtcctgttctcaggtgttagctgttgtttatgccatcatgacgacaagaaatgaggatctaacttggcaaatgagggcaatacgagtgctacctatgttcattcttcctgctgtatcctctgtcatatattcaacagttgttaacttcacaaggatgtttgagcagaaagaccagaagacccttgaaaaattgagggctgagaggaaagccaagattgatgagcttaaagagagaacaaattattatctaacacagcagcttattcagaaatatgatcttgatccagccgcaaaggctgcagcagcttctgttttggcatctaagcttggggaggagactggcttaaaagttcatgttggagaagaaccaaagctggatgctgcagtggccagaagcaatgatgttgagatagtaccttcagatggtttgagaaacaggaagcaacccagtgcaagaggaagcaggactgggagccccacttctcataccccagcacagggaactgaaactaatctacctcctgctcctgctagtgctggcctggaaactgcaccagctccagtggtggtagagcatcatcaaggttcaggggctagtgatggtggtggatggattgcaaagattgctgccttacttgtgggggaggacccatcacagtcgtatgctttgatatgtggcagctgccatatgcataacggcttggcccgaaaggaagattacccacatgttacttactactgcccgcattgtcatgcattaaacacatcaaaacagtccatggggcaatactcaggctccaactcaggccggtcgacccctgttgttctggctgatggattatctacttccagttcagtacaagagactgaattgagtaacctgacgacattgcaggagctacccgaggaaggaaagacagacaagcaacaagtggaggcaagttgatggttcttatgacttgtactgttgatgtgtgtggaactagtttatctttagacttatatcgtcatgtgttcaactggtggagccacaaatttagcactgttgtaaattggaaatagtgagtgatatgatcctcggaagcatagcacgcaaaaacaagaaatgggacatggtgtacatccttgagtggatgattttttgttgtcatatagagcgcgaagtcttcttcctgcgagacaaaaagctatatgacgttcagacaagatggtggtgcaggatataacataagatcattgcttgttcagagaacagcgacatgtagaattttttgcgtttgtcttgaccttcggtcttttctttgttgtttgttacattaccaccttacagcatttcgtacacagtttccttatgatgttgaaaccgtacttttcatttggcgtt

SEQ ID NO: 205151 - DNA, 1254 bp, Zea Mays
ctcctggcttcctctcctctcccatcttctccttccttgaccccagccctgcggagccggaaccggagccagggccggggagcgtgcgagtgcgaacgcaggagcagctcacgcgcgtgcggcacaccacctctcgcctcagcgccgccccacccccactataaataacgggaccatcctccccttcccctgcctccacctccgctccagtcccgtgtcctcctcccgccgtctctctcgtcccggacgcctccgccgcgccaatgcgccacgcctcgccaccgcaggagctccccgccgccgggcgcgagatccaggcggcgctggcccccgccaacggcaacgccgcgggcgcccgcgggggcggaggctccttcacggcgctgctgggactccccactccgcaggccatggagctgctcctcccccgcacgacgccgcccgccctagccctagccccagccgcagcgcccgcgcccacgcccaccttcccctccgacccgcacctcgtggaccgcgccgggcgcttctccacgttcgcgcccccgtcgccgccctccccatccccaacgcagcagcctccaccgccccctcccgccgccgtcgccggcaagcgcaaggccgaccccgtcgaccgcgcctccaaggggaaggcggcgaagaaggggaagacggcggaggagaagcccgcggccgccggcggcgaggacgagaagccggcgtacgtgcacgtgcgggccaggcggggccaggccacggacagccacagcctcgccgagcgggcgagacgcgagaagatcaatgcgaggatggagctgctcaaggagctggtccccggctgcagtaaggtatcaggaacagcgttggtgctagatgagatcatcaatcatgttcagtctctccaaaggcaagttgagtacttgtcaatgaggcttgcaactgtaaacccgaggggcgattttggtgggctagatagctttctgaccacggagtgtggaaggatagcaagcttcaactgcaagaacggaatcgacttggagcaggtaacctggccagaaatgggtgttcatggagcaaggcagctgatgcaactccaacagcagttctggcatggtgatttggcgcatccacaccaagtggcttcacagtgggaaaagcggggggatggccatcctcccgtcttcagcaactccagtccctctctcttcggctatgatctaacaagctctggcttataacaccgctccagctttt

SEQ ID NO: 205152 - DNA, 1909 bp, Zea Mays
cgacacgaaattcccgcgcgcgcggaccatgatgcgcgagaccaggagcaggagggcaggcagggctccggcgagaactgccgcaggcaccaggaccacacagcctgacagacacccggcgatcggcgtgccacacacgtagaaaccactgcagaagtggccaaagcgctgtggccgcagcccgcttgcgaggcgcactggcactccgcagctgacgacgacccggcagtccggcacaccgcctctttccgtgtaggctggccgccgccaccagctcgaaaccatggaagtcgcggccgtggcgtgccgcgccgggctgcttgcgcgggcccgtccaagcagcagggcgcgtacgtgggccgttgccgtcggccccgccccgtccgccgctagaagaaggttgctcgtcgcgtcgctcggggtcggggagccactcccggcgcaatccctgggcgaggaggccgtggcgctggaggtaatccgattccgatgccgtcttgccgtgggtgaggaggaggatgatctgaactccattgtttccgtcgaaaacctgcctcccgctgctgctcacgttcctgaggcaaggaggacaacagtgcgcgtcaggttcgtgctgaggaagcagtgcgccttcggccaccagttcctcgtcgccggcgacgacgcggcgctcgggctttgggatccagctaaggcgatctccttggtttggtcagaaggccacgtctggacggcgaacacggatttgccggcgaacaggtcgatcgagttcaagttcttgctgcgagatgcctcggggcatgcgcattggcagcacggcgctaacagaactctgcgaattactactgaaaccccaaacaccgtagttgtccacgaagactgggatcacggcaacaaacagaaagtgtcagaggaggaagagctctccatcggggaagatgtgatgtttccagatgatcttgcgggaacagatggcgcaagcgcaatgccggcagataatcccgagaagcatcagaatgtggagactgacagtgacaggtcggctgcggtggttgcagatgctcctccgcagcaggaaatggtagcagcaaacggaacgggccaaccgcagctggtggtggacgggcacaagacgattcttgaagaggtccccggagaagaaaacggcaccctttctgccgccaattatgctggtaatggcagcatcgacgacgatgacgacgacgacactaccttgtatcagggaggtgatgtgctaccgaacaggccgacaagtatatttgagaacgacttggcttgggccgggaaagccatgcagcagctgctccgggtcctcggtttccagatcggcacaacaagaacgtgaggttcagcttcagatgccgttgtgtgtatatgttgcaaaccttcaactcacttctctacgcagaaagaaacgtcggtgctgaggattgtaactgaaactccagtaacagcagcaaacatcagctgtcttcccccctgcactgtgttgcatatagcaattactaggagataaacaactggcactgcaagtatgttcagtttagaaacaatgactaataaggtgagagtcatcgacttcttatccgcttgtcgtgaaggcaggctccatctgtactgtacaacatggcaaatgtaagttcggtacaaagtcgaatatgtggagcagtggatgtactcttctaaaagaaaagggtgatgcacttctggtaaaccaatgacatctgtaacggtgaaaatgagctgttggctgttgccctcacattctatccttcttgaatattacactagaacattaggtgcccatttgggcgccctacagtggtttaaggcagaagataatgtggagccaacatgctttgtgcaactatactaattagatgataat

SEQ ID NO: 205153 - DNA, 1284 bp, Zea Mays
tttgattttgtaaaaatttgggatccaagtttgcgtggttctgaacttcgagcaacacttaaagggcatactagggcaattcgaacaatcagttcagatcgtggcaaaatagtttctggagctgatgatcagtctgtcatagtatgggataagcagacttttaagcttttggaagaactgaagggccacgaggcaccggttagttctgtccggatgctctcaggagaacgtgtccttattgcatcccatgatggtactgtgaagatgtgggatgtccggactgatacttgtgttgttaccgtgggtcgttgccaaagtgctgttctctgtatggaatatgatgattccactgggattctggcggctgctggaagagatatcacggcacatgtctgggatattcgctccagcaagcagatgttcaagcttcaagggcatacaaagtggataagatcaatgaggatgaccggagagaccataataacaggtagtgatgattggactgctagagtgtggtcccttaaccggggaacatgtgatgcagtgttagcatgccatgctggtcccgtactatgtgtggaatactcaccttcagataaaggaattatcactggttcagctgatgggctcatacgattttgggaaaatgaaggaggaataaaatgcgtcaagaatcttacacttcacacagcatccgttctgtccattagtgccagtgatcactggctagcgattggtgctgctgataattctatgtctctttttcatcggccacaagaaagattcggtggcttctcaaatgcaggatcaaaagttgcaggatggcagctttacagaactccccaaaaaactgctgcagtggtgagatgtatagcatctgacctggataggaaaagaatatgtagtggtggtcgcaacggactcctgcggctttgggatgcaactacaagcatctaggactgatagatgttcatgtgaaaaggcaattgacatgatgttgcatgccattttccttttagctaggaatttatgtgctatttagaggatgcgaaaggagccggactttgttctactgtttctttatcatctaaaaaaccctgcccagttgagtatatgtttgacgtcgtgtaaaattttgtttatattttcgggttcagatagccttacgtggctacgattttgtaagaactatgagaaacttgggaagttctgtactactaccagtgcaaatgtttgttttagtacaacattattttttatgtgcatattcatcgtatgaacctg

SEQ ID NO: 205154 - DNA, 1939 bp, Zea Mays
aaggcccttgggcatgatggttttactggtcgcttttacaagcttctgggatggctacttcgaatatttgatggaaaattgttcaaataagtcagcaaattatgtaacgttagttactgcacagctcattctcatggcaactcacatggctggattgggattacctgacattgactcttggaatatgattgagaaaatagccgagagaaacaacttgggttataaacagcttatcaaacttagagcattgctcacacatctgcaacaactccggattggctattggggggttgctacagggaaaagccaaccattgcagtcatatggcatggcttcacctcatgcgatcgatgtgattgatgaaagccaacaacctgctgaagcatctgggttgggccgaagttgggtgcaaagtatgtttagcagagacagaagtttaagagccagctctttcaaccgagctagtgatggaaatgctgttgctgccacgggcaaaaccgaaatctcagctgcacaaaagaaaactcaaactaacatgaggacccttagagggcatacaggtgctattactgctcttcattgcgtaacaagaaaggaggtctgggatcttgttggtgatcgtgaagatgctggttttttcatcagcggaagcacagattgcacggtaaaaatttgggatccaagtttgcgtggttctgaacttcgagcaacacttaaagggcatactagggcaattcgaacaatcagttcagatcgtggcaaaatagtttctggagctgatgatcagtctgtcatagtatgggataagcagacttttaagcttttggaagaactgaagggccacgaggcaccggttagttctgtccggatgctctcaggagaacgtgtccttattgcatcccatgatggtactgtgaagatgtgggatgtccggactgatacttgtgttgttaccgtgggtcgttgccaaagtgctgttctctgtatggaatatgatgattccactgggattctggcggctgctggaagagatatcacggcacatgtctgggatattcgctccagcaagcagatgttcaagcttcaagggcatacaaagtggataagatcaatgaggatgaccggagagaccataataacaggtagtgatgattggactgctagagtgtggtcccttaaccggggaacatgtgatgcagtgttagcatgccatgctggtcccgtactatgtgtggaatactcaccttcagataaaggaattatcactggttcagctgatgggctcatacgattttgggaaaatgaaggaggaataaaatgcgtcaagaatcttacacttcacacagcatccgttctgtccattagtgccagtgatcactggctagcgattggtgctgctgataattctatgtctctttttcatcggccacaagaaagattcggtggcttctcaaatgcaggatcaaaagttgcaggatggcagctttacagaactccccaaaaaactgctgcagtggtgagatgtatagcatctgacctggataggaaaagaatatgtagtggtggtcgcaacggactcctgcggctttgggatgcaactacaagcatctaggactgatagatgttcatgtgaaaaggcaattgacatgatgttgcatgccattttccttttagctaggaatttatgtgctatttagaggatgcgaaaggagccggactttgttctactgtttctttatcatctaaaaaaccctgcccagttgagtatatgtttgacgtcgtgtaaaattttgtttatattttcgggttcagatagccttacgtggctacgattttgtaagaactatgagaaacttgggaagttctgtactactaccagtgcaaatgtttgttttagtacaacattattttttatgtgcatattcatcgtatgaacctg

SEQ ID NO: 205155 - DNA, 873 bp, Zea Mays
ccacgtggcaggcattgtgcttttttctcgcttcgatagctaatttcgtcgtcacccgtcagaccgacacggaggtaggagaggagggacgagggaggggaaaagagagatggtggaggcatcgccggagtccggcgccgcggcgaccggaggtgcctctagtacggcggcggtgcggaaggggaagtcatgcaagggctgcctctactactcgtcagtgctcaagtcccgcggttacaacccaatctgcgttgggatcccccgctccatcccccaagttcctaactacgtggtggatgaacctaaggaggaggcgacggcgcaggggcatgacctcaggcggttcagttattggtggacagcagattggtcgagagaaagccatcggcaactgaacaagctccagcacatgttgcaaaggatgcagcagctaccatccgctctcaccaacaaggacaacagagacctcagaacttgtcgaggcaggaattcttggacaggtttaagaggagcgctggactggtcgcttcaggtgttgcgaagaatctaaacaaaacagccaattatatcaaagaaaatattcaggacatgtacaccgatcgtcgtccaccaaagtagcaaccatgccgagtgattgtcgtcaagagctgaagaaatcgcttgctactggaaactttacatcaggactacctggaaactttactccactctcctcacttgttaaacgaaatggagcttttctgggataccaacttccttttctttacctgcataatcttgtaattttgcggctgtatatgtacatgcaaacaacttctttgaagcgaaaaatcagatctcgtttggtgtattgatcaatagtgtcagcacgtc

SEQ ID NO: 205156 - DNA, 813 bp, Zea Mays
gtcagaccgacacggaggtaggagaggagggacgagggaggggaaaagagagatggtggaggcatcgccggagtccggcgccgcggcgaccggaggtgcctctagtacggcggcggtgcggaaggggaagtcatgcaagggctgcctctactactcgtcagtgctcaagtcccgcggttacaacccaatctgcgttgggatcccccgctccatcccccaagttcctaactacgtggtggatgaacctaaggaggaggcgacggcgcaggggcatgacctcaggcggttcagttattggtggacagcagattggtcgagagaaagccatcggcaactgaacaagctccagcacatgttgcaaaggatgcagctaccatccgctctcaccaacaaggacaacagagacctcagaacttgtcgaggcaggaattcttggacaggtttaagaggagcgctggactggtcgcttcaggtgttgcgaagaatctaaacaaaacagccaattatatcaaagaaaatattcaggacatgtacaccgatcgtcgtccaccaaagtagcaaccatgccgagtgattgtcgtcaagagctgaagaaatcgcttgctactggaaactttacatcaggactacctggaaactttactccactctcctcacttgttaaacgaaatggagcttttctgggataccaacttccttttctttacctgcataatcttgtaattttgcggctgtatatgtacatgcaaacaacttctttgaagcgaaaaatcagatctcgtttggtgtattgatcaatagtgtcagcacgtc

SEQ ID NO: 205157 - DNA, 479 bp, Zea Mays
ccgacacggaggtaggagaggagggacgagggaggggaaaagagagatggtggaggcatcgccggagtccggcgccgcggcgaccggaggtgcctctagtacggcggcggtgcggaaggggaagtcatgcaagggctgcctctactactcgtcagtgctcaagtcccgcggttacaacccaatctgcgttgggatcccccgctccatcccccaagttcctaactacgtggtggatgaacctaaggaggaggcgacggcgcaggggcatgacctcaggcggttcaggtacgggtgcgcgggttactccatgttcgtggacaacagggacggccagggtggtgagagcgagggcaagacgttgttgccatattgcaggggcctcgagttattggtggacagcagattggtcgagagaaagccatcggcaactgaacaagctccagcacatgttgcaaaggatgtgtcttcatgtctccttt

SEQ ID NO: 205158 - DNA, 904 bp, Zea Mays
ccgacacggaggtaggagaggagggacgagggaggggaaaagagagatggtggaggcatcgccggagtccggcgccgcggcgaccggaggtgcctctagtacggcggcggtgcggaaggggaagtcatgcaagggctgcctctactactcgtcagtgctcaagtcccgcggttacaacccaatctgcgttgggatcccccgctccatcccccaagttcctaactacgtggtggatgaacctaaggaggaggcgacggcgcaggggcatgacctcaggcggttcaggtacgggtgcgcgggttactccatgttcgtggacaacagggacggccagggtggtgagagcgagggcaagacgttgttgccatattgcaggggcctcgagttattggtggacagcagattggtcgagagaaagccatcggcaactgaacaagctccagcacatgttgcaaaggatgctaccatccgctctcaccaacaaggacaacagagacctcagaacttgtcgaggcaggaattcttggacaggtttaagaggagcgctggactggtcgcttcaggtgttgcgaagaatctaaacaaaacagccaattatatcaaagaaaatattcaggacatgtacaccgatcgtcgtccaccaaagtagcaaccatgccgagtgattgtcgtcaagagctgaagaaatcgcttgctactggaaactttacatcaggactacctggaaactttactccactctcctcacttgttaaacgaaatggagcttttctgggataccaacttccttttctttacctgcataatcttgtaattttgcggctgtatatgtacatgcaaacaacttctttgaagcgaaaaatcagatctcgtttggtgtattgatcaatagtgtcagcacgtc

SEQ ID NO: 205159 - DNA, 880 bp, Zea Mays
cgacacggaggtaggagaggagggacgagggaggggaaaagagagatggtggaggcatcgccggagtccggcgccgcggcgaccggaggtgcctctagtacggcggcggtgcggaaggggaagtcatgcaagggctgcctctactactcgtcagtgctcaagtcccgcggttacaacccaatctgcgttgggatcccccgctccatcccccaaggaggaggcgacggcgcaggggcatgacctcaggcggttcaggtacgggtgcgcgggttactccatgttcgtggacaacagggacggccagggtggtgagagcgagggcaagacgttgttgccatattgcaggggcctcgagttattggtggacagcagattggtcgagagaaagccatcggcaactgaacaagctccagcacatgttgcaaaggatgcagcagctaccatccgctctcaccaacaaggacaacagagacctcagaacttgtcgaggcaggaattcttggacaggtttaagaggagcgctggactggtcgcttcaggtgttgcgaagaatctaaacaaaacagccaattatatcaaagaaaatattcaggacatgtacaccgatcgtcgtccaccaaagtagcaaccatgccgagtgattgtcgtcaagagctgaagaaatcgcttgctactggaaactttacatcaggactacctggaaactttactccactctcctcacttgttaaacgaaatggagcttttctgggataccaacttccttttctttacctgcataatcttgtaattttgcggctgtatatgtacatgcaaacaacttctttgaagcgaaaaatcagatctcgtttggtgtattgatcaatagtgtcagcacgtc

SEQ ID NO: 205160 - DNA, 2212 bp, Zea Mays
atcttctctcacgccgccgccgccctttccagggttccaccgagggtgttccataagggtgttccatctacgatggagcaccgcgcggcggcgccagatgtgatcgtccaggtgaactccgcagccgtggcggccgtggacgagagaatctcgacgtgtcagatcaccgaggaggaaggcggcatcgtcggccacgagcaggtccccgtcggctgcctcgcccgccggaccttcagccagtcgtacagaacgaggccccgcaaccctctggagttcaccgggtggcagctggcgctgctggcgtaccagtcgctgggcgtggtgtacggcgacatcgggacgtcgccgctctataccttctcgtccttcgcgcttccggaccccggcaccgccgacatcctcggcatcctcagcctcatcctctggacactcacgctcgtcagcctcgtcaagtacgtcttcatcgtgctccacgcagatgaccatggagaaggtggcacctttgccctgtactcgctcctgcggcagcacgtcaacttcagcggcaagtcggtgccggtgccggtcacccggctggcgtcggatgccaacctcaggttccacagcaggaagagcagccagcaaccgaggatgctcgagttcctggaaggcagcgccatggcgcaggcggtcatcacctaccttgtgctggttggaacatgcatggtgatgggtgacggtgccctcactccatccatctcagtcctgtcagcagttcaagggatccagtcaagatcttctagcatcaaacaaggccacgttgtccttctgtgcgtggttatcttggtcatccttttcctgtttcaacagtacggcacgagcaaagttggcttcaccttttctcccatcatgctcgtctggtttgcgttgatcgcgtccactggactgtacaacatcatcaagcattatcccccgatggcatactcgtgcctggtctacccatcactgatactcgcatacgctggccaggcagcatttctgatcaagaacccatctaagctcagcacaacgttctacagcagcgtcccagagccactgttttggccggtgttcgtcgtagccactttggctgccatcgttgcgagccaggcactgatatctgccagcttctccatcgtcaggcagtcggttgctctaggttgttttcctagagttaccatgaagcatacctcaaagaagtacgagggtcgagtgtactctccagagatcaactacttcttgatggttgcctgcatattgatcactgttggcttcaagggtggaccagagattgggcaagcctatgattgcacagggtggctgggttccatttgcaataactgcattcttccttataatcacactctcttggacctacgggcgaagcaagaagcaggaatacgaggtgagcaacctgatggataggcaggagttcatcaagacagtgaacacgagcaacagagtacctggaatatgcatcttctgcacggacttgatgaacggcatcccgccgattgtgcgccactacgtcgagcacatgggctgcctccgcgagctgatggtgttcgtcactgtgaggcatctgcctgtgacgtctgtgctgcctgaggagcgcttcctcttcgacaggctggagccttttggtgtctacaggtgcatagtccagtatggttacatggacacccagaacatggaggacgatgagtacgtcgtgtcgatcgttgcgtccctcaaggaaatagctcaaagcggtgctgagatcctgatgatggattccgctctagcgaacgggacgacctttgtgcttggaagggtcatcctaaacatgagtccccagcggaacaactgcttcaagcgctttgttatcaacaacctgtacaggttcctgcagaagaacttcaggtccaacatttccagtctgaagatagctcctagcaaaaccttgcaggttggaatgcaatatgagatttgagtagaggagccttgcaagatatgatggacgtgagattctagaacatgcagacgtgggtagtttagaattagatgttttttgttttgtttttgaaactagcgatctgtttgtaattaggtcagcctcgccatacaaagctaccatggtcataactttggaactatttatttgagtgtggtctttgttgcacaattgtacatttatatatttctttgaagcaag

SEQ ID NO: 205161 - DNA, 1900 bp, Zea Mays
caaggatctccgaatgagatgggataaaaaaatggcgaaatgaaattcacggtaccagggtcaaccgagcacggacgcgtaaagccaacaaggggggaccgggggagcacgaggaaaccgaggagactgacccaacccgtgcttgcggcggcgctgcgctggtgccggccacggccatgatcggcggcgggcgggcagcggatagccacccggcgtcctgctcgtcctcgtcctcgtcttcctcctcgccgtcaggcccgtcgacggggggctcccgccttcaccgcagcaagaggcgtcccgacatcctcaacatgctcatgagtgcagcatgtctcagttcatcatcttctgatactggaaaaggacaaagcaagttttcaagcaacaaagtaacacacggatttcacttagtggaaggaagatctggccatgatatggaagactaccatgtagcagagtatagatatgaaaatgatcacgaacttggtctttttgctatttatgatggacatctgggagatagtgtggccagttatttgaaagctaatctttttgacaacatactgaaagagcctctcttttggtcagaccctcaagaagcaattaaaaacgcatacagctctacaaacaaatatattctggaaaacactaggcaactaggaccaggggggtcaacagcagtcactgctattgtagttgatggtacagatatgtggattgcaaatataggtgattcaagagctgttttgtctgaaactggtactgccagccaggttactgttgatcacgaacctcataccactaatgaacgaaagaggatagaagaaaaaggtggttttgtctctacgttccccggtgacgttcctcgtgtaaacggccaacttgcggttgcaagagcatttggtgatcagagcctcaaggcacacttgagctcagagcctgatgttaagcatataaagataaattcaagcacagagtttgtcatacttgccagtgacgggttatggaaggtaatgaagaaccaggaagccgttgatctggtgaagtcaaccaaggacccgcaaacagcggcgaagcgactgacgtccgaggccctgggaaggatgagcaaggacgatatctcatgcattgtcatccgttttcgatgctgactcttgggtaatccagctcatccattgccctaagctgcctgtgtgcatcagcagaactgtttcctccgtatcgtagctggtagcgtctggatctgtttgcagctcaggatcagattggtgattggactggacaggttattgaccaaagaatagaagaatgctgggtttgggtgttttcagcgtctgcaggctgttctttttttcttcttctgtgcatatatacacgttggaatcaaatatataccgtcggactggagccaagaaaaaccatatatataccgccccaagatgcaaagatgatacagattatgtaagcttgtagacatgtagtagttggattatggcttttagtgactcgtgtgtgtggtgtgaattcctgtgtgtattgaagataaagttccgttgccattcacgtacggaaccagcgatatgctatgaacgggatcaacttcaaataacattcgtctctcctttataaaacaagaactctatcagaaattgcatactgccgtcgcgtatccagtggcaacagaaagctggatagcagggttgaaggttgaaagttttctttttttgtttgataagtgctagcacgagactgattcttacaaacaaagtgacatgtttgaggaacagcagactggcgagcctgtttggctagtctatctgctatcttgttgcgttgcactggaatcttgtaaaaagcaacattctgatttgatgtatctgagcaacattatggtacc

SEQ ID NO: 205162 - DNA, 3154 bp, Zea Mays
ccgtctttgtcctcgcgtctgctccggtcgcaggaggcaggatcgctcggctgctccgtcctccgtccgcacggccccgctccctgctgccgccacgcgaccatcgccgcagccacctcaccgagcacccccgtgcgccggtcctgccaccgagccctccacgaccccgtggccgcgcccggccccggtcgcaccgcgctccgctggaccccagtaccatgtctccaagatccactctgaccttgtaggaacaccaattccaacgattctgacggctcgcgctttcatcgaagagttgatccttgtcaggcttgtgatccgcagccgcctctgtctgatcctgctcagctctcgccagccgccgctccgccggaggcctcacgctcctcaccgcgtccgtgcttaccctgaccccaccctcacttggctcccttgaactacggcgtcatcatcgacgccgacagcaggggaagcgcgtctccgcctgatgcccggatgatagtttgaccatgttcgcaatccgttcgacgaaatgccctgtggcatttgtgggcgtagctggcaccttggtggtgcttatcaccgctgtccatgtgttcatggtgccaatacttcctgcctccttctattacttcggttctcgcagcagtataagccacccaaagaatgtcctcccagccgtcgaggtggttgactcgcgcctcaaggggtgtttcccttctgattcatatggtgctgtggcattccgaggcgcgccatggaaggctgagattggtcgatggcttgctgggtgtcatgctaactcttcgtctgttgatgttactgaggtttctcttctgcgacaggccatgggtgcaaaacgctgcgtgaaagactgcagtgctcgtggtgtttgcaactataatctgggagagtgcagatgctttcatggatattctgggaaaggatgtgaggaggttctgaacttggaatgcaaccttccaagctccccagaatggcctgtaggtcaatggatagtttccatctgtgcagctcactgtgataaaacaagggcaatgtgcttttgtgggcctgggacaaaatacccagatcgtcctgtggcagaagcttgtggttttaaaacaattttacctgcaaaacctgatggtccaaagcttactgattggaaaacacctgacctggaaaacatacttacaacaaacagcagtaagttaggatggtgtaatgtggtccctgaggacgcatattcatccaaagtgaagtttaaagaagaatgtgattgcaaatatgatggtctctgggggcagttctgtgagacacgtgctgaatgcagctgcatcaaccagtgctctggacatgggcattgccgtggtggtttctgtaaatgtgacagtggatattttgggattgattgcagtatcccatcagcatattcgcttgcatatgactggccctcgtggctccagacaccagtgaatttaccagatctgaaaactttgaacagtaccaccattggtgttaaggccgttgttcagaaaaaaaggccactgatatatgtatatgatttgccagctgagtttgacagtcatcttcttgaaggacgacattacagattccagtgtgtaaacagaatatatgatgacatgaatagaactatatggacccagcaattgtatggtgctcagatagcacttcatgagagcattcttgctagccctcaccgcactcttaatggggacgaagctgattatttctatgtgccagtgcttgactcatgtctaataactagatccgatgatgctccacatcttctattgccgagggacctgcgccgaaggagctaccatgcacttgagtactatagaatggcacatggtcacatagctcagcagtatccttactggaaccgcacttcgggaagagaccatatctggttcttttcatgggatgaaggtgcctgctatgcaccaaaagagatttggaagagcatgatgcttgtccactgggggaacactaacacaaaacataagaattcaacgacagcttattgggcagataactgggatgatattcctttggataagagaggcaaccatccatgttttgatccaagaaaggatctagtgcttccggcatggaaggaacctaacccaggggccatatggttaaaactgtgggcaaggccaaggaacaaccgtacaacacttttttatttcaacggtaatctaggttcagcatacgaaggaggccgtccagaagacacgtatagcatggggattcggcaaaagctagcagctgaatttggttccacaccaaacaagcagggaaggcttggacggcagcatgcggccgatgtgacagttacctatctacgaactgaaaaatattatgaagaattagcaagctctgttttttgtggtgtcctgccaggggatggctggagtggccgtatggaagatagcatgcttcaaggatgcattcctgtaataattcaggatggaatttttctgccatatgagaacgtgctcaactacaatagttttgcagtccgcatacaggaagatgacatcccaggcctcataagcacactccgaggaataaacgatacgcaagtagagtttatgctgggaaatgtccgccagatgtggcagaggtttttctatcgagactctatattgttagaggcgcaaagacagaaaaaactcttctctgaagaggcaccctggtctgttgaggtatcgaaacttcctgatgacgacgatgtctttgcaacgtttatacaggtattgcattataaactgtacaatgacccttggcgtcaagatttcctgcaaacaaaggatactcggctgccgaacatctgttcaagaacttcctgaagcatttagtcaggcagcattgcaactgtaaagaataagcatatattcttaggaacaaaagtacaaaactgtagatatttcttgcattctggacaattgttcttttgactgatagcccaatttaattagaccatttcctgaaaaaaaagaaaagaaaaatgcactgttttcatctatcaaaacatggatagcatacatcgcatttacagctctggtgtttgcaatcccaagctacatcgatttttaccgagaaagaattggattttgtcgtccag

SEQ ID NO: 205163 - DNA, 2892 bp, Zea Mays
cacaccacaccacagcagcatatatgccactgccctgcccaggcagccagccatgccgccaccaccccgatcccggcacagaacccagtgccagacgcggacagcgagcgcgaccacatctatctaggacccgtatctctctctctcctcccgaccagcacgtcacgtgccacggacaggggtcaagcgcggtcgccgatgtcggcagcgggcggcagcctcgcccgcgccacctcgcggcccgcggcggcagcatggctgctgctggcgctggccgcagcagcagcatcggcgctggcgctgccagcggccgcgggcggcttcagctgccgtcctgggtcccggccggtgctcttcaacttcggggactccaactccgacacgggcggcatggcggcggccaaggggtggcacctcacgcgcccggagggccgcgccttcttcccacgccccaccggccggttctgcgacggccgcctcgccatcgacttcctctgtgagtctagtccggccggcgccacccccattcctatcccatccccgaaaaaagagcagcgctctgcagaggattctgttccgttcttaatccagtcttcgccatccgtatctgaacttttgtgtcatcatccatgcggctgatactaacaattagtatagcactagtagtctagtataccacaactcatccaatacatcacccttctggagcttcagtcactgacggatgaaccccataatatcttgccatgacatctatcagcagccagccaggatctgttttccgtgcaaagtgcagatgcggtggggatgctgagaccacggcatcacgtgcaggagctcatgtattatgttgctcaagctaatcatgtgtactactaccatctgccaaccagagtacactgcctcagctaagcaacactgctaattaaggactatcacgtgaaagcgctctgctcgtaactcgaattactagattggttggcccctgtccctgttcctgtctaatttcatttagtgtcctgtccttgtgatcattcatggtcgcagcagactctgcgccagctgccttgtttccttgacacgagagtctgtctctgacctgttctctctgtcttctgcatttatattacaatgctggactgctcgttgttggtcaggccggtccgccggtgcgcgcgtgatgataaatgcccaaatttttcaaggagaggcagagctagtgcttttccaaatgcatcagctccttttttttctcttctttttttttccaaggactggcggcattcattcattcactccttcagtgtggctgctacaacatgatcccttagctagcaagcaccttttcttttgttctgtttaaataaaagaaaaggagagtatacaaattgatcttttagtatatcaatatctcgataaataacagactggtacagttataattgttctgataatagtttcataatattatggtgtgcatactacattttccaccttacaggagacgacttaaattgcacatctcaagaaagcggtgatatatatacctgtttatgcccatttctctcagagaaaataaatgggcagtaatactttcgagggagttcatttttgttccagataaactgaccactgcttttcgcctgcatggatcgtcaagccttgccaaatgcatactgagatggcctcaccttgtagtctgagcaagcgaaagcttgaacatcagctatttgagcccatttctgaaggcgttaggctccaattacagcaacggtgcaaatttcgccattgctggcgcagcaacgcaaccgcgagatgttccatttgcgttgcacatacaagtgcaggagttcttgtacttcagagatagatccttggaactcatcgatcaaggtctaagtggtccaattgatgcacaaggattccaaaacgctctatatatgatagacatagggcagaacgatgtaaacgctcttctgtcaaacttgccctatgatcaagttattgccaaattcccaccaattcttgctgagattaaggacgctgtccagactctatatagcaacggtagccgaaacttctggatacatgggacgggggctctgggttgcctgccgcagaagcttgccataccaaggaaaaacgacagcgatcttgatcagtatggctgtctcaagacctataacagagctgcagttgcgttcaacgcagcgctgggcagcctctgcgacgagctgagtgcgcagatgaaagacgcgacgcttgtgtacacggacctgttccccatcaagtatggtcttgtcgccaaccacactaaatatggttttgacaagccgctgatgacatgctgtgggtacggagggcctccctacaactacgacttcagcaagggttgccagtctaaggatgtggcggcctgcgatgacggctcgaagttcgtcagctgggatggcgtgcacctgacggaggcggccaatgcggttgtggccagagcgatactgagctcacagtactccaagcccagtctcaagtttgatcagttctgcagagcctgatacttgttagtacctcataccgtgcctttttagtttaggcaaatttactgaacacaacttggcacttcaaagtcaaaatggatggatccgcttctgataatttgattgccttatttacccgtcagggatgtgacccatcattgatctgtcagccatagcccataggccataactttggataggtgaaacttccaaatattgtgggccacatgtaccttcaaactacatgtcctatctgatatgttttcatcaaagagagaaatacaccatgggttatcaaacttcttccgtattcttatatgagttgatgaattctcaaagtgttcaaatttctcag

SEQ ID NO: 205164 - DNA, 1691 bp, Zea Mays
ttgtacagaatctggagaattgtagagtatcaagttaattttgttctgtttaagatatgtaagaaagtacataaatgtactttagattggtgaatattttgtttatagaaggacttaaagcttcattttgttgttgattttttagattgataccattttcgttggagaatcaggttcgcaaatgcgcgactctgcactgagtttaacaaaatgcttagcacaaacagcacaaaagactttcagtgattttgaagaagctgttgaaaaggatgcaacaaagaatattcatactgatggaacagttcatcctttaacaagctatgtgatcaactatgttaagtttttgtttgactaccagtcaactctaaagcagcttttccaggagttcaaggaagatgggacaggttctgagctggcagctgtaacaatgaaaatcatgcaagccttacaaaataatttagaagcaaaagcaaaacaatacaaggatcctgcattgatgcacatatttttgatgaataacattcactatattgtcaaatctgtccgcagatcagaagccaaagatttgttgggtgatgactggattcaaaggcaccgaaggattgtacaacaaaatgccaatcagtatagaaggattgcttgggcgaaggtttgacttcatcaggtggtagtggtcatgtaggaagtgatggtggcaatagcagtggagcttcaagaacagctgtgaaggagagattcaggtctttcaatgtgttgttcgaagagatctaccacaagcaatgtggctggtccgttccagacactgagctgcgcgagtcactaagactcgcggtcgctgaaatcctgttgcctgcctaccgatcattcataaaacgttttgggcctctcattgagaatagcaaagcacctgggaaatacgtgaagcacactcccgagcaactcgagctgctgctaggcaatttattcgaggggaaacaagaacgtgcttgatagtttggtaccgcccgcagcaaggatgtgctgctcttctatgtaaaatacaaaataataaaaataaaaaagatctggaggccctgttagcgttagcattgcttgtgttctccccaatccttgtttagccgcattattatttgtacagaagaatatatgtgtcagctgtgccttgtgttgatctgatagcaggcgtgttcctggtttctttaatgactggcgttggtcattcgttcgggtggagcactaagatggcgacccatctgtagtttttgagatagaaaaatacttccccctcgtcgttatttattttcggatggtgtacgcgagaggatgtgtgcctatctcttatctgtatggtatagctgccaaacaaagcaaaaagcaaagtgaagaattgaaggccatgctgatacacaagaagttaaaacctcctgcgagagtcggtgcagacgcgtccgtggccgccatagacgacgccgtgcagccgccagccggccgagctgaggtcccggcctgcaaggcagcagcatgtcacaaccgtggtgccggatggtgaataggaaaggggtggcatgtgtgccaacaggatgtatccatgtatcgtgatggtgggtgccatgtgggcttgtattataaggagtgcggtcactagttaaaccctgagagttgtggataaagacatcaagaaataaaaggaa

SEQ ID NO: 205165 - DNA, 1312 bp, Zea Mays
gcagatagttgaagtgggccactcccacagccacctccttctctccggtagcagtaacgcagaagaggcaaacgggcagcgagctagatctcgcgtccccgctgcgactgtgaagccaccgtcgtcagatcggacaaggcgccggagcctcagcaatccctgagcagactagaggagtagctaaggcaaagggaggtggcaaagatgctgccgacgaccgcgtccaaggggcgcggggcctcccgctccgccccgccgctcttcggtccctacctccgccgcatcgtcaagctatcagcacaccaaatatcacaagcaaacaaagaaccagtgggcccgtgatgatcctgcatttgttgttattctgattcttttcctcgtgtttgcaacatcagcttactgtgcagcatatggagagagtgcctcacatgctgctctaacaatcacttcggttgtgtttctccatttcttgtttgctgggatagttttggccacactttgctggttccttacaaattcttacttgagagaggaacctaacagccatgttgttgagcaacgcgtggagtggctctatgcatttgacgttcattgtaactcgttctttcctgcgtttgtcatcctatatgtggtgcagtattttctgtcgcctctattggtcgcgcatggcttctttccagctttgttatctaatctactcttcgtggtggcaatttcttattatcactacctgaactttctaggatatgatgttcttccatttctggatagaacaacattcttcctgtacccgattggtctcgtcatcatcctgtctccacttatgatactaatagggttcaatccgacaagatattttctaagcttgtacttcggttaaagtctacggctagaatgccatgtacaagcaaaaatatggtgattggcgataactaatggcagatctggatacatactctgtagtaaagcattttagatatcttgtgtgaacgggggcgagtgaagttcagtaaagctcggagcattctatggatgtatcaggtgcctgtggcaaggctaacaatggaagacatatagtcttttgattgttatcaaatatcctttttgggtgtcaatttgttgttcataatatgagctgtttgcgttactttgggcccagtgaccagtgtatacttgtagtagaactgctacgtagagtctattgtactatcacatcggcatcagaattgcatcaagttctaccaccagtcatctctgtcatgtttactgtaagggcattctcgttctcgctaaagctcaatttttcgccggt

SEQ ID NO: 205166 - DNA, 1762 bp, Zea Mays
ctctctctccccctctctcctctcactcctcagtcctcaactcctcatcctcactaccaaccaaggcactttctcgcctcccccgtcttcgcccccttcttttctctctctctctctctctctctctctctctctctctctctctctgtaagttgccaaatcgcagctgcagcaacaaccgatccaatacatactaggttccattgcatcacacatcagtcactccaaaccatcaaatcacacacccatcagatcacaaaggcaaagaggagagagagagaaagagggatgatgaggacgacgatgagagagagatactactaaactatctatccatcaatcaatcaggtagcccggcagcaatcgcgtgccgcctttccactcacgtacaccaccacctcccaggctcagctcggttcgttcgttgccgcgtcaaatcgggacaagaagccagccggacctgttgcagtgttgcttcgcctgccctgctgctgttgcttgcgccacgcacgcacgtacctgaagaaagcagcgacggattgatcgaccggtggttcgctgtcgccacggccggcatgtcgtcctcgtcctcgtcctcgtcgtcctccgccgccacggtgttcccgcggtccccgcagctgccgcctccggtcctggtggagaacggcctcacgccgctgcatcagcttacgccggtagccgcggccgcgccggccgccgagcagctctgctacgtgcactgctacttctgcgacaccgtcctcgtcgtgagcgtgcctacgagcagcttgttcaagacggtgacggtacgatgcggccactgcagcagcttgctcaccgtcgacatgaggggcctcctcttcccgggcacgccgacggacacggtcgcgggggccgcaccaccaccagctgctgacactagtacgactaccaccaccatcaccacggcgccgccgccggccaactcggtcaacaacgggcagttccacctcccccactcgctcaaccaccctcaccaccaatccctcctggtggacgagatatccagcgccgcgaacccgagcctgcagttgcagctggagcagcacggcggcctcggcggcctgatactcggcggcagcaggaacacggccgcgccgcctccgccgcagccgcctgcagcgggtaaaggggccaaagagccgtcgccgcgcgctaatcccgccgtcaacagacggacgaaatccaacgcatcaaggctggcaatcccaacatctcgcacagggaggccttcagcgcggcggccaagaactgggcgcactttccacatatccactttggactcatgccggatcaccaggggctcaagacgacaagcctgctacctcaggatcaccagagaaaggacgggcttcttaaggaagggctctacgcggcggcggcggcggccgcagctcatgcggcagccaacatggggattgctccatactaattaatttacaattactcctcctcaagcttgctactgatggtaccttgcttccgagaatctcccttctttacattagcttgttaaacgttccaaatcacgtatgttccttcgatcgagctggtctctagtatatataatctactacgtttttgcgttggttaatatatatactccttccggggccccattcttctctctctctcttgcatctatgttttagttgctgctgcttactgtgtgctatcagtctagctagcacgtaccagccaggctaccactagttaaatatat

SEQ ID NO: 205167 - DNA, 2127 bp, Zea Mays
ctcagtcctcaactcctcatcctcactaccaaccaaggcactttctcgcctcccccgtcttcgcccccttcttttctctctctctctctctctctctctctctctctctctctctctctgtaagttgccaaatcgcagctgcagcaacaaccgatccaatacatactaggttccattgcatcacacatcagtcactccaaaccatcaaatcacacacccatcagatcacaaaggcaaagaggagagagagagaaagagggatgatgaggacgacgatgagagagagatactactaaactatctatccatcaatcaatcaggtagcccggcagcaatcgcgtgccgcctttccactcacgtacaccaccacctcccaggctcagctcggttcgttcgttgccgcgtcaaatcgggacaagaagccagccggacctgttgcagtgttgcttcgcctgccctgctgctgttgcttgcgccacgcacgcacgtacctgaagaaagcagcgacggattgatcgaccggtggttcgctgtcgccacggccggcatgtcgtcctcgtcctcgtcctcgtcgtcctccgccgccacggtgttcccgcggtccccgcagctgccgcctccggtcctggtggagaacggcctcacgccgctgcatcagcttacgccggtagccgcggccgcgccggccgccgagcagctctgctacgtgcactgctacttctgcgacaccgtcctcgtcgtgagcgtgcctacgagcagcttgttcaagacggtgacggtacgatgcggccactgcagcagcttgctcaccgtcgacatgaggggcctcctcttcccgggcacgccgacggacacggtcgcgggggccgcaccaccaccagctgctgacactagtacgactaccaccaccatcaccacggcgccgccgccggccaactcggtcaacaacgggcagttccacctcccccactcgctcaaccaccctcaccaccaatccctcctggtggacgagatatccagcgccgcgaacccgagcctgcagttgcagctggagcagcacggcggcctcggcggcctgatactcggcggcagcaggaacacggccgcgccgcctccgccgcagccgcctgcagcgggtaaaggggccaaagagccgtcgccgcgcgctaatcccgccgtcaacagacctccggagaagaggcagcgcgtgccgtcggcctacaaccgcttcatcaagtgggtgccatgcatgccagcagtatcatgctactacatttttcatgctgtgcgttacagtgtacaagtcgtatggctggccggtggttctctcatcggccacggcaatgcatgccggccgcctcgttggcagcaggaagagggaagagggagacgaccctgatggtttttgttctcgttcagtcgtcgttcgctgaggaagagagagagagagaggcagatcatgctatagtgacgtgtcgctgagctagctaggtagcttctgatcatatgcatcgatctgacgtctcccttttgcttttcttttttctgctggctctctccctcggggaatacgattgcagggacgaaatccaacgcatcaaggctggcaatcccaacatctcgcacagggaggccttcagcgcggcggccaagaactgggcgcactttccacatatccactttggactcatgccggatcaccaggggctcaagacgacaagcctgctacctcaggatcaccagagaaaggacgggcttcttaaggaagggctctacgcggcggcggcggcggccgcagctcatgcggcagccaacatggggattgctccatactaattaatttacaattactcctcctcaagcttgctactgatggtaccttgcttccgagaatctcccttctttacattagcttgttaaacgttccaaatcacgtatgttccttcgatcgagctggtctctagtatatataatctactacgtttttgcgttggttaatatatatactccttccggggccccattcttctctctctctcttgcatctatgttttagttgctgctgcttactgtgtgctatcagtctagctagcacgtaccagccaggctaccactagttaaatatat

SEQ ID NO: 205168 - DNA, 2827 bp, Zea Mays
ggcgaagctagacactaacaccttgtctgcgagtgtgtcgtctatatatatacacgatcacgtaccagtaccaactggttccgtctgtgttttcttgtggttctcgcgtgctactgtgctgagaggggaccaggaagaatccgtcgtccggccggctcgctctctgccggccatgacgagcgccaataaggcgaagctccagctgcaggagagggtcccgctcccccgcacggcgtggaagctggccgacctcgccgtcctttccctgctcctggccctcctcgcccgccgtgcgtcctcgctggtgtcgtcgggcggcacggcggccgcgtgcacgtggtgctgggtcgccgcgctcatttgcgaggcgtggttcacggtggtctggctgctcaacatgaacgccaaatggaaccccgtccgcttcgtcacgcaccctgaacgcctcgccggatattgggcgggcgacgacgagctgctgccggcggtggacatgttcgtgacgacggcggacccgaagctggagccggcggtggtgacggtgaacacggtgctgtcgctgctggcgctggactaccccgcgggcaagctgtcgtgctacgtctccgacgacggctgctcggcggtgacatgctacgcgctgcgcgaggccgccgagttcgccaagctctgggtgccgttcaccaggaagcacggcgccaaggtcagggcccccttcgcgtacttctcctcctcctccggcggcggggcggcggagcgtggcggtggcggtggggccgccgacgccgacgccgagttcctgcgcgcttggacgtccatgaagaacgagtacgaggagctggtccgccggatcgagagcgccgaggagaagtctctagtccggcgcggcgacggcgcgttcgccgagttcgtgggtgctgaccgcgggaaccacccgaccataatcaaggtcctgtgggacaacgacagcagcaagagcgagagcgatgagcaggcggcaggggatggagtcccaagcctcatatacgtctcgagggagaagagccgcacgcagccccaccacttcaaggccggggccatgaacgtcctgacgagggtgtccgcggtgctgaccaacgcgccgatcatgctgaacgtggactgcgacatgttcgccaacaacccgcaggcggccctccacgccatgtgcctcctcctgggcttcgacgacgaggtccacagcggcttcgtccaggcgccgcagcggttctacggcggcctcgcggacgaccctttcgggaaccagatgcaggttatattcgagaaagttggacacggaattgccggactccaaggcatattttactgcgggacgggttgctttcaccgcaggaaagtcatgtacggcgtgccaccgggctccggcaccggcgccaccaaagctctggcagcagcagattcaccgtcctacaaggagctacagaagaagtttggcagttcgaaagaactgatcgagtcggcgaggagcatcatcacgtcgaaagaagcgccagctgcggtggcagatctaacgagccgcgtcgaagtggcgaagcaagtctctgcctgcagctacgagacgggcacgagctggggtcaggaggttggctgggtgtacgggtccatgaccgaggacgtcctgacggggcagcgcatccacgccgccggctggaggtcggcgctcctgagcccggacccaccggcgttcctcggcggcgcgcccaccggcgggcccgccagcctcacccagtacaagagatgggcgacgggcctgctggagatcgtcctcagccgccacaacccgttcctcctctccgcgtccaagcgcctccgtttccggcagtgcctcgcctaccttgtcatcgacgtgtggcccgtcagggcgcccttcgagctctgctacgcgctgctcggaccctactgcctcatcgccaaccgctccttcctgccaaaggcatcggagcccggcttcgtcgttccgctggcgctgttcctggcctacaacgcgtacaacctgggcgagtacgtggactgccggctctcggcgcgcgcctggtggaacaaccagcggatgcagcggatcacgtcgtcctccgcatggctgctcgcgttcctcaccgtggtcctcaagacggtgggcctctcggagacggtgttcgaggtgacacgcaaggagcagcagcagcagcagggctcgcccgacggcgacggcgccgacgccgacccggggcggttcaccttcgactcgtcgccggtgttcgtcccgccggcggcgctcgcgatgctgagcgtcgtcgccgtcgccgtcggagcgtggagggcggtcaccggtggcggcggcggcccgggcgtcggggagttcgtgtgctgcgcctggcttctgctctgcttctggccgttcgtgaggggcctcgtcggcggcaggggaagctacggcatcccctggagcgtcaggatcaaggctgccctgctcgtggccgcgttcgtgcacctgtccacacgcaagtaacttgcccggccccggcgtcgactcaccactgctactgctgcggaaggttttcatgtcagagacccgtaataatgcagacaacagcatgttccgcctaagatttgtacacaactctctgcttccactgcttgtatagaattcttgctcaagattacaagtcgaggccagtggtcggcgatagaaacagcgagtattattttatcctactcccaccagttcctgagcgtcgattctgggccgcgtctgaggctgtgagccaaggataaccaaatcgtctggagtaaaaaaaaaatccgtacc

SEQ ID NO: 205169 - DNA, 2744 bp, Zea Mays
caactggttccgtctgtgttttcttgtggttctcgcgtgctactgtgctgagaggggaccaggaagaatccgtcgtccggccggctcgctctctgccggccatgacgagcgccaataaggcgaagctccagctgcaggagagggtcccgctcccccgcacggcgtggaagctggccgacctcgccgtcctttccctgctcctggccctcctcgcccgccgtgcgtcctcgctggtgtcgtcgggcggcacggcggccgcgtgcacgtggtgctgggtcgccgcgctcatttgcgaggcgtggttcacggtggtctggctgctcaacatgaacgccaaatggaaccccgtccgcttcgtcacgcaccctgaacgcctcgccggatattgggcgggcgacgacgagctgctgccggcggtggacatgttcgtgacgacggcggacccgaagctggagccggcggtggtgacggtgaacacggtgctgtcgctgctggcgctggactaccccgcgggcaagctgtcgtgctacgtctccgacgacggctgctcggcggtgacatgctacgcgctgcgcgaggccgccgagttcgccaagctctgggtgccgttcaccaggaagcacggcgccaaggtcagggcccccttcgcgtacttctcctcctcctccggcggcggggcggcggagcgtggcggtggcggtggggccgccgacgccgacgccgagttcctgcgcgcttggacgtccatgaagaacgagtacgaggagctggtccgccggatcgagagcgccgaggagaagtctctagtccggcgcggcgacggcgcgttcgccgagttcgtgggtgctgaccgcgggaaccacccgaccataatcaaggtcctgtgggacaacgacagcagcaagagcgagagcgatgagcaggcggcaggggatggagtcccaagcctcatatacgtctcgagggagaagagccgcacgcagccccaccacttcaaggccggggccatgaacgtcctgacgagggtgtccgcggtgctgaccaacgcgccgatcatgctgaacgtggactgcgacatgttcgccaacaacccgcaggcggccctccacgccatgtgcctcctcctgggcttcgacgacgaggtccacagcggcttcgtccaggcgccgcagcggttctacggcggcctcgcggacgaccctttcgggaaccagatgcaggttatattcgagaaagttggacacggaattgccggactccaaggcatattttactgcgggacgggttgctttcaccgcaggaaagtcatgtacggcgtgccaccgggctccggcaccggcgccaccaaagcagattcaccgtcctacaaggagctacagaagaagtttggcagttcgaaagaactgatcgagtcggcgaggagcatcatcacgtcgaaagaagcgccagctgcggtggcagatctaacgagccgcgtcgaagtggcgaagcaagtctctgcctgcagctacgagacgggcacgagctggggtcaggaggttggctgggtgtacgggtccatgaccgaggacgtcctgacggggcagcgcatccacgccgccggctggaggtcggcgctcctgagcccggacccaccggcgttcctcggcggcgcgcccaccggcgggcccgccagcctcacccagtacaagagatgggcgacgggcctgctggagatcgtcctcagccgccacaacccgttcctcctctccgcgtccaagcgcctccgtttccggcagtgcctcgcctaccttgtcatcgacgtgtggcccgtcagggcgcccttcgagctctgctacgcgctgctcggaccctactgcctcatcgccaaccgctccttcctgccaaaggcatcggagcccggcttcgtcgttccgctggcgctgttcctggcctacaacgcgtacaacctgggcgagtacgtggactgccggctctcggcgcgcgcctggtggaacaaccagcggatgcagcggatcacgtcgtcctccgcatggctgctcgcgttcctcaccgtggtcctcaagacggtgggcctctcggagacggtgttcgaggtgacacgcaaggagcagcagcagcagcagggctcgcccgacggcgacggcgccgacgccgacccggggcggttcaccttcgactcgtcgccggtgttcgtcccgccggcggcgctcgcgatgctgagcgtcgtcgccgtcgccgtcggagcgtggagggcggtcaccggtggcggcggcggcccgggcgtcggggagttcgtgtgctgcgcctggcttctgctctgcttctggccgttcgtgaggggcctcgtcggcggcaggggaagctacggcatcccctggagcgtcaggatcaaggctgccctgctcgtggccgcgttcgtgcacctgtccacacgcaagtaacttgcccggccccggcgtcgactcaccactgctactgctgcggaaggttttcatgtcagagacccgtaataatgcagacaacagcatgttccgcctaagatttgtacacaactctctgcttccactgcttgtatagaattcttgctcaagattacaagtcgaggccagtggtcggcgatagaaacagcgagtattattttatcctactcccaccagttcctgagcgtcgattctgggccgcgtctgaggctgtgagccaaggataaccaaatcgtctggagtaaaaaaaaaatccgtacc

SEQ ID NO: 205170 - DNA, 2517 bp, Zea Mays
gtactgtactgtacaccaccaagacggcgggcgacgacgagctgctgccggcggtggacatgttcgtgacgacggcggacccgaagctggagccggcggtggtgacggtgaacacggtgctgtcgctgctggcgctggactaccccgcgggcaagctgtcgtgctacgtctccgacgacggctgctcggcggtgacatgctacgcgctgcgcgaggccgccgagttcgccaagctctgggtgccgttcaccaggaagcacggcgccaaggtcagggcccccttcgcgtacttctcctcctcctccggcggcggggcggcggagcgtggcggtggcggtggggccgccgacgccgacgccgagttcctgcgcgcttggacgtccatgaagaacgagtacgaggagctggtccgccggatcgagagcgccgaggagaagtctctagtccggcgcggcgacggcgcgttcgccgagttcgtgggtgctgaccgcgggaaccacccgaccataatcaaggtagagagatgaactgatgctcgtcggtcgagcactgcagcacgcagcgcgtgtcatcatggcatagtcgtgtgtgacgatcgtgaatcaccatcttctgctggcatgcgcgagtgctcggcaggtcctgtgggacaacgacagcagcaagagcgagagcgatgagcaggcggcaggggatggagtcccaagcctcatatacgtctcgagggagaagagccgcacgcagccccaccacttcaaggccggggccatgaacgtcctgacgagggtgtccgcggtgctgaccaacgcgccgatcatgctgaacgtggactgcgacatgttcgccaacaacccgcaggcggccctccacgccatgtgcctcctcctgggcttcgacgacgaggtccacagcggcttcgtccaggcgccgcagcggttctacggcggcctcgcggacgaccctttcgggaaccagatgcaggttatattcgagaaagttggacacggaattgccggactccaaggcatattttactgcgggacgggttgctttcaccgcaggaaagtcatgtacggcgtgccaccgggctccggcaccggcgccaccaaagctctggcagcagcagattcaccgtcctacaaggagctacagaagaagtttggcagttcgaaagaactgatcgagtcggcgaggagcatcatcacgtcgaaagaagcgccagctgcggtggcagatctaacgagccgcgtcgaagtggcgaagcaagtctctgcctgcagctacgagacgggcacgagctggggtcaggaggttggctgggtgtacgggtccatgaccgaggacgtcctgacggggcagcgcatccacgccgccggctggaggtcggcgctcctgagcccggacccaccggcgttcctcggcggcgcgcccaccggcgggcccgccagcctcacccagtacaagagatgggcgacgggcctgctggagatcgtcctcagccgccacaacccgttcctcctctccgcgtccaagcgcctccgtttccggcagtgcctcgcctaccttgtcatcgacgtgtggcccgtcagggcgcccttcgagctctgctacgcgctgctcggaccctactgcctcatcgccaaccgctccttcctgccaaaggcatcggagcccggcttcgtcgttccgctggcgctgttcctggcctacaacgcgtacaacctgggcgagtacgtggactgccggctctcggcgcgcgcctggtggaacaaccagcggatgcagcggatcacgtcgtcctccgcatggctgctcgcgttcctcaccgtggtcctcaagacggtgggcctctcggagacggtgttcgaggtgacacgcaaggagcagcagcagcagcagggctcgcccgacggcgacggcgccgacgccgacccggggcggttcaccttcgactcgtcgccggtgttcgtcccgccggcggcgctcgcgatgctgagcgtcgtcgccgtcgccgtcggagcgtggagggcggtcaccggtggcggcggcggcccgggcgtcggggagttcgtgtgctgcgcctggcttctgctctgcttctggccgttcgtgaggggcctcgtcggcggcaggggaagctacggcatcccctggagcgtcaggatcaaggctgccctgctcgtggccgcgttcgtgcacctgtccacacgcaagtaacttgcccggccccggcgtcgactcaccactgctactgctgcggaaggttttcatgtcagagacccgtaataatgcagacaacagcatgttccgcctaagatttgtacacaactctctgcttccactgcttgtatagaattcttgctcaagattacaagtcgaggccagtggtcggcgatagaaacagcgagtattattttatcctactcccaccagttcctgagcgtcgattctgggccgcgtctgaggctgtgagccaaggataaccaaatcgtctggagtaaaaaaaaaatccgtacc

SEQ ID NO: 205171 - DNA, 1216 bp, Zea Mays
ttttaacactgttggctgggtgtacgggtccatgaccgaggacgtcctgacggggcagcgcatccacgccgccggctggaggtcggcgctcctgagcccggacccaccggcgttcctcggcggcgcgcccaccggcgggcccgccagcctcacccagtacaagagatgggcgacgggcctgctggagatcgtcctcagccgccacaacccgttcctcctctccgcgtccaagcgcctccgtttccggcagtgcctcgcctaccttgtcatcgacgtgtggcccgtcagggcgcccttcgagctctgctacgcgctgctcggaccctactgcctcatcgccaaccgctccttcctgccaaaggcatcggagcccggcttcgtcgttccgctggcgctgttcctggcctacaacgcgtacaacctgggcgagtacgtggactgccggctctcggcgcgcgcctggtggaacaaccagcggatgcagcggatcacgtcgtcctccgcatggctgctcgcgttcctcaccgtggtcctcaagacggtgggcctctcggagacggtgttcgaggtgacacgcaaggagcagcagcagcagcagggctcgcccgacggcgacggcgccgacgccgacccggggcggttcaccttcgactcgtcgccggtgttcgtcccgccggcggcgctcgcgatgctgagcgtcgtcgccgtcgccgtcggagcgtggagggcggtcaccggtggcggcggcggcccgggcgtcggggagttcgtgtgctgcgcctggcttctgctctgcttctggccgttcgtgaggggcctcgtcggcggcaggggaagctacggcatcccctggagcgtcaggatcaaggctgccctgctcgtggccgcgttcgtgcacctgtccacacgcaagtaacttgcccggccccggcgtcgactcaccactgctactgctgcggaaggttttcatgtcagagacccgtaataatgcagacaacagcatgttccgcctaagatttgtacacaactctctgcttccactgcttgtatagaattcttgctcaagattacaagtcgaggccagtggtcggcgatagaaacagcgagtattattttatcctactcccaccagttcctgagcgtcgattctgggccgcgtctgaggctgtgagccaaggataaccaaatcgtctggagtaaaaaaaaaatccgtacc

SEQ ID NO: 205172 - DNA, 1362 bp, Zea Mays
gatgttgtctttataaagtgcagattcactattttaactctcgtggcaacgaaatgacacgttagttcataaaaccaaatacgctaactttttctgatcggcatccaacgacgcaattgacatcccctcgcctaccccagctctacccgcgacgaagcatcaccaggaaggatgacgtgctcaatggatctcccggccaagggcgggttcagcttcgacctgtgccgccgcaacagtatgctggagaagaacgggctcaaactcccgggattcaggaagaccggaacaaccatcgtcggcctcgtctttcaggatggggttgttcttggggcagacacaagagcaactgaggggcctatagttgctgataagaattgtgagaagatccactttatggcgccaaacatttattgttgtggagcaggaactgctgctgacactgaggctgttacagacatggtcagctcgcagctacagctgcaccgttacgcaacgggtcgcgaatctagagtcgtaactgctcttacactgctgaagtcacatctctttaggtatcaaggccatgtcagtgctgcccttgttcttggtggagtggattgtactggaccgcatcttcacactgtttatccacacggctccactgatactcttccttttgccacgatgggttctggatcccttgctgcaatgtcagtgtttgaatcgaagtataaagagggcctcactagggaagagggaatacaactggtgtcagaagcaatatgtgcaggtatcttcaatgacttgggtagtggaagcaatgtggatgtctgcgtgataaccaaggggaagacagaatacttgagaaaccaccagttgccgaatcccagaacttatgttagttcaaagggatatagcttcaccaaggggcagactgaggtgttgtccgcaaagatcacacatctcaagcagaaggttgaggtcactgagggcggtgatgctatggaggagtgatcctgtatgcttgcatccagataaatctcaaatccgaaagtcattgagttatcttctgacgacagttgtgggccagtggcccaaagcatgctgagggcagccatggctctcagggcatcgtgtgtatgcttgttgaggttcctatgctctaggctcactcaaatctggaatcactgaggctcactgaggttcctatgctctggttccaataattctatgacaacattgtaagagcatgtttggatcggtgcctaacttgccacactttgcctaacttttctgcctaaggttagttcttcaattcgagcgactaaccttaggcaaagtgtggcacaattagccacgaaccaaacatgtcttaaaactatg
